(19) United States
(12) Patent Application Publication
(10) Pub. No.: US 2019/0112380 A1
(43) Pub. Date: Apr. 18, 2019

(54) CHIMERIC ANTIGEN RECEPTORS TARGETING CANCER

(71) Applicant: University of Southern California, Los Angeles, CA (US)

(72) Inventor: Preet M. Chaudhary, Toluca Lake, CA (US)

(21) Appl. No.: 16/089,106

(22) PCT Filed: Mar. 29, 2017
(86) PCT No.: PCT/US17/24843

§ 371 Date: Sep. 27, 2018

Related U.S. Application Data
(60) Provisional application No. 62/314,864, filed on Mar. 29, 2016.

(51) Int. Cl. C07K 16/28; A61K 35/17; A61K 45/06; A61P 35/00

(52) U.S. Cl. CPC C07K 16/2866; C07K 16/2803; A61K 35/17; A61K 45/06; C07K 2317/31; C07K 2319/02; C07K 2319/03; C07K 2317/622; A61P 35/00

(57) ABSTRACT

Provided herein is a composition comprising, a cell, comprising nucleic acids encoding a chimeric antigen receptor (CAR) and one or more of signaling proteins selected from K13-vFLIP, MC159-vFLIP, cFLIP-L, cFLIP-p22, HTLV1-Tax and HTLV2-Tax, wherein the CAR comprises an a) extracellular antigen specific domain, b) a transmembrane domain and c) an intracellular signaling domain comprising an immunoreceptor tyrosine-based activation motif (ITAM); wherein c) is located at the C-terminus of the chimeric receptor. In some embodiments, the CAR further comprises one or more co-stimulatory domains. Also provided herein are methods for treating diseases using the compositions described herein.

### CROSS-REFERENCE TO RELATED APPLICATIONS

[0001] This application claims benefit of priority under 35 U.S.C. § 119(e) of U.S. Provisional Patent Application No. 62/314,864 filed on Mar. 29, 2016, the contents of which are incorporated by reference in their entirety.

### STATEMENT REGARDING FEDERALLY SPONSORED RESEARCH OR DEVELOPMENT

[0002] This invention was made with government support under Grant No. DE019811 awarded by National Institutes of Health. The government has certain rights in the invention.

### FIELD OF INVENTION

[0003] Provided herein are chimeric antigen receptors for treating cancers.

### BACKGROUND

[0004] All publications herein are incorporated by reference to the same extent as if each individual publication or patent application was specifically and individually indicated to be incorporated by reference. The following description includes information that may be useful in understanding the present invention. It is not an admission that any of the information provided herein is prior art or relevant to the presently claimed invention, or that any publication specifically or implicitly referenced is prior art.

[0005] Adoptive T-cell immunotherapy has risen to the forefront of treatment approaches for cancer. T cells can be engineered to express the genes of chimeric antigen receptors (CARs) that recognize tumor associated antigens. CARs are synthetic immune-receptors, which can redirect T cells to selectively kill tumor cells. The general premise for their use in cancer immunotherapy is to rapidly generate tumor-targeted T cells, bypassing the barriers and incremental kinetics of active immunization and thereby act as ‘living drugs’. Unlike the physiologic T-cell receptor (TCR), which engages HLA-peptide complexes, CARs engage molecules that do not require peptide processing or HLA expression to be recognized. CARs therefore recognize antigen on any HLA background, in contrast to TCRs, which need to be matched to the haplotype of the patient. Furthermore, CARs can target tumor cells that have down-regulated HLA expression or proteasomal antigen processing, two mechanisms that contribute to tumor escape from TCR-mediated immunity. Another feature of the broad applicability of CARs is their ability to bind not only to proteins but also to carbohydrate and glycolipid structures, again expanding the range of potential targets.

[0006] Initial first-generation CARs were constructed through the fusion of a scFv (single chain fragment variable)-based antigen binding domain to an inert CD8 transmembrane domain, linked to a cytoplasmic signaling domain derived from the CD3-ζ or Fc receptor γ chains (FIG. 1).

[0007] Although CD3-ζ chain aggregation is sufficient to enable lytic activity of T-cells, they failed to elicit a robust cytokine response, including interleukin-2 (IL-2), and support T-cell expansion upon repeated exposure to antigen. For optimal activation and proliferation, T cells require both T-cell receptor engagement and signaling, as well as costimulatory signaling through costimulatory receptors (i.e., CD28, 4-1BB, OX-40) on T cells binding to cognate ligands (i.e., CD80/86, 4-1BBL, OX-40L) expressed either by the targeted tumor cell or the antigen-presenting cells. To overcome the lack of T-cell co-stimulation, first generation CARs were further modified by incorporating the cytoplasmic signaling domains of T-cell costimulatory receptors. These second-generation CARs (FIG. 1) enhanced signaling strength and persistence of the modified T cells, leading to superior antitumor activity. But, which second-generation CAR is the best is not known and each one has their own strengths and weakness. For example, in clinics the 4-1BB design appears to favor persistence, with CD19-CAR T cells detectable out to at least 6 months in a majority of patients, whereas the CD28 costimulatory domain containing CD19 CAR T cells were typically undetectable beyond 3 months, but less severe cytokine release syndrome (CRS) and a lower CD19-negative relapse rate were observed using the CD28-based CAR T cells.

[0008] Despite the success with CAR-T cells, there are several limitation to this approach. In majority of patients who respond to engineered CAR T cells, excessive release of proinflammatory cytokines causes symptoms that include fevers, hypotension, hypoxemia, cardiac dysfunction, kidney failure and electrolyte abnormalities, collectively termed as “Cytokine release syndrome' (CRS). In some cases, CAR therapy can lead to neurologic symptoms including tremor, seizures and can be fatal. Strategies to counteract CRS and neurological complications include immunosuppressive agents (e.g., steroids) and Tocilizumab, a monoclonal antibody against IL-6 receptor. However, these strategies are not uniformly successful. The instant invention provides novel approaches to control the activity of CAR-T cells so as to prevent and/or treat the above complications.

[0009] The CAR constructs in current clinical use are artificial in design as they represent fusion of several different proteins. In particular, inclusion of costimulatory domain in the CAR construct results in non-physiological signaling through the receptor, which in turn could contribute to their toxicity. Some CARs show tonic antigen-independent signaling, which leads to unrestrained cellular activation, eventually resulting in apoptosis, excessive cytokine release independent of cognate antigens, and immunologic exhaustion. Frigault et al demonstrated that expression of some CARs containing CD28 and CD3z tandem signaling domains leads to constitutive activation and proliferation of the transduced primary human T cells which was related to inferior in vivo efficacy (Frigault et al., Cancer immunology research 3:356-67, 2015). One mechanism that was found to result in the phenotype of CARs with continuous T-cell proliferation was high density of CARs at the cell surface (Frigault et al., Cancer immunology research 3:356-67, 2015). Long et al demonstrated that early T cell exhaustion is a primary factor limiting the antitumor efficacy of CAR-expressing T cells and that CAR structure has a central role in predisposing CAR T cells to chronic activation and exhaustion (Long et al., Nat Med 21:581-90, 2015). They showed that tonic CAR CD3-z phosphorylation, triggered by antigen-independent clustering of CAR single-chain variable fragments, can induce early exhaustion of CAR T cells that limits antitumor efficacy (Long et al., Nat Med 21:581-90, 2015). Thus, there is a need for improving the CAR design to achieve long term persistence of CAR modified T cells without the risk of excessive toxicity, such as CRS.

[0010] Most CAR constructs in current clinical trials are based on murine monoclonal antibodies. Immunogenicity of these murine monoclonal antibodies based construct has been also postulated to limit their in vivo persistence and efficacy. This problem can be overcome with the use of CAR constructs described herein that are based on human or humanized antibodies.

[0011] The polyclonal nature of the immune response is key to its success in controlling various infections. In contrast, the current CAR therapies generally rely on targeting of a single antigen and/or single epitope of a single antigen. Loss of the targeted antigen or the targeted epitope is a frequent cause of failure of the current CAR therapies. To overcome this limitation, the instant invention provides CAR against multiple antigens and against multiple epitopes of a single antigen. These CARs can be used in suitable combinations to provide a polyclonal adaptive immune response for the prevention or treatment of diseases, such as cancer, infectious diseases, autoimmune diseases, allergic diseases and degenerative diseases.

[0012] CD19 is an attractive target for immunotherapy because it is uniformly expressed by the vast majority of B-cell malignancies, it is not expressed by normal non-hematopoietic tissues, and among hematopoietic cells, it is only expressed by B-lineage lymphoid cells. Early experiments demonstrated that anti-CD19 CARs could activate T cells in a CD19-specific manner. T cells genetically modified to express these CARs could kill CD19⁺ primary leukemia cells in vitro and eliminate CD19⁺ target cells in murine xenograft models. Even though, initial clinical results with first-generation CD19-targeted CAR-modified T cells were disappointing, T cells engineered to express second-generation CARs have demonstrated impressive clinical efficacy with significant improvements in patient outcomes for a number of B-cell malignancies, the notable being the dramatic clinical responses observed in patients with relapsed B-cell ALL.

[0013] Anti-CD19 CART therapy as proof-of-concept has been successful in part due to the tissue restriction of CD19 to B cells and by the clinical tolerability of prolonged B-cell depletion. However, in other settings, CART-based targeting of antigens expressed at low levels by normal tissues has led to significant toxicities. The paucity of well-characterized, truly tumor-specific surface antigens in myeloid malignancies, such as acute myeloid leukemia (AML), chronic myeloid leukemia (CIVIL) and myelodysplastic syndrome MDS, has necessitated consideration of CAR-T tumor-targeting strategies that may also affect normal tissues, such as bone marrow.

### SUMMARY

[0014] The following embodiments and aspects thereof are described and illustrated in conjunction with systems, compositions and methods which are meant to be exemplary and illustrative, not limiting in scope.

[0015] In certain embodiments, the present invention provides compositions comprising genetically engineered effector cells (such as NK cells and T cells) that include polynucleotides that encode chimeric antigen receptors that can be used on adoptive cell therapy for treatment of cancer, infectious, autoimmune and degenerative diseases.

[0016] In some embodiments, provided herein are polynucleotides encoding chimeric antigen receptors (CARs) comprising an antigen specific domain (ASD), an extracellular hinge or spacer region (HR), a transmembrane domain (TMD), a costimulatory domain (CSD) and intracellular signaling domain (ISD), wherein the antigen binding domain targets any one or more of the targets set forth in Table 21. In one embodiment, the CAR targets CD19 and comprises the V_{L} and V_{H} of Bu12 described in Table 21 and set forth in SEQ ID NO: 1470 and SEQ ID NO: 3215. In one embodiment, the CAR targets CD19 and comprises the V_{L} and V_{H} of MM described in Table 21 and set forth in SEQ ID NO: 1471 and SEQ ID NO: 3216.

[0017] In some embodiments, provided herein are polynucleotides encoding any of conventional CARs (Table 1) and backbones 1-62 (Table 2), wherein each backbone comprises a conventional CAR component (Table 1) and one or more accessory modules as shown in Table 2. In some embodiments, the conventional CAR component and the one or more accessory components of each backbone are encoded by a single polynucleotide molecule. In some embodiments, the conventional CAR component is encoded by a first polynucleotide molecule and the one or more accessory modules are encoded by a second polynucleotide molecule. In some embodiments, backbones comprising a conventional CAR component and more than one accessory module, the first polynucleotide molecule encodes the conventional CAR component, a second polynucleotide molecule encodes the first accessory molecule and a third polynucleotide molecule encodes the second accessory molecule. For example, backbone 1 comprising conventional CAR I and K13-vFLIP may be encoded by a single polynucleotide molecule or by two polynucleotide molecules, wherein the first polynucleotide molecule encodes the conventional CAR I and the second polynucleotide molecule encodes K13-vFLIP. In various embodiments, the polynucleotide molecules encoding the CAR component of the conventional CARs I to III (Table 1) or the backbones (Table 2) described herein encodes one or more antigen specific domains. In some embodiments, the antigen specific domain comprises one or more V_{L} (or vL) fragments. In some embodiments, the antigen specific domain comprises one or more V_{H} (or vH) fragments. In some embodiments, the antigen specific domain comprises one or more scFVs (or scFvs) specific to the antigens on target cells such as cancer cells. In some embodiments, the antigen specific domain comprises one or more Fv fragments. In some embodiments, the antigen specific domain comprises one or more Fab fragments. In some embodiments, the antigen specific domain comprises one or more (Fab′)2 fragments. In some embodiments, the antigen specific domain comprises one or more single domain antibodies (SDAB). In some embodiments, the antigen specific domain comprises one or more camelid V_{HH} (or vHH) domains. In some embodiments, the antigen specific domain comprises one or more non-immunoglobulin scaffold such as a DARPIN, an affibody, an affilin, an adnectin, an affitin, an obodies, a repebody, a fynomer, an alphabody, an avimer, an atrimer, a centyrin, a pronectin, an anticalin, a kunitz domain, an Armadillo repeat protein, an autoantigen, a receptor or a ligand. In some embodiments, the antigen specific domain comprises one or more ligands.

[0018] Also provided herein are polypeptides encoded by the polynucleotides described herein. In various embodiments, polypeptides encoded by the polynucleotide molecule encoding the CAR component of the conventional CARs I to III (Table 1) or the backbones (Table 2) described herein encodes one or more antigen specific domains. In some embodiments, the antigen specific domain comprises one or more V_{L} (or vL) fragments. In some embodiments, the antigen specific domain comprises one or more V_{H} (or vH) fragments. In some embodiments, the antigen specific domain comprises one or more scFVs specific to the antigens on target cells such as cancer cells. In some embodiments, the antigen specific domain comprises one or more Fv fragments. In some embodiments, the antigen specific domain comprises one or more Fab fragments. In some embodiments, the antigen specific domain comprises one or more (Fab′)2 fragments. In some embodiments, the antigen specific domain comprises one or more single domain antibodies (SDAB). In some embodiments, the antigen specific domain comprises one or more camelid V_{HH} (vHH) domains. In some embodiments, the antigen specific domain comprises one or more Fv fragments. In some embodiments, the antigen specific domain comprises one or more non-immunoglobulin scaffold such as a DARPIN, an affibody, an affilin, an adnectin, an affitin, an obodies, a repebody, a fynomer, an alphabody, an avimer, an atrimer, a centyrin, a pronectin, an anticalin, a kunitz domain, an Armadillo repeat protein, an autoantigen, a receptor or a ligand. In some embodiments, the antigen specific domain comprises one or more ligands.

[0019] Further provided herein are one or more vectors comprising nucleic acids encoding any of conventional CARS I to III (Table 1) or backbones 1-62 (Table 2). In some embodiments, all the components of each backbone are encoded by a single vector. In some embodiments, each component of the backbone is encoded by a different vector. For examples, a backbone comprising a conventional CAR component and a single accessory module, a first vector comprises polynucleotides encoding the conventional CAR component and a second vector comprises polynucleotides encoding the accessory module. For example, a backbone comprising a conventional CAR component and a more than one accessory module, a first vector comprises polynucleotides encoding the conventional CAR component and a second vector comprises polynucleotides encoding the accessory modules. Alternately, a first vector comprises polynucleotides encoding the conventional CAR component, a second vector comprises polynucleotides encoding the first accessory module and a third vector comprises polynucleotides encoding the second accessory module. In various embodiments, the vectors encoding the polynucleotide molecule encoding the CAR component of the conventional CARs I to III or the backbones described herein encodes one or more antigen specific domains. In some embodiments, the antigen specific domain comprises one or more V_{L} fragments. In some embodiments, the antigen specific domain comprises one or more V_{H} fragments. In some embodiments, the antigen specific domain comprises one or more scFVs specific to the antigens on target cells such as cancer cells. In some embodiments, the antigen specific domain comprises one or more Fv fragments. In some embodiments, the antigen specific domain comprises one or more Fab fragments. In some embodiments, the antigen specific domain comprises one or more (Fab′)2 fragments. In some embodiments, the antigen specific domain comprises one or more single domain antibodies (SDAB). In some embodiments, the antigen specific domain comprises one or more camelid V_{HH} domains. In some embodiments, the antigen specific domain comprises one or more Fv fragments. In some embodiments, the antigen specific domain comprises one or more non-immunoglobulin scaffold such as a DARPIN, an affibody, an affilin, an adnectin, an affitin, an obodies, a repebody, a fynomer, an alphabody, an avimer, an atrimer, a centyrin, a pronectin, an anticalin, a kunitz domain, an Armadillo repeat protein, an autoantigen, a receptor or a ligand. In some embodiments, the antigen specific domain comprises one or more ligand.

[0020] Further provided herein are genetically modified cells comprising vectors encoding polynucleotides encoding the conventional CARs I to III or backbones 1-62 described herein, wherein the CARs of the conventional CARs I to III or the backbones comprise antigen specific domains as described herein. In various embodiments, the genetically modified cells target antigen on target cells such as cancer cells via the V_{L} fragments, V_{H} fragments, V_{HH} domains, scFvs, Fv fragments, Fab fragments, (Fab′)2 fragments, single domain antibody (SDAB) fragments, and/or non-immunoglobulin scaffold each of which are encoded by the antigen specific domains.

[0021] In some embodiments, the antigen specific domains of the CARs comprise one or more V_{L} fragments. In exemplary embodiments, the one or more V_{L} fragments are described in Table 4. In some embodiments, the polynucleotides encoding the one more V_{L} fragments comprise, consist of or consist essentially of sequences set forth in any one or more of SEQ ID NOs: 11-249. In some embodiments, the polypeptides encoding the one more V_{L} fragments comprise, consist of or consist essentially of sequences set forth in any one or more of SEQ ID NOS: 1785-2023 or sequences with 80-99% identity to sequences set forth in any one or more of SEQ ID NOS: 1785-2023 or sequences with 80-99% identity in the three complementarity determining regions (CDRs) to the sequences set forth in any one or more of SEQ ID NOS: 1785-2023 or sequences that bind to the same target antigens or the same epitopes on the target antigens as the sequences set forth in any one or more of SEQ ID NOS: 1785-2023. In some embodiments, the antigen specific domains of the CARs comprise one or more V_{H} fragments. In exemplary embodiments, the one or more V_{H} fragments are described in Table 6. In some embodiments, the polynucleotides encoding the one more V_{H} fragments comprise, consist of or consist essentially of sequences set forth in any one or more of SEQ ID NOS: 259-498. In some embodiments, the polypeptides encoding the one more V_{H} fragments comprise, consist of or consist essentially of sequences set forth in any one or more of SEQ ID NOS: 2028-2268 or sequences with 80-99% identity to sequences set forth in any one or more of SEQ ID NOS: 2028-2268 or sequences with 80-99% identity in the three complementarity determining regions (CDRs) to the sequences set forth in any one or more of SEQ ID NOS: 2028-2268 or sequences that bind to the same target antigens or the same epitopes on the target antigens as the sequences set forth in any one or more of SEQ ID NOS:2028-2268.

[0022] In some embodiments, the antigen specific domains of the CARs comprise one or more nanobodies (V_{HH} domains). In exemplary embodiments, the one or more V_{HH} domains are described in Table 7. In some embodiments, the polynucleotides encoding the one more V_{HH} fragments comprise, consist of or consist essentially of sequences set forth in any one or more of SEQ ID NOS: 499-523. In some embodiments, the polypeptides encoding the one more V_{HH} fragments comprise, consist of or consist essentially of sequences set forth in any one or more of SEQ ID NOS: 2269-2293 or sequences with 80-99% identity to sequences set forth in any one or more of SEQ ID NOS: 2269-2293 or sequences with 80-99% identity in the three complementarity determining regions (CDRs) to sequences set forth in any one or more of SEQ ID NOS: 2269-2293 or sequences that bind to the same target antigens or the same epitopes on the target antigens as the sequences set forth in any one or more of SEQ ID NOS: 2269-2293.

[0023] In some embodiments, the antigen specific domains of the CARs comprise one or more non-immunoglobulin antigen binding scaffolds. In exemplary embodiments, the one or more non-immunoglobulin antigen binding scaffolds are described in Table 8. In some embodiments, the polynucleotides encoding the one more non-immunoglobulin antigen binding scaffolds comprise, consist of or consist essentially of sequences set forth in any one or more of SEQ ID NOS: 524-528. In some embodiments, the polypeptides encoding the one more non-immunoglobulin antigen binding scaffolds comprise, consist of or consist essentially of sequences set forth in any one or more of SEQ ID NOS: 2294-2298 or sequences with 80-99% identity to sequences set forth in any one or more of SEQ ID NOS:2294-2298 or sequences that bind to the same target antigens or the same epitopes on the target antigens as the sequences set forth in any one or more of SEQ ID NOS: 2269-2293.

[0024] In some embodiments, the antigen specific domains of the CARs comprise one or more ligands. In exemplary embodiments, the ligands are described in Table 10. In some embodiments, the polynucleotides encoding the one more ligands comprise, consist of or consist essentially of sequences set forth in any one or more of SEQ ID NOS: 553-563. In some embodiments, the polypeptides encoding the one more ligand binding domains comprise, consist of or consist essentially of sequences set forth in any one or more of SEQ ID NOS: 2323-2333 or sequences with 80-99% identity to sequences set forth in any one or more of SEQ ID NOS: 2323-2333 or sequences that bind to the same target antigens or the same epitopes on the target antigens as the sequences set forth in any one or more of SEQ ID NOS: 2323-2333.

[0025] In some embodiments, the antigen specific domains of the CARs comprise one or more scFvs. In exemplary embodiments, the scFv fragments are described in Table 11. In some embodiments, the polynucleotides encoding the one more scFv fragments comprise, consist of or consist essentially of sequences set forth in any one or more of SEQ ID NOS: 564-798. In some embodiments, the polynucleotides encoding the one more scFv fragments comprise, consist of or consist essentially of sequences that encode for polypeptide sequences set forth in any one or more of SEQ ID NOS: 2334-2568 or that encode for polypeptide sequences with 80-99% identity in the six complementarity determining regions (CDRs) to sequences set forth in any one or more of SEQ ID NOS: 2334-2568 or that encode for polypeptide sequences that bind to the same target antigens or the same epitopes on the target antigens as the sequences set forth in any one or more of SEQ ID NOS: 2334-2568. In some embodiments, the polypeptides encoding the one more scFv fragments comprise, consist of or consist essentially of sequences set forth in any one or more of SEQ ID NOS: 2334-2568 or sequences with 80-99% identity to sequences set forth in any one or more of SEQ ID NOS: 2334-2568 or sequences with 80-99% identity in the six complementarity determining regions (CDRs) to sequences set forth in any one or more of SEQ ID NOS: 2334-2568 or sequences that bind to the same target antigens or the same epitopes on the target antigens as the sequences set forth in any one or more of SEQ ID NOS: 2334-2568.

[0026] In some embodiments, provided herein are polynucleotides encoding conventional CAR (Table 1) and any of backbones 1-62 as described herein in Table 2, wherein each backbone comprises a conventional CAR component (Table 1) and one or more accessory modules as shown in Table 2. In some embodiments, the conventional CAR component and the one or more accessory components of each backbone are encoded by a single polynucleotide molecule. In some embodiments, the conventional CAR component is encoded by a first polynucleotide molecule and the one or more accessory modules are encoded by a second polynucleotide molecule. In some embodiments, backbones comprising a conventional CAR component and more than one accessory module, the first polynucleotide molecule encodes the conventional CAR component, a second polynucleotide molecule encodes the first accessory molecule and a third polynucleotide molecule encodes the second accessory molecule.

[0027] In some embodiments, provided herein are polypeptides encoding conventional CAR (Table 1) and any of backbones 1-62 as described herein in Table 2, wherein each backbone comprises a conventional CAR component (Table 1) and one or more accessory modules as shown in Table 2. In some embodiments, the polypeptide encoding the conventional CAR component and the one or more accessory module components of each backbone are encoded by a single polynucleotide molecule. In some embodiments, the polypeptide encoding the conventional CAR component is encoded by a first polynucleotide molecule and the one or more accessory modules are encoded by a second polynucleotide molecule. In some embodiments, the polypeptide encoding the conventional CAR component and the one or more accessory module components of each backbone are encoded by a single polypeptide molecule. In some embodiments, the polypeptide encoding the conventional CAR component is encoded by a first polypeptide molecule and the one or more accessory modules are encoded by a second or more polypeptide molecules. In some embodiments, backbones comprising a conventional CAR component and more than one accessory module, the first polynucleotide molecule encodes the conventional CAR component, a second polynucleotide molecule encodes the first accessory molecule and a third polynucleotide molecule encodes the second accessory molecule. In some embodiments, backbones comprising a conventional CAR component and more than one accessory module, the first polypeptide molecule encodes the conventional CAR component, a second polypeptide molecule encodes the first accessory molecule and a third polypeptide molecule encodes the second accessory molecule.

[0028] In some embodiments, the polynucleotides encoding the one more accessory module comprise, consist of or consist essentially of sequences set forth in any one or more of SEQ ID NOS: 850-904. In some embodiments, the polynucleotides encoding the one more accessory module comprise, consist of or consist essentially of sequences that encode for polypeptide sequences as set forth in any one or more of SEQ ID NOS: 2613-2667 or encode for polypeptide sequences with 70-99% identity to sequences set forth in any one or more of SEQ ID NOS: 2613-2667. In some embodiments, the polypeptides encoding the one more accessory modules comprise, consist of or consist essentially of sequences set forth in any one or more of SEQ ID NOS: 2613-2667 or sequences with 70-99% identity to sequences set forth in any one or more of SEQ ID NOS: 2613-2667.

[0029] In exemplary embodiments, nucleic acids encoding backbone-1 comprising conventional CAR I and K13-vFLIP, wherein the antigen specific domain of the CAR targets antigens of interest are described in Table 19. The sequences of nucleic acid fragments encoding backbone-1 comprising conventional CAR I and K13-vFLIP and targeting antigens of interest as described in Table 19 are set forth in SEQ ID NOs: 927-1196. The sequences of polypeptides encoding backbone-1 comprising conventional CAR I and K13-vFLIP and targeting antigens of interest as described in Table 19 are set forth in SEQ ID NOs: 2672-2941. The nucleic acid sequences in SEQ ID NOs: 927-1196 and polypeptide sequences in SEQ ID NOs: 2672-2941 also encode for a puromycin acetyl transferase (PuroR) fragment, which fragment can be used to select cells but is not essential for the function of the CAR.

[0030] In one embodiment, provided herein is an isolated nucleic acid encoding backbone-1 comprising conventional CAR I and K13-vFLIP, wherein the antigen specific domain of the CAR targets CD19 (Table 19). In exemplary embodiments, the sequences of isolated nucleic acid fragments targeting CD19 and coexpressing K13-vFLIP are set forth in SEQ ID NOs: 927-941. In exemplary embodiments, the sequences of isolated polypeptide targeting CD19 and coexpressing K13-vFLIP are set forth in SEQ ID NOs: 2672-2686. In some embodiments, the scFv fragments targeting CD19 are described in Table 11 and set forth in SEQ ID NOs: 564-577 and SEQ ID NOs: 2334-2347. Also provided herein are polypeptides encoded by nucleic acids encoding backbone-1 comprising conventional CAR I and K13-vFLIP, wherein the antigen specific domain of the CAR targets CD19. Further provided herein are vectors encoding nucleic acids encoding backbone-1 comprising conventional CAR I and K13-vFLIP, wherein the antigen specific domain of the CAR targets CD19. Also provided herein are genetically engineered cells (such as T cells, NK cells) comprising vectors encoding nucleic acids encoding backbone-1 comprising conventional CAR I and K13-vFLIP, wherein the antigen specific domain of the CAR targets CD19.

[0031] In one embodiment, provided herein is an isolated nucleic acid encoding backbone-1 comprising conventional CAR I and K13-vFLIP, wherein the antigen specific domain of the CAR targets MPL or the Thrombopoietin Receptor (Table 19). In exemplary embodiments, the sequences of isolated nucleic acid fragments targeting MPL and coexpressing K13-vFLIP are set forth in SEQ ID NOs: 1117-1124. In exemplary embodiments, the sequences of isolated polypeptide targeting MPL are set forth in SEQ ID NOs: 2862-2869. In some embodiments, the scFv fragments targeting MPL are described in Table 11 and set forth in SEQ ID NOs: 729-736 and SEQ ID NOs: 2499-2506. Also provided herein are polypeptides encoded by nucleic acids encoding backbone-1 comprising conventional CAR I and K13-vFLIP, wherein the antigen specific domain of the CAR targets MPL. Further provided herein are vectors encoding nucleic acids encoding backbone-1 comprising conventional CAR I and K13-vFLIP, wherein the antigen specific domain of the CAR targets MPL. Also provided herein are genetically engineered cells (such as T cells, NK cells) comprising vectors encoding nucleic acids encoding backbone-1 comprising conventional CAR I and K13-vFLIP, wherein the antigen specific domain of the CAR targets MPL.

[0032] In one embodiment, provided herein is an isolated nucleic acid encoding backbone-1 comprising conventional CAR I and K13-vFLIP, wherein the antigen specific domain of the CAR targets Lym1 (Table 19). In exemplary embodiments, the sequence of nucleic acid fragment targeting Lym1 is set forth in SEQ ID NO: 1109. In exemplary embodiments, the sequence of isolated polypeptide fragment targeting Lym1 is set forth in SEQ ID NO: 2854. In some embodiments, the scFv fragment targeting Lym1 is described in Table 11 and set forth in SEQ ID NO: 723 and SEQ ID NO: 2493. Also provided herein are polypeptides encoded by nucleic acids encoding backbone-1 comprising conventional CAR I and K13-vFLIP, wherein the antigen specific domain of the CAR targets Lym1. Further provided herein are vectors encoding nucleic acids encoding backbone-1 comprising conventional CAR I and K13-vFLIP, wherein the antigen specific domain of the CAR targets Lym1. Also provided herein are genetically engineered cells (such as T cells, NK cells) comprising vectors encoding nucleic acids encoding backbone-1 comprising conventional CAR I and K13-vFLIP, wherein the antigen specific domain of the CAR targets Lym1.

[0033] In one embodiment, provided herein is an isolated nucleic acid encoding backbone-1 comprising conventional CAR I and K13-vFLIP, wherein the antigen specific domain of the CAR targets Lym2 (Table 19). In exemplary embodiments, sequence of the isolated nucleic acid fragment targeting Lym2 is set forth in SEQ ID NO: 1110. In exemplary embodiments, the sequence of isolated polypeptide targeting Lym2 is set forth in SEQ ID NO: 2855. In some embodiments, the scFv fragment targeting Lym2 is described in Table 11 and set forth in SEQ ID NO: 724 and SEQ ID NO: 2494. Also provided herein are polypeptides encoded by nucleic acids encoding backbone-1 comprising conventional CAR I and K13-vFLIP, wherein the antigen specific domain of the CAR targets Lym2. Further provided herein are vectors encoding nucleic acids encoding backbone-1 comprising conventional CAR I and K13-vFLIP, wherein the antigen specific domain of the CAR targets Lym2. Also provided herein are genetically engineered cells (such as T cells, NK cells) comprising vectors encoding nucleic acids encoding backbone-1 comprising conventional CAR I and K13-vFLIP, wherein the antigen specific domain of the CAR targets Lym2.

[0034] In one embodiment, provided herein is an isolated nucleic acid encoding backbone-1 comprising conventional CAR I and K13-vFLIP, wherein the antigen specific domain of the CAR targets GRP-78 (Table 19). In exemplary embodiments, sequence of the isolated nucleic acid targeting GRP-78 is set forth in SEQ ID NO: 1078. In exemplary embodiments, sequence of the polypeptide targeting GRP-78 is set forth in SEQ ID NO: 2823. In some embodiments, the scFv fragment targeting GRP-78 is described in Table 11 and set forth in SEQ ID NO: 703 and SEQ ID NO: 2473. Also provided herein are polypeptides encoded by nucleic acids encoding backbone-1 comprising conventional CAR I and K13-vFLIP, wherein the antigen specific domain of the CAR targets GRP-78. Further provided herein are vectors encoding nucleic acids encoding backbone-1 comprising conventional CAR I and K13-vFLIP, wherein the antigen specific domain of the CAR targets GRP-78. Also provided herein are genetically engineered cells (such as T cells, NK cells) comprising vectors encoding nucleic acids encoding backbone-1 comprising conventional CAR I and K13-vFLIP, wherein the antigen specific domain of the CAR targets GRP-78.

[0035] In one embodiment, provided herein is an isolated nucleic acid encoding backbone-1 comprising conventional CAR I and K13-vFLIP, wherein the antigen specific domain of the CAR targets CD79b (Table 19). In exemplary embodiments, the sequences of the nucleic acid fragments targeting CD79b are set forth in SEQ ID NOs: 995-996. In exemplary embodiments, the sequences of the polypeptide fragments targeting CD79b are set forth in SEQ ID NO: 2740-2741. In some embodiments, the scFv fragment targeting CD79b is described in Table 11 and set forth in SEQ ID NO: 628 and SEQ ID NO: 2398. Also provided herein are polypeptides encoded by nucleic acids encoding backbone-1 comprising conventional CAR I and K13-vFLIP, wherein the antigen specific domain of the CAR targets CD79b. Further provided herein are vectors encoding nucleic acids encoding backbone-1 comprising conventional CAR I and K13-vFLIP, wherein the antigen specific domain of the CAR targets CD79b. Also provided herein are genetically engineered cells (such as T cells, NK cells) comprising vectors encoding nucleic acids encoding backbone-1 comprising conventional CAR I and K13-vFLIP, wherein the antigen specific domain of the CAR targets CD79b.

[0036] In one embodiment, provided herein is an isolated nucleic acid encoding backbone-1 comprising conventional CAR I and K13-vFLIP, wherein the antigen specific domain of the CAR targets ALK (Table 19). In exemplary embodiments, the sequences of the nucleic acid fragments targeting ALK are set forth in SEQ ID NOs: 946-947. In exemplary embodiments, the sequences of the polypeptide fragments targeting ALK are set forth in SEQ ID NO: 2691-2692. In some embodiments, the scFv fragments targeting ALK are described in Table 11 and set forth in SEQ ID NO: 582-583 and SEQ ID NO: 2352-2353. Also provided herein are polypeptides encoded by nucleic acids encoding backbone-1 comprising conventional CAR I and K13-vFLIP, wherein the antigen specific domain of the CAR targets ALK. Further provided herein are vectors encoding nucleic acids encoding backbone-1 comprising conventional CAR I and K13-vFLIP, wherein the antigen specific domain of the CAR targets ALK. Also provided herein are genetically engineered cells (such as T cells, NK cells) comprising vectors encoding nucleic acids encoding backbone-1 comprising conventional CAR I and K13-vFLIP, wherein the antigen specific domain of the CAR targets ALK.

[0037] In one embodiment, provided herein is an isolated nucleic acid encoding backbone-1 comprising conventional CAR I and K13-vFLIP, wherein the antigen specific domain of the CAR targets BCMA (Table 19). In exemplary embodiments, the sequences of the nucleic acid fragments targeting BCMA are set forth in SEQ ID NOs: 951-957. In exemplary embodiments, the sequences of the polypeptide fragments targeting BCMA are set forth in SEQ ID NO: 2696-2702. In some embodiments, the scFv fragments targeting BCMA are described in Table 11 and set forth in SEQ ID NO: 586-592 and SEQ ID NO: 2356-2362. Also provided herein are polypeptides encoded by nucleic acids encoding backbone-1 comprising conventional CAR I and K13-vFLIP, wherein the antigen specific domain of the CAR targets BCMA. Further provided herein are vectors encoding nucleic acids encoding backbone-1 comprising conventional CAR I and K13-vFLIP, wherein the antigen specific domain of the CAR targets BCMA. Also provided herein are genetically engineered cells (such as T cells, NK cells) comprising vectors encoding nucleic acids encoding backbone-1 comprising conventional CAR I and K13-vFLIP, wherein the antigen specific domain of the CAR targets BCMA.

[0038] In one embodiment, provided herein is an isolated nucleic acid encoding backbone-1 comprising conventional CAR I and K13-vFLIP, wherein the antigen specific domain of the CAR targets CD20 (Table 19). In exemplary embodiments, the sequences of the nucleic acid fragments targeting CD20 are set forth in SEQ ID NOs: 964-976. In exemplary embodiments, the sequences of the polypeptide fragments targeting CD20 are set forth in SEQ ID NO: 2709-2721. In some embodiments, the scFv fragments targeting CD20 are described in Table 11 and set forth in SEQ ID NO: 596-597; 599-610 and SEQ ID NO: 2366-2367; 2369-2380. Also provided herein are polypeptides encoded by nucleic acids encoding backbone-1 comprising conventional CAR I and K13-vFLIP, wherein the antigen specific domain of the CAR targets CD20. Further provided herein are vectors encoding nucleic acids encoding backbone-1 comprising conventional CAR I and K13-vFLIP, wherein the antigen specific domain of the CAR targets CD20. Also provided herein are genetically engineered cells (such as T cells, NK cells) comprising vectors encoding nucleic acids encoding backbone-1 comprising conventional CAR I and K13-vFLIP, wherein the antigen specific domain of the CAR targets CD20.

[0039] In one embodiment, provided herein is an isolated nucleic acid encoding backbone-1 comprising conventional CAR I and K13-vFLIP, wherein the antigen specific domain of the CAR targets CD22 (Table 19). In exemplary embodiments, the sequences of the nucleic acid fragments targeting CD22 are set forth in SEQ ID NOs: 977-980 and SEQ ID NOs: 1192-1196. In exemplary embodiments, the sequences of the polypeptide fragments targeting CD22 are set forth in SEQ ID NOs: 2722-2725 and SEQ ID NOs: 2937-2941. In some embodiments, the scFv fragments targeting CD22 are described in Table 11 and set forth in SEQ ID NO: 598, 611-613 and SEQ ID NO: 2368, 2381-2384. Also provided herein are polypeptides encoded by nucleic acids encoding backbone-1 comprising conventional CAR I and K13-vFLIP, wherein the antigen specific domain of the CAR targets CD22. Further provided herein are vectors encoding nucleic acids encoding backbone-1 comprising conventional CAR I and K13-vFLIP, wherein the antigen specific domain of the CAR targets CD22. Also provided herein are genetically-engineered cells (such as T cells, NK cells) comprising vectors encoding nucleic acids encoding backbone-1 comprising conventional CAR I and K13-vFLIP, wherein the antigen specific domain of the CAR targets CD22.

[0040] In one embodiment, provided herein is an isolated nucleic acid encoding backbone-1 comprising conventional CAR I and K13-vFLIP, wherein the antigen specific domain of the CAR targets CD30 (Table 19). In exemplary embodiments, the sequences of the nucleic acid fragments targeting CD30 are set forth in SEQ ID NOs: 981-982. In exemplary embodiments, the sequences of the polypeptide fragments targeting CD30 are set forth in SEQ ID NOs: 2726-2727. In some embodiments, the scFv fragments targeting CD30 are described in Table 11 and set forth in SEQ ID NO: 614-615 and SEQ ID NO: 2384-2385. Also provided herein are polypeptides encoded by nucleic acids encoding backbone-1 comprising conventional CAR I and K13-vFLIP, wherein the antigen specific domain of the CAR targets CD30. Further provided herein are vectors encoding nucleic acids encoding backbone-1 comprising conventional CAR I and K13-vFLIP, wherein the antigen specific domain of the CAR targets CD30. Also provided herein are genetically engineered cells (such as T cells, NK cells) comprising vectors encoding nucleic acids encoding backbone-1 comprising conventional CAR I and K13-vFLIP, wherein the antigen specific domain of the CAR targets CD30.

[0041] In one embodiment, provided herein is an isolated nucleic acid encoding backbone-1 comprising conventional CAR I and K13-vFLIP, wherein the antigen specific domain of the CAR targets CD32 (Table 19). In exemplary embodiments, the sequences of the nucleic acid fragment targeting CD32 is set forth in SEQ ID NO: 983. In exemplary embodiments, the sequence of the polypeptide fragments targeting CD32 is set forth in SEQ ID NO: 2728 In some embodiments, the scFv fragment targeting CD32 is described in Table 11 and set forth in SEQ ID NO: 616 and SEQ ID NO: 2386. Also provided herein are polypeptides encoded by nucleic acids encoding backbone-1 comprising conventional CAR I and K13-vFLIP, wherein the antigen specific domain of the CAR targets CD32. Further provided herein are vectors encoding nucleic acids encoding backbone-1 comprising conventional CAR I and K13-vFLIP, wherein the antigen specific domain of the CAR targets CD32. Also provided herein are genetically-engineered cells (such as T cells, NK cells) comprising vectors encoding nucleic acids encoding backbone-1 comprising conventional CAR I and K13-vFLIP, wherein the antigen specific domain of the CAR targets CD32.

[0042] In one embodiment, provided herein is an isolated nucleic acid encoding backbone-1 comprising conventional CAR I and K13-vFLIP, wherein the antigen specific domain of the CAR targets CD33 (Table 19). In exemplary embodiments, the sequences of the nucleic acid fragments targeting CD33 are set forth in SEQ ID NOs: 984-991. In exemplary embodiments, the sequences of the polypeptide fragments targeting CD33 are set forth in SEQ ID NOs: 2729-2736. In some embodiments, the scFv fragments targeting CD33 are described in Table 11 and set forth in SEQ ID NO: 617-624 and SEQ ID NO: 2387-2394. Also provided herein are polypeptides encoded by nucleic acids encoding backbone-1 comprising conventional CAR I and K13-vFLIP, wherein the antigen specific domain of the CAR targets CD33. Further provided herein are vectors encoding nucleic acids encoding backbone-1 comprising conventional CAR I and K13-vFLIP, wherein the antigen specific domain of the CAR targets CD33. Also provided herein are genetically engineered cells (such as T cells, NK cells) comprising vectors encoding nucleic acids encoding backbone-1 comprising conventional CAR I and K13-vFLIP, wherein the antigen specific domain of the CAR targets CD33.

[0043] In one embodiment, provided herein is an isolated nucleic acid encoding backbone-1 comprising conventional CAR I and K13-vFLIP, wherein the antigen specific domain of the CAR targets CD123 (Table 19). In exemplary embodiments, the sequences of the nucleic acid fragments targeting CD123 are set forth in SEQ ID NOs: 998-1010. In exemplary embodiments, the sequences of the polypeptide fragments targeting CD123 are set forth in SEQ ID NOs: 2743-2755. In some embodiments, the scFv fragments targeting CD123 are described in Table 11 and set forth in SEQ ID NO: 630-642 and SEQ ID NO: 2400-2412. Also provided herein are polypeptides encoded by nucleic acids encoding backbone-1 comprising conventional CAR I and K13-vFLIP, wherein the antigen specific domain of the CAR targets CD123. Further provided herein are vectors encoding nucleic acids encoding backbone-1 comprising conventional CAR I and K13-vFLIP, wherein the antigen specific domain of the CAR targets CD123. Also provided herein are genetically engineered cells (such as T cells, NK cells) comprising vectors encoding nucleic acids encoding backbone-1 comprising conventional CAR I and K13-vFLIP, wherein the antigen specific domain of the CAR targets CD123.

[0044] In one embodiment, provided herein is an isolated nucleic acid encoding backbone-1 comprising conventional CAR I and K13-vFLIP, wherein the antigen specific domain of the CAR targets CD138 (Table 19). In exemplary embodiments, the sequences of the nucleic acid fragment targeting CD138 is set forth in SEQ ID NO: 1011. In exemplary embodiments, the sequence of the polypeptide fragments targeting CD138 is set forth in SEQ ID NO: 2756 In some embodiments, the scFv fragment targeting CD138 is described in Table 11 and set forth in SEQ ID NOs: 643 and 2413. Also provided herein are polypeptides encoded by nucleic acids encoding backbone-1 comprising conventional CAR I and K13-vFLIP, wherein the antigen specific domain of the CAR targets CD138. Further provided herein are vectors encoding nucleic acids encoding backbone-1 comprising conventional CAR I and K13-vFLIP, wherein the antigen specific domain of the CAR targets CD138. Also provided herein are genetically-engineered cells (such as T cells, NK cells) comprising vectors encoding nucleic acids encoding backbone-1 comprising conventional CAR I and K13-vFLIP, wherein the antigen specific domain of the CAR targets CD138.

[0045] In one embodiment, provided herein is an isolated nucleic acid encoding backbone-1 comprising conventional CAR I and K13-vFLIP, wherein the antigen specific domain of the CAR targets CLL1 (Table 19). In exemplary embodiments, the sequences of the nucleic acid fragments targeting CLL1 are set forth in SEQ ID NOs: 1024-1029. In exemplary embodiments, the sequences of the polypeptide fragments targeting CLL1 are set forth in SEQ ID NOs:2769-2774. In some embodiments, the scFv fragments targeting CLL1 are described in Table 11 and set forth in SEQ ID NO: 655-660 and SEQ ID NO: 2425-2430. Also provided herein are polypeptides encoded by nucleic acids encoding backbone-1 comprising conventional CAR I and K13-vFLIP, wherein the antigen specific domain of the CAR targets CLL1. Further provided herein are vectors encoding nucleic acids encoding backbone-1 comprising conventional CAR I and K13-vFLIP, wherein the antigen specific domain of the CAR targets CLL1. Also provided herein are genetically engineered cells (such as T cells, NK cells) comprising vectors encoding nucleic acids encoding backbone-1 comprising conventional CAR I and K13-vFLIP, wherein the antigen specific domain of the CAR targets CLL1.

[0046] In one embodiment, provided herein is an isolated nucleic acid encoding backbone-1 comprising conventional CAR I and K13-vFLIP, wherein the antigen specific domain of the CAR targets CS1 (Table 19). In exemplary embodiments, the sequences of the nucleic acid fragments targeting CS1 are set forth in SEQ ID NOs: 1031-1039. In exemplary embodiments, the sequences of the polypeptide fragments targeting CS1 are set forth in SEQ ID NOs:2776-2784. In some embodiments, the scFv fragments targeting CS1 are described in Table 11 and set forth in SEQ ID NO: 662-670 and SEQ ID NO: 2432-2440. Also provided herein are polypeptides encoded by nucleic acids encoding backbone-1 comprising conventional CAR I and K13-vFLIP, wherein the antigen specific domain of the CAR targets CS1. Further provided herein are vectors encoding nucleic acids encoding backbone-1 comprising conventional CAR I and K13-vFLIP, wherein the antigen specific domain of the CAR targets CD79b. Also provided herein are genetically engineered cells (such as T cells, NK cells) comprising vectors encoding nucleic acids encoding backbone-1 comprising conventional CAR I and K13-vFLIP, wherein the antigen specific domain of the CAR targets CS1.

[0047] In one embodiment, provided herein is an isolated nucleic acid encoding backbone-1 comprising conventional CAR I and K13-vFLIP, wherein the antigen specific domain of the CAR targets CSF2RA (Table 19). In exemplary embodiments, the sequences of the nucleic acid fragments targeting CSF2RA are set forth in SEQ ID NOs: 1040-1041. In exemplary embodiments, the sequences of the polypeptide fragments targeting CSF2RA are set forth in SEQ ID NOs: 2785-2786. In some embodiments, the scFv fragments targeting CSF2RA are described in Table 11 and set forth in SEQ ID NO: 671-672 and SEQ ID NO: 2441-2442. Also provided herein are polypeptides encoded by nucleic acids encoding backbone-1 comprising conventional CAR I and K13-vFLIP, wherein the antigen specific domain of the CAR targets CSF2RA. Further provided herein are vectors encoding nucleic acids encoding backbone-1 comprising conventional CAR I and K13-vFLIP, wherein the antigen specific domain of the CAR targets CSF2RA. Also provided herein are genetically engineered cells (such as T cells, NK cells) comprising vectors encoding nucleic acids encoding backbone-1 comprising conventional CAR I and K13-vFLIP, wherein the antigen specific domain of the CAR targets CSF2RA.

[0048] In one embodiment, provided herein is an isolated nucleic acid encoding backbone-1 comprising conventional CAR I and K13-vFLIP, wherein the antigen specific domain of the CAR targets DLL3 (Table 19). In exemplary embodiments, the sequences of the nucleic acid fragments targeting DLL3 are set forth in SEQ ID NOs: 1044-1045. In exemplary embodiments, the sequences of the polypeptide fragments targeting DLL3 are set forth in SEQ ID NOs: 2789-2790. In some embodiments, the scFv fragments targeting DLL3 are described in Table 11 and set forth in SEQ ID NO: 673-674 and SEQ ID NO: 2443-2444. Also provided herein are polypeptides encoded by nucleic acids encoding backbone-1 comprising conventional CAR I and K13-vFLIP, wherein the antigen specific domain of the CAR targets DLL3. Further provided herein are vectors encoding nucleic acids encoding backbone-1 comprising conventional CAR I and K13-vFLIP, wherein the antigen specific domain of the CAR targets DLL3. Also provided herein are genetically engineered cells (such as T cells, NK cells) comprising vectors encoding nucleic acids encoding backbone-1 comprising conventional CAR I and K13-vFLIP, wherein the antigen specific domain of the CAR targets DLL3.

[0049] In one embodiment, provided herein is an isolated nucleic acid encoding backbone-1 comprising conventional CAR I and K13-vFLIP, wherein the antigen specific domain of the CAR targets GPRC5D (Table 19). In exemplary embodiments, the sequences of the nucleic acid fragments targeting GPRC5D are set forth in SEQ ID NOs: 1070-1073. In exemplary embodiments, the sequences of the polypeptide fragments targeting GPRC5D are set forth in SEQ ID NOs: 2815-2818. In some embodiments, the scFv fragments targeting GPRC5D are described in Table 11 and set forth in SEQ ID NO: 695-674 and SEQ ID NO: 2465-2468. Also provided herein are polypeptides encoded by nucleic acids encoding backbone-1 comprising conventional CAR I and K13-vFLIP, wherein the antigen specific domain of the CAR targets GPRC5D. Further provided herein are vectors encoding nucleic acids encoding backbone-1 comprising conventional CAR I and K13-vFLIP, wherein the antigen specific domain of the CAR targets GPRC5D. Also provided herein are genetically engineered cells (such as T cells, NK cells) comprising vectors encoding nucleic acids encoding backbone-1 comprising conventional CAR I and K13-vFLIP, wherein the antigen specific domain of the CAR targets GPRC5D.

[0050] In one embodiment, provided herein is an isolated nucleic acid encoding backbone-1 comprising conventional CAR I and K13-vFLIP, wherein the antigen specific domain of the CAR targets HIV1-envelop glycoprotein gp120 (Table 19). In exemplary embodiments, the sequences of the nucleic acid fragments targeting HIV1-envelop glycoprotein gp120 are set forth in SEQ ID NOs: 959, 1089-1092. In exemplary embodiments, the sequences of the polypeptide fragments targeting HIV1-envelop glycoprotein gp120 are set forth in SEQ ID NOs: 2704, 2834-2837. In some embodiments, the scFv fragments targeting HIV1-envelop glycoprotein gp120 are described in Table 11 and set forth in SEQ ID NO: 581, 705-708 and SEQ ID NO: 2351, 2475-2478. Also provided herein are polypeptides encoded by nucleic acids encoding backbone-1 comprising conventional CAR I and K13-vFLIP, wherein the antigen specific domain of the CAR targets HIV1-envelop glycoprotein gp120. Further provided herein are vectors encoding nucleic acids encoding backbone-1 comprising conventional CAR I and K13-vFLIP, wherein the antigen specific domain of the CAR targets HIV1-envelop glycoprotein gp120. Also provided herein are genetically engineered cells (such as T cells, NK cells) comprising vectors encoding nucleic acids encoding backbone-1 comprising conventional CAR I and K13-vFLIP, wherein the antigen specific domain of the CAR targets HIV1-envelop glycoprotein gp120.

[0051] In one embodiment, provided herein is an isolated nucleic acid encoding backbone-1 comprising conventional CAR I and K13-vFLIP, wherein the antigen specific domain of the CAR targets IL11Ra (Table 19). In exemplary embodiments, the sequences of the nucleic acid fragment targeting IL11Ra is set forth in SEQ ID NO: 1099. In exemplary embodiments, the sequence of the polypeptide fragments targeting IL11Ra is set forth in SEQ ID NO: 2844 In some embodiments, the scFv fragments targeting IL11Ra is described in Table 11 and set forth in SEQ ID NOs: 715 and 2485. Also provided herein are polypeptides encoded by nucleic acids encoding backbone-1 comprising conventional CAR I and K13-vFLIP, wherein the antigen specific domain of the CAR targets IL11Ra. Further provided herein are vectors encoding nucleic acids encoding backbone-1 comprising conventional CAR I and K13-vFLIP, wherein the antigen specific domain of the CAR targets IL11Ra. Also provided herein are genetically-engineered cells (such as T cells, NK cells) comprising vectors encoding nucleic acids encoding backbone-1 comprising conventional CAR I and K13-vFLIP, wherein the antigen specific domain of the CAR targets IL11Ra.

[0052] In one embodiment, provided herein is an isolated nucleic acid encoding backbone-1 comprising conventional CAR I and K13-vFLIP, wherein the antigen specific domain of the CAR targets IL13Ra2 (Table 19). In exemplary embodiments, the sequences of the nucleic acid fragments targeting IL13Ra2 are set forth in SEQ ID NOs: 1101-1102. In exemplary embodiments, the sequences of the polypeptide fragments targeting IL13Ra2 are set forth in SEQ ID NOs: 2846-2847. In some embodiments, the scFv fragments targeting IL13Ra2 are described in Table 11 and set forth in SEQ ID NO: 716-717 and SEQ ID NO: 2486-2487. Also provided herein are polypeptides encoded by nucleic acids encoding backbone-1 comprising conventional CAR I and K13-vFLIP, wherein the antigen specific domain of the CAR targets IL13Ra2. Further provided herein are vectors encoding nucleic acids encoding backbone-1 comprising conventional CAR I and K13-vFLIP, wherein the antigen specific domain of the CAR targets IL13Ra2. Also provided herein are genetically engineered cells (such as T cells, NK cells) comprising vectors encoding nucleic acids encoding backbone-1 comprising conventional CAR I and K13-vFLIP, wherein the antigen specific domain of the CAR targets IL13Ra2.

[0053] In one embodiment, provided herein is an isolated nucleic acid encoding backbone-1 comprising conventional CAR I and K13-vFLIP, wherein the antigen specific domain of the CAR targets LAMP1 (Table 19). In exemplary embodiments, the sequences of the nucleic acid fragments targeting LAMP1 are set forth in SEQ ID NOs: 1104-1105. In exemplary embodiments, the sequences of the polypeptide fragments targeting LAMP1 are set forth in SEQ ID NOs: 2849-2850. In some embodiments, the scFv fragments targeting LAMP1 are described in Table 11 and set forth in SEQ ID NO: 719-720 and SEQ ID NO: 2489-2490. Also provided herein are polypeptides encoded by nucleic acids encoding backbone-1 comprising conventional CAR I and K13-vFLIP, wherein the antigen specific domain of the CAR targets LAMP1. Further provided herein are vectors encoding nucleic acids encoding backbone-1 comprising conventional CAR I and K13-vFLIP, wherein the antigen specific domain of the CAR targets LAMP1. Also provided herein are genetically engineered cells (such as T cells, NK cells) comprising vectors encoding nucleic acids encoding backbone-1 comprising conventional CAR I and K13-vFLIP, wherein the antigen specific domain of the CAR targets LAMP1.

[0054] In one embodiment, provided herein is an isolated nucleic acid encoding backbone-1 comprising conventional CAR I and K13-vFLIP, wherein the antigen specific domain of the CAR targets NY-BR1 (Table 19). In exemplary embodiments, the sequences of the nucleic acid fragment targeting NY-BR1 is set forth in SEQ ID NO: 1131. In exemplary embodiments, the sequence of the polypeptide fragments targeting NY-BR1 is set forth in SEQ ID NO: 2876 In some embodiments, the scFv fragments targeting NY-BR1 are described in Table 11 and set forth in SEQ ID NOs: 742 and 2512. Also provided herein are polypeptides encoded by nucleic acids encoding backbone-1 comprising conventional CAR I and K13-vFLIP, wherein the antigen specific domain of the CAR targets NY-BR1. Further provided herein are vectors encoding nucleic acids encoding backbone-1 comprising conventional CAR I and K13-vFLIP, wherein the antigen specific domain of the CAR targets NY-BR1. Also provided herein are genetically-engineered cells (such as T cells, NK cells) comprising vectors encoding nucleic acids encoding backbone-1 comprising conventional CAR I and K13-vFLIP, wherein the antigen specific domain of the CAR targets NY-BR1.

[0055] In one embodiment, provided herein is an isolated nucleic acid encoding backbone-1 comprising conventional CAR I and K13-vFLIP, wherein the antigen specific domain of the CAR targets TIM1/HAVCR (Table 19). In exemplary embodiments, the sequences of the nucleic acid fragments targeting TIM1/HAVCR are set forth in SEQ ID NOs: 1160-1161. In exemplary embodiments, the sequences of the polypeptide fragments targeting TIM1/HAVCR are set forth in SEQ ID NOs: 2905-2906. In some embodiments, the scFv fragments targeting TIM1/HAVCR are described in Table 11 and set forth in SEQ ID NO: 770-771 and SEQ ID NO: 2540-2541. Also provided herein are polypeptides encoded by nucleic acids encoding backbone-1 comprising conventional CAR I and K13-vFLIP, wherein the antigen specific domain of the CAR targets TIM1/HAVCR. Further provided herein are vectors encoding nucleic acids encoding backbone-1 comprising conventional CAR I and K13-vFLIP, wherein the antigen specific domain of the CAR targets TIM1/HAVCR. Also provided herein are genetically engineered cells (such as T cells, NK cells) comprising vectors encoding nucleic acids encoding backbone-1 comprising conventional CAR I and K13-vFLIP, wherein the antigen specific domain of the CAR targets TIM1/HAVCR.

[0056] In one embodiment, provided herein is an isolated nucleic acid encoding backbone-1 comprising conventional CAR I and K13-vFLIP, wherein the antigen specific domain of the CAR targets TROP2 (Table 19). In exemplary embodiments, the sequences of the nucleic acid fragments targeting TROP2 are set forth in SEQ ID NOs: 1165-1166. In exemplary embodiments, the sequences of the polypeptide fragments targeting TROP2 are set forth in SEQ ID NOs: 2910-2911. In some embodiments, the scFv fragments targeting TROP2 are described in Table 11 and set forth in SEQ ID NO: 774-775 and SEQ ID NO: 2544-2545. Also provided herein are polypeptides encoded by nucleic acids encoding backbone-1 comprising conventional CAR I and K13-vFLIP, wherein the antigen specific domain of the CAR targets TROP2. Further provided herein are vectors encoding nucleic acids encoding backbone-1 comprising conventional CAR I and K13-vFLIP, wherein the antigen specific domain of the CAR targets TROP2. Also provided herein are genetically engineered cells (such as T cells, NK cells) comprising vectors encoding nucleic acids encoding backbone-1 comprising conventional CAR I and K13-vFLIP, wherein the antigen specific domain of the CAR targets TROP2.

[0057] In one embodiment, provided herein is an isolated nucleic acid encoding backbone-1 comprising conventional CAR I and K13-vFLIP, wherein the antigen specific domain of the CAR targets TSHR (Table 19). In exemplary embodiments, the sequences of the nucleic acid fragments targeting TSHR are set forth in SEQ ID NOs: 1167-1170. In exemplary embodiments, the sequences of the polypeptide fragments targeting TSHR are set forth in SEQ ID NOs: 2912-2914. In some embodiments, the scFv fragments targeting TSHR are described in Table 11 and set forth in SEQ ID NO: 776-778 and SEQ ID NO: 2546-2548. Also provided herein are polypeptides encoded by nucleic acids encoding backbone-1 comprising conventional CAR I and K13-vFLIP, wherein the antigen specific domain of the CAR targets TSHR. Further provided herein are vectors encoding nucleic acids encoding backbone-1 comprising conventional CAR I and K13-vFLIP, wherein the antigen specific domain of the CAR targets TSHR. Also provided herein are genetically engineered cells (such as T cells, NK cells) comprising vectors encoding nucleic acids encoding backbone-1 comprising conventional CAR I and K13-vFLIP, wherein the antigen specific domain of the CAR targets TSHR.

[0058] In one embodiment, provided herein is an isolated nucleic acid encoding backbone-1 comprising conventional CAR I and K13-vFLIP, wherein the antigen specific domain of the CAR targets TSLPR (Table 19). In exemplary embodiments, the sequences of the nucleic acid fragment targeting TSLPR is set forth in SEQ ID NO: 1171. In exemplary embodiments, the sequence of the polypeptide fragment targeting TSLPR is set forth in SEQ ID NO: 2916 In some embodiments, the scFv fragment targeting TSLPR is described in Table 11 and set forth in SEQ ID NOs: 779 and 2549. Also provided herein is a polypeptide encoded by a nucleic acid fragment encoding backbone-1 comprising conventional CAR I and K13-vFLIP, wherein the antigen specific domain of the CAR targets TSLPR. Further provided herein are vectors encoding nucleic acids encoding backbone-1 comprising conventional CAR I and K13-vFLIP, wherein the antigen specific domain of the CAR targets TSLPR. Also provided herein are genetically-engineered cells (such as T cells, NK cells) comprising vectors encoding nucleic acids encoding backbone-1 comprising conventional CAR I and K13-vFLIP, wherein the antigen specific domain of the CAR targets TSLPR.

[0059] In one embodiment, provided herein is an isolated nucleic acid encoding backbone-1 comprising conventional CAR I and K13-vFLIP, wherein the antigen specific domain of the CAR targets CDH19 (Table 19). In exemplary embodiments, the sequences of the nucleic acid fragments targeting CDH19 are set forth in SEQ ID NO: 1019 and 1180. In exemplary embodiments, the sequences of the polypeptide fragments targeting CDH19 are set forth in SEQ ID NO: 2764 and 2925 In some embodiments, the scFv fragments targeting CDH19 are described in Table 11 and set forth in SEQ ID NOs: 651, 788 and SEQ ID NOs: 2421 and 2558. Also provided herein are polypeptides encoded by nucleic acids encoding backbone-1 comprising conventional CAR I and K13-vFLIP, wherein the antigen specific domain of the CAR targets CDH19. Further provided herein are vectors encoding nucleic acids encoding backbone-1 comprising conventional CAR I and K13-vFLIP, wherein the antigen specific domain of the CAR targets CDH19. Also provided herein are genetically-engineered cells (such as T cells, NK cells) comprising vectors encoding nucleic acids encoding backbone-1 comprising conventional CAR I and K13-vFLIP, wherein the antigen specific domain of the CAR targets CDH19.

[0060] In one embodiment, provided herein is an isolated nucleic acid encoding backbone-1 comprising conventional CAR I and K13-vFLIP, wherein the antigen specific domain of the CAR targets CDH6 (Table 19). In exemplary embodiments, the sequences of the nucleic acid fragments targeting CDH6 are set forth in SEQ ID NOs: 1017-1018. In exemplary embodiments, the sequences of the polypeptide fragments targeting CDH6 are set forth in SEQ ID NOs: 2761-2762. In some embodiments, the scFv fragments targeting CDH6 are described in Table 11 and set forth in SEQ ID NO: 648-649 and SEQ ID NO: 2418-2419. Also provided herein are polypeptides encoded by nucleic acids encoding backbone-1 comprising conventional CAR I and K13-vFLIP, wherein the antigen specific domain of the CAR targets CDH6. Further provided herein are vectors encoding nucleic acids encoding backbone-1 comprising conventional CAR I and K13-vFLIP, wherein the antigen specific domain of the CAR targets CDH6. Also provided herein are genetically engineered cells (such as T cells, NK cells) comprising vectors encoding nucleic acids encoding backbone-1 comprising conventional CAR I and K13-vFLIP, wherein the antigen specific domain of the CAR targets CDH6.

[0061] In one embodiment, provided herein is an isolated nucleic acid encoding backbone-1 comprising conventional CAR I and K13-vFLIP, wherein the antigen specific domain of the CAR targets CD324 (Table 19). In exemplary embodiments, the sequences of the nucleic acid fragments targeting CD324 are set forth in SEQ ID NOs: 1014-1015. In exemplary embodiments, the sequences of the polypeptide fragments targeting CD324 are set forth in SEQ ID NOs: 2759-2760. In some embodiments, the scFv fragments targeting CD324 are described in Table 11 and set forth in SEQ ID NO: 646-647 and SEQ ID NO: 2416-2417. Also provided herein are polypeptides encoded by nucleic acids encoding backbone-1 comprising conventional CAR I and K13-vFLIP, wherein the antigen specific domain of the CAR targets CD324. Further provided herein are vectors encoding nucleic acids encoding backbone-1 comprising conventional CAR I and K13-vFLIP, wherein the antigen specific domain of the CAR targets CD324. Also provided herein are genetically engineered cells (such as T cells, NK cells) comprising vectors encoding nucleic acids encoding backbone-1 comprising conventional CAR I and K13-vFLIP, wherein the antigen specific domain of the CAR targets CD324.

[0062] In one embodiment, provided herein is an isolated nucleic acid encoding backbone-1 comprising conventional CAR I and K13-vFLIP, wherein the antigen specific domain of the CAR targets TCR gamma-delta (TCRgd) (Table 19). In exemplary embodiments, the sequence of the nucleic acid fragment targeting TCR gamma-delta (TCRgd) is set forth in SEQ ID NO: 1155. In exemplary embodiments, the sequence of the polypeptide fragments targeting TCR gamma-delta (TCRgd) is set forth in SEQ ID NO: 2900 In some embodiments, the scFv fragment targeting TCR gamma-delta (TCRgd) is described in Table 11 and set forth in SEQ ID NOs: 765 and SEQ ID NOs: 2535. Also provided herein are polypeptides encoded by nucleic acids encoding backbone-1 comprising conventional CAR I and K13-vFLIP, wherein the antigen specific domain of the CAR targets TCR gamma-delta (TCRgd). Further provided herein are vectors encoding nucleic acids encoding backbone-1 comprising conventional CAR I and K13-vFLIP, wherein the antigen specific domain of the CAR targets TCR gamma-delta (TCRgd). Also provided herein are genetically-engineered cells (such as T cells, NK cells) comprising vectors encoding nucleic acids encoding backbone-1 comprising conventional CAR I and K13-vFLIP, wherein the antigen specific domain of the CAR targets TCR gamma-delta (TCRgd).

[0063] In one embodiment, provided herein is an isolated nucleic acid encoding backbone-1 comprising conventional CAR I and K13-vFLIP, wherein the antigen specific domain of the CAR targets TCRB1 (TCR beta 1 constant chain) (Table 19). In exemplary embodiments, the sequences of the nucleic acid fragments targeting TCRB1 (TCR beta 1 constant chain) are set forth in SEQ ID NOs: 1151-1152. In exemplary embodiments, the sequences of the polypeptide fragments targeting TCRB1 (TCR beta 1 constant chain) are set forth in SEQ ID NOs: 2896-2897. In some embodiments, the scFv fragments targeting TCRB1 (TCR beta 1 constant chain) are described in Table 11 and set forth in SEQ ID NO: 761-762 and SEQ ID NO: 2531-2532. Also provided herein are polypeptides encoded by nucleic acids encoding backbone-1 comprising conventional CAR I and K13-vFLIP, wherein the antigen specific domain of the CAR targets TCRB1 (TCR beta 1 constant chain). Further provided herein are vectors encoding nucleic acids encoding backbone-1 comprising conventional CAR I and K13-vFLIP, wherein the antigen specific domain of the CAR targets TCRB1 (TCR beta 1 constant chain). Also provided herein are genetically engineered cells (such as T cells, NK cells) comprising vectors encoding nucleic acids encoding backbone-1 comprising conventional CAR I and K13-vFLIP, wherein the antigen specific domain of the CAR targets TCRB1 (TCR beta 1 constant chain).

[0064] In one embodiment, provided herein is an isolated nucleic acid encoding backbone-1 comprising conventional CAR I and K13-vFLIP, wherein the antigen specific domain of the CAR targets TCRB2 (TCR beta 2 constant chain) (Table 19). In exemplary embodiments, the sequences of the nucleic acid fragments targeting TCRB2 (TCR beta 2 constant chain) are set forth in SEQ ID NOs: 1153-1154. In exemplary embodiments, the sequences of the polypeptide fragments targeting TCRB2 (TCR beta 2 constant chain) are set forth in SEQ ID NOs: 2898-2899. In some embodiments, the scFv fragments targeting TCRB2 (TCR beta 2 constant chain) are described in Table 11 and set forth in SEQ ID NO: 763-764 and SEQ ID NO: 2533-2534. Also provided herein are polypeptides encoded by nucleic acids encoding backbone-1 comprising conventional CAR I and K13-vFLIP, wherein the antigen specific domain of the CAR targets TCRB2 (TCR beta 2 constant chain). Further provided herein are vectors encoding nucleic acids encoding backbone-1 comprising conventional CAR I and K13-vFLIP, wherein the antigen specific domain of the CAR targets TCRB2 (TCR beta 2 constant chain). Also provided herein are genetically engineered cells (such as T cells, NK cells) comprising vectors encoding nucleic acids encoding backbone-1 comprising conventional CAR I and K13-vFLIP, wherein the antigen specific domain of the CAR targets TCRB2 (TCR beta 2 constant chain).

[0065] In one embodiment, provided herein is an isolated nucleic acid encoding backbone-1 comprising conventional CAR I and K13-vFLIP, wherein the antigen specific domain of the CAR targets LHR (Luteinizing hormone Receptor) (Table 19). In exemplary embodiments, the sequences of the nucleic acid fragments targeting LHR (Luteinizing hormone Receptor) are set forth in SEQ ID NOs: 1182-1183. In exemplary embodiments, the sequences of the polypeptide fragments targeting LHR (Luteinizing hormone Receptor) are set forth in SEQ ID NOs: 2927-2928. In some embodiments, the scFv fragments targeting LHR (Luteinizing hormone Receptor) are described in Table 11 and set forth in SEQ ID NO: 790-791 and SEQ ID NO: 2560-2561. Also provided herein are polypeptides encoded by nucleic acids encoding backbone-1 comprising conventional CAR I and K13-vFLIP, wherein the antigen specific domain of the CAR targets LHR (Luteinizing hormone Receptor). Further provided herein are vectors encoding nucleic acids encoding backbone-1 comprising conventional CAR I and K13-vFLIP, wherein the antigen specific domain of the CAR targets LHR (Luteinizing hormone Receptor). Also provided herein are genetically engineered cells (such as T cells, NK cells) comprising vectors encoding nucleic acids encoding backbone-1 comprising conventional CAR I and K13-vFLIP, wherein the antigen specific domain of the CAR targets LHR (Luteinizing hormone Receptor).

[0066] In one embodiment, provided herein is an isolated nucleic acid encoding backbone-1 comprising conventional CAR I and K13-vFLIP, wherein the antigen specific domain of the CAR targets Fc region of an immunoglobulin (Table 19). In exemplary embodiments, the sequences of the nucleic acid fragments targeting Fc region of an immunoglobulin are set forth in SEQ ID NOs: 961-962. In exemplary embodiments, the sequences of the polypeptide fragments targeting Fc region of an immunoglobulin are set forth in SEQ ID NOs: 2707-2708. In some embodiments, the receptor targeting Fc region of an immunoglobulin comprises, consists of or essentially consists of extracellular ligand-binding domain of CD16 (FCGR3A) or its variant V158 or its variant F158. Also provided herein are polypeptides encoded by nucleic acids encoding backbone-1 comprising conventional CAR I and K13-vFLIP, wherein the antigen specific domain of the CAR targets Fc region of an immunoglobulin. Further provided herein are vectors encoding nucleic acids encoding backbone-1 comprising conventional CAR I and K13-vFLIP, wherein the antigen specific domain of the CAR targets Fc region of an immunoglobulin. Also provided herein are genetically engineered cells (such as T cells, NK cells) comprising vectors encoding nucleic acids encoding backbone-1 comprising conventional CAR I and K13-vFLIP, wherein the antigen specific domain of the CAR targets Fc region of an immunoglobulin. The genetically engineered cells comprising vectors encoding nucleic acids encoding backbone-1 comprising conventional CAR I and K13-vFLIP, wherein the antigen specific domain of the CAR targets Fc region of an immunoglobulin can be used to enhance antibody dependent cell mediated cytotoxicity and/or enhance antibody based immunotherapy, such as cancer immunotherapy, as described in US 2015/0139943A1.

[0067] In exemplary embodiments, nucleic acids encoding backbone-32 comprising conventional CAR II and K13-vFLIP, wherein the antigen specific domain of the CAR targets antigens of interest are described in Table 20. The sequences of nucleic acid fragments encoding backbone-32 comprising conventional CAR II and K13-vFLIP and targeting antigens of interest as described in Table 20 are set forth in SEQ ID NOs: 1197-1466. The sequences of polypeptides encoding backbone-32 comprising conventional CAR I and K13-vFLIP and targeting antigens of interest as described in Table 20 are set forth in SEQ ID NOs: 2942-3211. The nucleic acid sequences in SEQ ID NOs: 1197-1466 and polypeptide sequences in SEQ ID NOs: 2942-3211 also encode for a puromycin acetyl transferase (PuroR) fragment, which fragment can be used to select cells and is not essential for the function of the CAR.

[0068] In one embodiment, provided herein is an isolated nucleic acid encoding backbone-32 comprising conventional CAR II and K13-vFLIP, wherein the antigen specific domain of the CAR targets CD19 (Table 20). In exemplary embodiments, nucleic acid sequences of the V_{L}-V_{H} targeting CD19 are set forth in SEQ ID NOs: 1197-1211. In exemplary embodiments, the polypeptide sequences of the V_{L}-V_{H} targeting CD19 are set forth in SEQ ID NOs: 2942-2956. In some embodiments, the scFv fragments targeting CD19 are described in Table 11 and set forth in SEQ ID NOs: 564-577 and SEQ ID NOs: 2334-2347. Also provided herein are polypeptides encoded by nucleic acids encoding backbone-32 comprising conventional CAR II and K13-vFLIP, wherein the antigen specific domain of the CAR targets CD19. Further provided herein are vectors encoding nucleic acids encoding backbone-32 comprising conventional CAR II and K13-vFLIP, wherein the antigen specific domain of the CAR targets CD19. Also provided herein are genetically engineered cells (such as T cells, NK cells) comprising vectors encoding nucleic acids encoding backbone-32 comprising conventional CAR II and K13-vFLIP, wherein the antigen specific domain of the CAR targets CD19.

[0069] In one embodiment, provided herein is an isolated nucleic acid encoding backbone-32 comprising conventional CAR II and K13-vFLIP, wherein the antigen specific domain of the CAR targets MPL (Table 20). In exemplary embodiments, nucleic acid sequences of the V_{L}-V_{H} targeting MPL are set forth in SEQ ID NOs: 1387-1394. In exemplary embodiments, the polypeptide sequences of the V_{L}-V_{H} targeting MPL are set forth in SEQ ID NOs: 3132-3139. In some embodiments, the scFv fragments targeting MPL are described in Table 11 and set forth in SEQ ID NOs: 729-736 and SEQ ID NOs: 2499-2506. Also provided herein are polypeptides encoded by nucleic acids encoding backbone-32 comprising conventional CAR II and K13-vFLIP, wherein the antigen specific domain of the CAR targets MPL. Further provided herein are vectors encoding nucleic acids encoding backbone-32 comprising conventional CAR II and K13-vFLIP, wherein the antigen specific domain of the CAR targets MPL. Also provided herein are genetically engineered cells (such as T cells, NK cells) comprising vectors encoding nucleic acids encoding backbone-32 comprising conventional CAR II and K13-vFLIP, wherein the antigen specific domain of the CAR targets MPL.

[0070] In one embodiment, provided herein is an isolated nucleic acid encoding backbone-32 comprising conventional CAR II and K13-vFLIP, wherein the antigen specific domain of the CAR targets Lym1 (Table 20). In exemplary embodiments, the nucleic acid sequence of the V_{L}-V_{H} targeting Lym1 is set forth in SEQ ID NO: 1379. In exemplary embodiments, the polypeptide sequence of the V_{L}-V_{H} targeting Lym1 is set forth in SEQ ID NO: 3124. In some embodiments, the scFv fragment targeting Lym1 is described in Table 11 and set forth in SEQ ID NO: 723 and SEQ ID NO: 2493. Also provided herein are polypeptides encoded by nucleic acids encoding backbone-32 comprising conventional CAR II and K13-vFLIP, wherein the antigen specific domain of the CAR targets Lym1. Further provided herein are vectors encoding nucleic acids encoding backbone-32 comprising conventional CAR II and K13-vFLIP, wherein the antigen specific domain of the CAR targets Lym1. Also provided herein are genetically engineered cells (such as T cells, NK cells) comprising vectors encoding nucleic acids encoding backbone-32 comprising conventional CAR II and K13-vFLIP, wherein the antigen specific domain of the CAR targets Lym1.

[0071] In one embodiment, provided herein is an isolated nucleic acid encoding backbone-32 comprising conventional CAR II and K13-vFLIP, wherein the antigen specific domain of the CAR targets Lym2 (Table 20). In exemplary embodiments, nucleic acid sequence of the V_{L}-V_{H} targeting Lym2 is set forth in SEQ ID NO: 1380. In exemplary embodiments, the polypeptide sequence of the V_{L}-V_{H} targeting Lym2 is set forth in SEQ ID NO: 3125. In some embodiments, the scFv fragment targeting Lym2 is described in Table 11 and set forth in SEQ ID NO: 724 and SEQ ID NO: 2494. Also provided herein are polypeptides encoded by nucleic acids encoding backbone-32 comprising conventional CAR II and K13-vFLIP, wherein the antigen specific domain of the CAR targets Lym2. Further provided herein are vectors encoding nucleic acids encoding backbone-32 comprising conventional CAR II and K13-vFLIP, wherein the antigen specific domain of the CAR targets Lym2. Also provided herein are genetically engineered cells (such as T cells, NK cells) comprising vectors encoding nucleic acids encoding backbone-32 comprising conventional CAR II and K13-vFLIP, wherein the antigen specific domain of the CAR targets Lym2.

[0072] In one embodiment, provided herein is an isolated nucleic acid encoding backbone-32 comprising conventional CAR I and K13-vFLIP, wherein the antigen specific domain of the CAR targets GRP-78 (Table 20). In exemplary embodiments, the nucleic acid sequence of the V_{L}-V_{H} targeting GRP-78 is set forth in SEQ ID NO: 1348. In exemplary embodiments, the polypeptide sequence of the V_{L}-V_{H} targeting GRP-78 is set forth in SEQ ID NO: 3093. In some embodiments, the scFv fragment targeting GRP-78 is described in Table 11 and set forth in SEQ ID NO: 703 and SEQ ID NO: 2473. Also provided herein are polypeptides encoded by nucleic acids encoding backbone-32 comprising conventional CAR II and K13-vFLIP, wherein the antigen specific domain of the CAR targets GRP-78. Further provided herein are vectors encoding nucleic acids encoding backbone-32 comprising conventional CAR II and K13-vFLIP, wherein the antigen specific domain of the CAR targets GRP-78. Also provided herein are genetically engineered cells (such as T cells, NK cells) comprising vectors encoding nucleic acids encoding backbone-32 comprising conventional CAR II and K13-vFLIP, wherein the antigen specific domain of the CAR targets GRP-78.

[0073] In one embodiment, provided herein is an isolated nucleic acid encoding backbone-32 comprising conventional CAR I and K13-vFLIP, wherein the antigen specific domain of the CAR targets CD79b (Table 20). In exemplary embodiments, the nucleic acid sequence of the V_{L}-V_{H} targeting CD79b are set forth in SEQ ID NO: 1381. In exemplary embodiments, the polypeptide sequence of the V_{L}-V_{H} targeting CD79b is set forth in SEQ ID NO: 3126. In some embodiments, the scFv fragment targeting CD79b is described in Table 11 and set forth in SEQ ID NO: 628 and SEQ ID NO: 2398. Also provided herein are polypeptides encoded by nucleic acids encoding backbone-32 comprising conventional CAR II and K13-vFLIP, wherein the antigen specific domain of the CAR targets CD79b. Further provided herein are vectors encoding nucleic acids encoding backbone-32 comprising conventional CAR II and K13-vFLIP, wherein the antigen specific domain of the CAR targets CD79b. Also provided herein are genetically engineered cells (such as T cells, NK cells) comprising vectors encoding nucleic acids encoding backbone-32 comprising conventional CAR II and K13-vFLIP, wherein the antigen specific domain of the CAR targets CD79b.

[0074] In one embodiment, provided herein is an isolated nucleic acid encoding backbone-1 comprising conventional CAR II and K13-vFLIP, wherein the antigen specific domain of the CAR targets Fc region of an immunoglobulin (Table 20). In exemplary embodiments, the sequences of the nucleic acid fragments targeting Fc region of an immunoglobulin are set forth in SEQ ID NOs: 1232-1233. In exemplary embodiments, the sequences of the polypeptide fragments targeting Fc region of an immunoglobulin are set forth in SEQ ID NOs: 2977-2978. In some embodiments, the receptor targeting Fc region of an immunoglobulin comprises, consists of or essentially consists of extracellular ligand-binding domain of CD16 (FCGR3A) or its variant V158 or its variant F158. Also provided herein are polypeptides encoded by nucleic acids encoding backbone-1 comprising conventional CAR II and K13-vFLIP, wherein the antigen specific domain of the CAR targets Fc region of an immunoglobulin. Further provided herein are vectors encoding nucleic acids encoding backbone-1 comprising conventional CAR II and K13-vFLIP, wherein the antigen specific domain of the CAR targets Fc region of an immunoglobulin. Also provided herein are genetically engineered cells (such as T cells, NK cells) comprising vectors encoding nucleic acids encoding backbone-1 comprising conventional CAR II and K13-vFLIP, wherein the antigen specific domain of the CAR targets Fc region of an immunoglobulin. The genetically engineered cells comprising vectors encoding nucleic acids encoding backbone-1 comprising conventional CAR II and K13-vFLIP, wherein the antigen specific domain of the CAR targets Fc region of an immunoglobulin can be used to enhance antibody dependent cell mediated cytotoxicity and/or enhance antibody based immunotherapy, such as cancer immunotherapy, as described in US 2015/0139943A1.

[0075] In exemplary embodiments, nucleic acids encode conventional CAR II wherein the antigen specific domain of the CAR targets antigens of interest (Table 21). The sequences of nucleic acid fragments encoding conventional CAR II and targeting antigens of interest as described in Table 21 are set forth in SEQ ID NOs: 1467-1730. The sequences of polypeptides comprising conventional CAR II and targeting antigens of interest as described in Table 21 are set forth in SEQ ID NOs: 3212-3475. The nucleic acid sequences in SEQ ID NOs: 1467-1730 and polypeptide sequences in SEQ ID NOs: 3212-3475 also encode for a puromycin acetyl transferase (PuroR) fragment, which fragment can be used to select cells and is not essential for the function of the CAR. Similarly, several CAR constructs described in Table 22 encode for PuroR or Enhanced Green Fluorescent Protein (EGFP), which are not essential for the function of these CAR constructs but may be used to select or enrich for cells expressing these CAR constructs.

[0076] In one embodiment, provided herein is an isolated nucleic acid encoding conventional CAR II, wherein the antigen specific domain of the CAR targets CD19 (Table 21). In exemplary embodiments, the sequences of isolated nucleic acid fragments targeting CD19 are set forth in SEQ ID NOs: 1470-1481, 1772. In exemplary embodiments, the sequences of isolated polypeptide targeting CD19 are set forth in SEQ ID NOs: 3215-3225, 3517. In some embodiments, the scFv fragments targeting CD19 are described in Table 11 and set forth in SEQ ID NOs: 566-577 and SEQ ID NOs: 2336-2347. Also provided herein are polypeptides encoded by nucleic acids encoding conventional CAR II, wherein the antigen specific domain of the CAR targets CD19. Further provided herein are vectors encoding nucleic acids encoding conventional CAR II, wherein the antigen specific domain of the CAR targets CD19. Also provided herein are genetically engineered cells (such as T cells, NK cells) comprising vectors encoding nucleic acids encoding conventional CAR II, wherein the antigen specific domain of the CAR targets CD19.

[0077] In one embodiment, provided herein is an isolated nucleic acid encoding conventional CAR II, wherein the antigen specific domain of the CAR targets MPL or the Thrombopoietin Receptor (Table 21). In exemplary embodiments, the sequences of isolated nucleic acid fragments targeting MPL are set forth in SEQ ID NOs: 1657-1664, 1731-1737. In exemplary embodiments, the sequences of isolated polypeptide targeting MPL are set forth in SEQ ID NOs: 3402-3409, 3476-3484. In some embodiments, the scFv fragments targeting MPL are described in Table 11 and set forth in SEQ ID NOs: 729-736 and SEQ ID NOs: 2499-2506. Also provided herein are polypeptides encoded by nucleic acids encoding conventional CAR II, wherein the antigen specific domain of the CAR targets MPL. Further provided herein are vectors encoding nucleic acids encoding conventional CAR II, wherein the antigen specific domain of the CAR targets MPL. Also provided herein are genetically engineered cells (such as T cells, NK cells) comprising vectors encoding nucleic acids encoding conventional CAR II, wherein the antigen specific domain of the CAR targets MPL.

[0078] In one embodiment, provided herein is an isolated nucleic acid encoding conventional CAR II, wherein the antigen specific domain of the CAR targets Lym1 (Table 21). In exemplary embodiments, the sequence of nucleic acid fragment targeting Lym1 is set forth in SEQ ID NO: 1649. In exemplary embodiments, the sequence of isolated polypeptide fragment targeting Lym1 is set forth in SEQ ID NO: 3394. In some embodiments, the scFv fragment targeting Lym1 is described in Table 11 and set forth in SEQ ID NO: 723 and SEQ ID NO: 2493. Also provided herein are polypeptides encoded by nucleic acids encoding conventional CAR II, wherein the antigen specific domain of the CAR targets Lym1. Further provided herein are vectors encoding nucleic acids encoding conventional CAR II, wherein the antigen specific domain of the CAR targets Lym1. Also provided herein are genetically engineered cells (such as T cells, NK cells) comprising vectors encoding nucleic acids encoding conventional CAR II, wherein the antigen specific domain of the CAR targets Lym1.

[0079] In one embodiment, provided herein is an isolated nucleic acid encoding conventional CAR II, wherein the antigen specific domain of the CAR targets Lym2 (Table 21). In exemplary embodiments, sequence of the isolated nucleic acid fragment targeting Lym2 is set forth in SEQ ID NO: 1650. In exemplary embodiments, the sequence of isolated polypeptide targeting Lym2 is set forth in SEQ ID NO: 3395. In some embodiments, the scFv fragment targeting Lym2 is described in Table 11 and set forth in SEQ ID NO: 724 and SEQ ID NO: 2494. Also provided herein are polypeptides encoded by nucleic acids encoding conventional CAR II, wherein the antigen specific domain of the CAR targets Lym2. Further provided herein are vectors encoding nucleic acids encoding conventional CAR II, wherein the antigen specific domain of the CAR targets Lym2. Also provided herein are genetically engineered cells (such as T cells, NK cells) comprising vectors encoding nucleic acids encoding conventional CAR II, wherein the antigen specific domain of the CAR targets Lym2.

[0080] In one embodiment, provided herein is an isolated nucleic acid encoding conventional CAR II, wherein the antigen specific domain of the CAR targets DLL3 (Table 21). In exemplary embodiments, the sequences of isolated nucleic acid fragments targeting DLL3 are set forth in SEQ ID NOs: 1314-1315. In exemplary embodiments, the sequences of isolated polypeptide targeting DLL3 are set forth in SEQ ID NOs: 3059-3060. In some embodiments, the scFv fragments targeting DLL3 are described in Table 11 and set forth in SEQ ID NOs: 673-674 and SEQ ID NOs: 2443-2444. Also provided herein are polypeptides encoded by nucleic acids encoding conventional CAR II, wherein the antigen specific domain of the CAR targets DLL3. Further provided herein are vectors encoding nucleic acids encoding conventional CAR II, wherein the antigen specific domain of the CAR targets DLL3. Also provided herein are genetically engineered cells (such as T cells, NK cells) comprising vectors encoding nucleic acids encoding conventional CAR II, wherein the antigen specific domain of the CAR targets DLL3.

[0081] In one embodiment, provided herein is an isolated nucleic acid encoding conventional CAR II, wherein the antigen specific domain of the CAR targets CD324 (Table 21). In exemplary embodiments, the sequences of isolated nucleic acid fragments targeting CD324 are set forth in SEQ ID NOs: 1554-1555. In exemplary embodiments, the sequences of isolated polypeptide targeting CD324 are set forth in SEQ ID NOs: 3299-3300. In some embodiments, the scFv fragments targeting CD324 are described in Table 11 and set forth in SEQ ID NOs: 646-647 and SEQ ID NOs: 2416-2417. Also provided herein are polypeptides encoded by nucleic acids encoding conventional CAR II, wherein the antigen specific domain of the CAR targets CD324. Further provided herein are vectors encoding nucleic acids encoding conventional CAR II, wherein the antigen specific domain of the CAR targets CD324. Also provided herein are genetically engineered cells (such as T cells, NK cells) comprising vectors encoding nucleic acids encoding conventional CAR II, wherein the antigen specific domain of the CAR targets CD324.

[0082] In one embodiment, provided herein is an isolated nucleic acid encoding conventional CAR II, wherein the antigen specific domain of the CAR targets CD276 (Table 21). In exemplary embodiments, the sequence of nucleic acid fragment targeting CD276 is set forth in SEQ ID NO: 1553. In exemplary embodiments, the sequence of isolated polypeptide fragment targeting CD276 is set forth in SEQ ID NO: 3298. In some embodiments, the scFv fragment targeting CD276 is described in Table 11 and set forth in SEQ ID NO: 645 and SEQ ID NO: 2415. Also provided herein are polypeptides encoded by nucleic acids encoding conventional CAR II, wherein the antigen specific domain of the CAR targets CD276. Further provided herein are vectors encoding nucleic acids encoding conventional CAR II, wherein the antigen specific domain of the CAR targets CD276. Also provided herein are genetically engineered cells (such as T cells, NK cells) comprising vectors encoding nucleic acids encoding conventional CAR II, wherein the antigen specific domain of the CAR targets CD276.

[0083] In one embodiment, provided herein is an isolated nucleic acid encoding conventional CAR II, wherein the antigen specific domain of the CAR targets PTK7 (Table 21). In exemplary embodiments, the sequences of isolated nucleic acid fragments targeting PTK7 are set forth in SEQ ID NOs: 1683-1684. In exemplary embodiments, the sequences of isolated polypeptide targeting PTK7 are set forth in SEQ ID NOs: 3428-3429. In some embodiments, the scFv fragments targeting PTK7 are described in Table 11 and set forth in SEQ ID NOs: 753-754 and SEQ ID NOs:2523-2524. Also provided herein are polypeptides encoded by nucleic acids encoding conventional CAR II, wherein the antigen specific domain of the CAR targets PTK7. Further provided herein are vectors encoding nucleic acids encoding conventional CAR II, wherein the antigen specific domain of the CAR targets PTK7. Also provided herein are genetically engineered cells (such as T cells, NK cells) comprising vectors encoding nucleic acids encoding conventional CAR II, wherein the antigen specific domain of the CAR targets PTK7.

[0084] In one embodiment, provided herein is an isolated nucleic acid encoding conventional CAR II, wherein the antigen specific domain of the CAR targets HIV1-envelop glycoprotein gp120 (Table 21). In exemplary embodiments, sequence of the isolated nucleic acid fragment targeting HIV1-envelop glycoprotein gp120 is set forth in SEQ ID NO: 1485. In exemplary embodiments, the sequence of isolated polypeptide targeting HIV1-envelop glycoprotein gp120 is set forth in SEQ ID NO: 3230. In some embodiments, the scFv fragment targeting HIV1-envelop glycoprotein gp120 is described in Table 11 and set forth in SEQ ID NO: 581 and SEQ ID NO: 2351. Also provided herein are polypeptides encoded by nucleic acids encoding conventional CAR II, wherein the antigen specific domain of the CAR targets HIV1-envelop glycoprotein gp120. Further provided herein are vectors encoding nucleic acids encoding conventional CAR II, wherein the antigen specific domain of the CAR targets HIV1-envelop glycoprotein gp120. Also provided herein are genetically engineered cells (such as T cells, NK cells) comprising vectors encoding nucleic acids encoding conventional CAR II, wherein the antigen specific domain of the CAR targets HIV1-envelop glycoprotein gp120.

[0085] In one embodiment, provided herein is an isolated nucleic acid encoding conventional CAR II, wherein the antigen specific domain of the CAR targets tyrosinase-derived peptides in association with WIC class I complex (Table 21). In exemplary embodiments, sequence of the isolated nucleic acid fragments targeting tyrosinase-derived peptides in association with WIC class I complex (HLA-A2) is set forth in SEQ ID NO: 1712-1714. In exemplary embodiments, the sequence of isolated polypeptides targeting tyrosinase-derived peptides in association with MHC class I complex (HLA-A2) is set forth in SEQ ID NO: 3457-3459. In some embodiments, the scFv fragments targeting tyrosinase-derived peptide in association with MHC class II (HLA-A2) complex is described in Table 11 and set forth in SEQ ID NO:780-782 and SEQ ID NO: 2550-2552. Also provided herein are polypeptides encoded by nucleic acids encoding conventional CAR II, wherein the antigen specific domain of the CAR targets tyrosinase-derived peptides in association with WIC class I complex (HLA-A2). Further provided herein are vectors encoding nucleic acids encoding conventional CAR II, wherein the antigen specific domain of the CARs target tyrosinase-derived peptides in association with WIC class I complex (HLA-A2). Also provided herein are genetically engineered cells (such as T cells, NK cells) comprising vectors encoding nucleic acids encoding conventional CAR II, wherein the antigen specific domain of the CAR targets target tyrosinase-derived peptides in association with MHC class I complex (HLA-A2). In exemplary embodiment, the sequence of the tyrosinase-derived peptide that is targeted by the CAR in association with WIC class I complex (HLA-A2) is -YMDGTMSQV- (Table 23).

[0086] In some embodiments, provided herein are vectors comprising nucleic acid sequences encoding the conventional CARs or novel backbones (comprising conventional CARs and accessory modules) described herein. In exemplary embodiments, the vector is any of a DNA vector, an RNA vector, a plasmid, a lentivirus vector, an adenoviral vector or a retrovirus vector. In an embodiment, the vector is a lentivirus vector as described herein. In an embodiment, the vector is pLENTI-EF1α (SEQ ID NO: 905). In another embodiment, the vector is pLenti-EF1α-DWPRE (SEQ ID NO: 906). In another embodiment, the vector is MSCV-Bgl2-AvrII-Bam-EcoR1-Xho-BstB1-Mlu-Sal-ClaI.I03 (SEQ ID NO: 907). In another embodiment, the vector is a sleeping beauty transposon vector. In another embodiment, the sleeping beauty transposon vector is pSBbi-Pur (SEQ ID NO: 908). In one embodiment, the vector further comprises a promoter. Non-limiting examples of a promoter include from an EF-1 promoter, a CMV IE gene promoter, an EF-1α promoter, an ubiquitin C promoter, or a phosphoglycerate kinase (PGK) promoter. In one embodiment, the promoter is an EF-1 promoter (SEQ ID NO: 909). In one embodiment, the promoter is an inducible promoter that provides a molecular switch capable of turning on expression of the polynucleotide sequence encoding conventional CARs I to III and backbones 1-62 which it is operatively linked when such expression is desired, or turning off the expression when expression is not desired. Examples of inducible promoters include, but are not limited to a metallothionine inducible promoter, a glucocorticoid inducible promoter, a progesterone inducible promoter, and a tetracycline inducible promoter. RheoSwitch® system (Agarwal et al, 2012, AACR-NCI-EORTC international conference on Molecular Targets and Cancer Therapeutics) represents another transcriptional regulator platform for controlling the expression of conventional CARs and backbones 1-62 of the present invention. In one embodiment, a combinatorially activated T cell circuit can be engineered in which a synthetic Notch receptor for one antigen induces the expression of a conventitonal CAR or backbones 1-62 targeting a second antigen as described recently for controlling the activity of CARs (Roybal K T et al., Cell, 164:1-10 2016). In one embodiment, the vector is an in vitro transcription vector, (for example, a vector that transcribes RNA from a DNA molecule) described herein. In one embodiment, the nucleic acid sequence in the vector further comprises a poly(A) tail, e.g., a poly A tail described herein, e.g., comprising about 100-150 adenosine bases. For example, contemplated herein is a poly(A) tail comprising about 150 adenosine bases (SEQ ID NO: 922). In one embodiment, the nucleic acid sequence in the vector further comprises a 3′UTR, e.g., a 3′ UTR described herein, e.g., comprising at least one repeat of a 3′UTR derived from human beta-globulin.

[0087] In some embodiments, the vector comprising a nucleic acid sequence encoding a CAR may further comprise a nucleic acid sequence encoding one or more inhibitory molecules. Non-limiting examples of inhibitory molecules contemplated herein include: an inhKIR cytoplasmic domain; a transmembrane domain, e.g., a KIR transmembrane domain; and an inhibitor cytoplasmic domain, e.g., an ITIM domain, e.g., an inhKIR ITIM domain. An exemplary inhibitory molecule comprising the transmembrane and cytoplasmic domains of LAILR1 is represented by SEQ ID NOS: 849 and 2612. Inhibitory conventional CARs and backbones 1-62 targeting different antigens can be easily constructed by joining the scFv fragments described in Table 11 to the transmembrane and cytoplasmic domains of LAILR1 (SEQ ID NOS: 849 and 2612). Such inhibitory CARs can be expressed alone or in combination with the activating CARs, such as the CARs described in Tables 19-22.

[0088] In some embodiments, the ASD of the CARs described herein have a binding affinity (KD) of 10⁻⁴M to 10⁻⁸M, 10⁻⁵ M to 10⁻⁷M, 10⁻⁶M or 10⁻⁷M, for the target antigen.

[0089] Also provided herein are genetically engineered cells e.g., an immune effector cell, (e.g., a population of cells, e.g., a population of immune effector cells) and/or a stem cell (e.g., a hematopoietic stem cell, a peripheral blood stem cell, a bone marrow derived stem cell, an immune stem cell, an induced pluripotent stem cell or iPSC) comprising nucleic acids, polypeptides or vectors as described herein.

[0090] In one embodiment, the cell is a human T cell. In some embodiments, the cell is an immune cell. Non-limiting examples of immune cells include T-cells and NK-cells. Further, non-limiting examples of T-cells include Tregs, CD8+ T cells, and CD4+ T cells. Immune cells, (e.g., T cells and NK cells) can be obtained from a number of sources, including peripheral blood mononuclear cells, bone marrow, lymph node tissue, cord blood, thymus tissue, tissue from a site of infection, ascites, pleural effusion, spleen tissue, and tumors. T cells could be tissue resident gamma-delta T cells or tumor infiltrating lymphocytes (TILs), which can be cultured and expanded in vitro prior to and/or after the expression of the CARs and the novel backbones of this invention. In some embodiments, the cell is a mammalian cell. In some embodiment, the cell is a human cell. In some embodiments, the cell is a dog cell. In some embodiments, the cell is a monkey cell.

[0091] In one embodiment, the cell is a T cell and the T cell is deficient in one or more of endogenous T cell receptor chains. T cells stably lacking expression of a functional TCR according to the invention may be produced using a, variety of approaches such as use of Zn finger nucleases (ZFN), CRISP/Cas9 and shRNA targeting the endogenous T cell receptor chains. A non-limiting exemplary method relating to shRNAs is described in US 2012/0321667 A1. Another non-limiting exemplary method relating to eliminating endogenous TCR expression using ZFNs targeting constant regions of α and β chains of TCRs has been described (Torikai H et al., Blood 119:24, 2012).

[0092] In one embodiment, the cell is a stem cell and the stem cell is deficient in one or more of endogenous T cell receptor chains. In another embodiment, the cell is a stem cell in which one or more target antigens of the CAR have been deleted or mutated to a form that is no longer recognized by the CAR. In a non-limiting example, a CAR targeting CD19 is expressed in stem cells that have been made deficient in CD19 using CRISP/Cas9 or Zn finger nucleases so that the B cells produced by such stem cells are not eliminated by the T cells expressing the CD19-targeting CAR. In another non-limiting example, a CAR targeting CD19 is expressed in stem cells in which the endogenous CD19 gene has been mutated using CRISP/Cas9 or Zn finger nucleases to a form that is not targeted by CAR so that the B cells produced by such stem cells are not eliminated by the T cells expressing the CD19-targeting CAR. In another non-limiting example, the CAR is expressed in immune effector cells and the stem cells from an autologous or an allogeneic donor are genetically engineered to either lack the expression of the target antigen of the CAR or to express a mutated form of the target antigen of the CAR which is not recognized by the CAR. In another non-limiting example, a CAR targeting CD19 is expressed in T cells that are infused into a patient along with autologous or allogeneic hematopoietic stem cells that have been made deficient in CD19 using CRISP/Cas9 or Zn finger nucleases so that the B cells produced by such stem cells are not eliminated by the T cells expressing the CD19-targeting CAR. In another non-limiting example, a CAR targeting CD19 is expressed in T cells that are infused into a patient along with autologous or allogeneic hematopoietic stem cells in which the endogenous CD19 gene has been mutated using CRISP/Cas9 or Zn finger nucleases to a form that is not targeted by CAR so that the B cells produced by such stem cells are not eliminated by the T cells expressing the CD19-targeting CAR. In other non-limiting examples, CRISP/Cas9, Zn finger nucleases or siRNA/shRNA approaches are used to mutate or eliminate other endogenous antigens (e.g., MPL, CD33, CD123 etc.) in stem cells in subjects receiving CAR-T cells targeting these antigens for the treatment of specific diseases in which these antigens are expressed on disease-associated or disease-causing cells. In a non-limiting example, a CAR targeting MPL is expressed in stem cells that have been made deficient in MPL using CRISP/Cas9 or Zn finger nucleases so that the blood cells produced by such stem cells are not eliminated by the T cells expressing the MPL-targeting CAR. In another non-limiting example, a CAR targeting MPL (e.g., SEQ ID NO: 1657-1660) is expressed in stem cells in which the endogenous MPL gene has been mutated using CRISP/Cas9 or Zn finger nucleases to a form that is not targeted by MPL-directed CAR so that the blood cells produced by such stem cells are not eliminated by the T cells expressing the MPL-targeting CAR. In another non-limiting example, a CAR targeting MPL is expressed in T cells that are infused into a patient along with autologous or allogeneic hematopoietic stem cells in which the endogenous MPL gene has been mutated using CRISP/Cas9 or Zn finger nucleases to a form that is not targeted by CAR. In an exemplary embodiment the region of MPL gene that is targeted for mutation by CRISP/Cas9 or Zn finger nucleases to a form that is not targeted by MPL-directed CAR encodes for the peptide sequence -PWQDGPK-.

[0093] In various embodiments, the CARs target one, two, three, four or more antigens on the diseased-causing or disease-associated cells, such as the cancer cells. In some embodiments, the CARs comprising more than one ASD target the same antigen on the diseased-causing or disease-associated cells. In another embodiment, the CARs comprising more than one ASD target different antigens on the diseased-causing or disease-associated cells.

[0094] In some embodiments, the genetically engineered cells further comprise nucleic acids, polypeptides or vectors that encode accessory modules. In some embodiments, the accessory modules reduce or prevent toxicity associated with CARs. In some embodiments, the accessory modules are inhibitors of cytokines or chemokines, for examples, siRNA (either shRNA or Mir based shRNAs) against the involved cytokine and/or chemokine and are expressed from the same vector as the CAR. For example, any one or more of IL6, IL10 and IFNγ can be targeted. In some embodiments, the expression of the chemokine or cytokine can be blocked by expression of a blocking scFv fragment targeting the chemokine or cytokine or its receptor. Non-limiting examples of such accessory modules include IL6R-304-vHH (SEQ ID NOs: 884 and 2647), IGHSP2-IL6R-304-VHH-ALB8-VHH (SEQ ID NOs: 886 and 2649), CD8SP2-PD1-4H1-scFv (SEQ ID NOs: 889 and 2652), CD8SP2-PD1-5C4-scFv CD8SP2-CTLA4-Ipilimumab-scFv (SEQ ID NOs: 891 and 2654), CD8SP2-PD1-4H1-Alb8-vHH (SEQ ID NOs: 892 and 2655), CD8SP2-PD1-5C4-Alb8-vHH (SEQ ID NOs: 893 and 2656), CD8SP2-CTLA4-Ipilimumab-Alb8-vHH (SEQ ID NOs: 894 and 2657), IgSP-IL6-19A-scFV (SEQ ID NOs: 899 and 2662), CD8SP2-sHVEM (SEQ ID NOs: 901 and 2664), CD8SP2-sHVEM-Alb8-vHH (SEQ ID NOs: 902 and 2665), hTERT (SEQ ID NOs: 903 and 2666), Heparinase (SEQ ID NOs: 904 and 2667), IL12F (SEQ ID NOs: 863 and 2626), 41BB-L (SEQ ID NOs: 864 2627), CD40L (SEQ ID NOs: 865 2628) and shRNA targeting Brd4 (SEQ ID NO: 919). An exemplary vector expressing H1 promoter-driven shRNA targeting Brd4 that can be used to clone the conventional CARs and novel backbones 1-62 of the invention is pLenti-EF1a-shRNA-BRD4-DWPRE (SEQ ID NO: 920). An exemplary CAR in backbone 1 coexpressing shRNA targeting Brd4 is pLenti-EF1a-CD8 SP-FMC63-(vL-vH)-Myc-z-P2A-K13-Flag-T2A-PAC-H1-prom-shRNA-BRD4-DWPRE (SEQ ID NO: 921).

[0095] Capillary leak syndrome is another major complication of CARs. A natural plasmin digest product of fibrin, peptide BB15-42 (also called FX06), has been shown to significantly reduce vascular leak (Groger et al., PLoS ONE 4:e5391, 2009). FX06 peptide has been shown to block capillary leak. In some embodiments, as described herein, FX06 (SEQ ID NOs: 900 and 2663) can be coexpressed with the CARs described herein from the same vector to mitigate capillary leak associated with CAR therapy. The nucleic acid and protein sequences of an exemplary CAR co-expressing FX06 are represented by SEQ ID NOs: 1764 and 3509, respectively.

[0096] A limitation of the current technology for adoptive cellular therapy with T cells is the limited life span of genetically modified T cells, such as CAR-T cells, when infused into patients. To extend the life span of genetically-modified T cells, provided herein are vectors expressing CARs in conjunction with a number of viral and cellular proteins that stimulate the proliferation of T cells and/or to protect them from activation-induced cell death. The use of these proteins, however, is not limited to CAR-expressing T cells and they can be used to extend the life-span of any immune cells that are to be used for the purpose of adoptive immunotherapy, including but not limited to any T cell (e.g., autologous T cells or allogeneic T cells), T cell subsets (e.g., CD8, CD4, TILs), T cells directed against specific tumor antigens or infectious agents, T cells expressing an exogenous T cell receptor (i.e., TCR gene therapy), and T cells expressing a synthetic or chimeric T cell receptor. The DNA and protein sequences of several proteins that can promote the proliferation and survival of CAR-expressing T cells are provided in SEQ ID NOs; 862-882 and SEQ ID NOs: 2625-2645, respectively (Table 16). In exemplary embodiments, these proteins include any one or more of viral proteins K13-vFLIP (SEQ ID NOs: 866 and 2629) and MC159-vFLIP (SEQ ID NOs: 867 and 2630) as described herein. In further embodiments, these proteins include cFLIP-L/MRIT-alpha (SEQ ID NOs: 873 and 2636) and cFLIP-p22 (SEQ ID NOs: 874 and 2637). In further embodiments, these proteins include any one, two or more of Tax and Tax-mutants from human T cell leukemia/lymphoma virus (HTLV-1 and HTLV-2) (SEQ ID NOs: 875-877 and SEQ ID NOs: 2638-2640), Tio protein from herpes virus ateles, stpC Tip from Herpes virus Saimiri. The use of the viral and cellular proteins to promote the survival and proliferation of T cells, is however, not limited to CAR-expressing T cells. In further embodiment, these viral and cellular proteins can be used to promote the survival and proliferation of any T cell, including those expressing an exogenous T cell receptor or synthetic T cell receptor.

[0097] In one embodiment, the viral and cellular proteins that are known to stimulate the proliferation of T cells and/or to protect them from activation-induced cell death can be expressed in the CAR-expressing cells constitutively. In another embodiment, the viral and cellular proteins that are known to stimulate the proliferation of T cells and/or to protect them from activation-induced cell death can be expressed in the CAR-expressing cells in an inducible manner, for example, using an inducible promoter. Examples of inducible promoters include, but are not limited to a metallothionine inducible promoter, a glucocorticoid inducible promoter, a progesterone inducible promoter, and a tetracycline inducible promoter. RheoSwitch® system represents another transcriptional regulator platform for controlling the expression of CAR of the present invention (Agarwal et al, 2012, AACR-NCI-EORTC international conference on Molecular Targets and Cancer Therapeutics). In another embodiment, the activity of the viral and cellular proteins that are known to stimulate the proliferation of T cells and/or to protect them from activation-induced cell death is controlled by expressing them in fusion with a dimerization domain. Non-limiting examples of dimerization domains include FKBP (SEQ ID NOs: 857-858 and SEQ ID NOs: 2620 and 2621), FKBPx2 (SEQ ID NOs: 859 and 2622) and Myr-FKBP. Non-limiting examples of several viral and cellular proteins in fusion with FKBP domains are provided in SEQ ID NOs: 878-882 and SEQ ID NOs: 2641 to 2645 (Table 16). The DNA and protein sequences of exemplary CAR constructs coexpressing a viral protein in fusion with FKBP dimerization domain(s) are provided in SEQ ID NOs: 1755 to 1758 and SEQ ID NOs: 3500 to 3503.

[0098] Further, a Src inhibitor can be used to prevent and/or treat the toxicity associated with the administration of CAR-expressing cells. In some embodiments, the Src inhibitors are particularly useful for the treatment of cytokine release syndrome and neurological complications associated with the use of genetically modified T cells (e.g., T cells expressing CAR or exogenous TCR or chimeric TCR), Bispecific T cell engagers (BiTE) and DARTs (Dual Affinity Re-targeting proteins).

[0099] Also provided herein are methods for treating a disease in a subject in need thereof comprising administering to the subject a therapeutically effective amount of a nucleic acid encoding one or more conventional CARs I to III, a therapeutically effective amount of a nucleic acid encoding one or more CARs and at least one accessory module (backbones 1-62), a therapeutically effective amount of polypeptide encoded by the nucleic acid encoding one or more conventional CARs I to III, a therapeutically effective amount of polypeptide encoded by the nucleic acid encoding one or more CARs and at least one accessory module (backbones 1-62), a therapeutically effective amount of genetically modified cells, as described herein, comprising nucleic acid encoding one or more conventional CARs I to III, or a therapeutically effective amount of genetically modified cells, as described herein, comprising nucleic acid encoding one or more conventional CARs and at least one accessory module (backbones 1-62), as described herein. In one embodiment, the nucleic acids, polypeptides, vectors and genetically modified cells comprise a conventional CAR II. In one embodiment, the nucleic acids, polypeptides, vectors and genetically modified cells comprise backbone-1, comprising a conventional CAR I and K13-vFLIP. In one embodiment, the nucleic acids, polypeptides, vectors and genetically modified cells comprise backbone-32, comprising a conventional CAR II and K13-vFLIP. In one embodiment, the disease treated or prevented by CAR is a cancer. In other embodiments, the diseases treated or prevented by CARs are infectious diseases, allergic diseases, autoimmune diseases, a degenerative diseases, or a combination thereof.

[0100] In one embodiment, provided herein is a method for treating, inhibiting, reducing the severity of, preventing metastasis of and/or reducing the relapse of a disease in a subject in need thereof, comprising administering to the subject a therapeutically effective amount of genetically modified cells comprising nucleic acid encoding one or more conventional CARs. In one embodiment, the genetically modified cells comprise vectors encoding a conventional CAR II as described herein. In one embodiment, provided herein is a method for treating, inhibiting, reducing the severity of, preventing metastasis of and/or reducing the relapse of cancer in a subject in need thereof, comprising administering to the subject a therapeutically effective amount of genetically modified cells comprising nucleic acid encoding one or more CARs and at least one accessory module (backbones 1-62). In one embodiment, the genetically modified cells comprise vectors encoding backbone-1, comprising a conventional CAR I and K13-vFLIP as described herein. In one embodiment, the genetically modified cells comprise vectors encoding backbone-32, comprising a conventional CAR II and K13-vFLIP as described herein. In some embodiments, the vectors encoding CARs target two, three or more antigens on cancer cells. In one embodiment, the disease treated or prevented by administration of genetically modified cells comprising nucleic acid encoding one or more CARs is a cancer. In other embodiments, the diseases treated or prevented by administration of genetically modified cells comprising nucleic acid encoding one or more CARs are infectious disease, allergic diseases, autoimmune diseases, a degenerative diseases, or combination thereof.

[0101] In exemplary embodiments, the cancer is any of colon cancer, rectal cancer, renal-cell carcinoma, liver cancer, non-small cell carcinoma of the lung, cancer of the small intestine, cancer of the esophagus, melanoma, bone cancer, pancreatic cancer, skin cancer, cancer of the head or neck, cutaneous or intraocular malignant melanoma, uterine cancer, ovarian cancer, rectal cancer, cancer of the anal region, stomach cancer, testicular cancer, uterine cancer, carcinoma of the fallopian tubes, carcinoma of the endometrium, carcinoma of the cervix, carcinoma of the vagina, carcinoma of the vulva, Hodgkin's Disease, non-Hodgkin's lymphoma, cancer of the endocrine system, cancer of the thyroid gland, cancer of the parathyroid gland, cancer of the adrenal gland, sarcoma of soft tissue, cancer of the urethra, cancer of the penis, solid tumors of childhood, cancer of the bladder, cancer of the kidney or ureter, carcinoma of the renal pelvis, neoplasm of the central nervous system (CNS), primary CNS lymphoma, primary effusion lymphoma, tumor angiogenesis, spinal axis tumor, brain stem glioma, pituitary adenoma, Kaposi's sarcoma, epidermoid cancer, squamous cell cancer, T-cell lymphoma, environmentally induced cancers, combinations of said cancers, and metastatic lesions of said cancers.

[0102] Also provided herein are methods for treating, inhibiting, reducing the severity of, preventing metastasis of and/or reducing the relapse of hematological cancer in a subject in need thereof comprising administering to the subject a therapeutically effective amount of genetically modified cells, as described herein, wherein the genetically modified cells comprise vectors encoding a conventional CAR II as described herein.

[0103] Also provided herein are methods for treating, inhibiting, reducing the severity of, preventing metastasis of and/or reducing the relapse of hematological cancer in a subject in need thereof comprising administering to the subject a therapeutically effective amount of genetically modified cells, as described herein, wherein the genetically modified cells comprise vectors encoding backbone-1, comprising conventional CAR I and K13-vFLIP or vectors encoding backbone-32, comprising CAR II and K13-vFLIP. In one embodiment, the ASD of the CAR targets MPL. In exemplary embodiments, conventional CAR II targeting MPL are described in Table 21 and 22 and comprise nucleic acid sequences set forth in SEQ ID NOs: 1657-1664 and 1731-1739 and comprise polypeptide sequences set forth in SEQ ID NOs: 3402-3409 and 3476-3484. In exemplary embodiments, conventional CAR I targeting MPL and coexpressing K13-vFLIP (backbone 1) are described in Table 19 and comprise nucleic acid sequences set forth in SEQ ID NOs: 1117-1124 and 1747 and comprise polypeptide sequences set forth in SEQ ID NOs: 2862-2869 and 3492. In exemplary embodiments, conventional CAR II targeting MPL and coexpressing K13-vFLIP (backbone 32) are described in Tables 20 and 22 and comprise nucleic acid sequences set forth in SEQ ID NOs: 1387-1394 and 1747 and comprise polypeptide sequences set forth in SEQ ID NOs: 3132-3139 and 3492. Non-limiting examples of hematological cancers treated or prevented by administration of cells expressing CARs targeting MPL include acute myeloid leukemia, chronic myeloid leukemia and myelodysplastic syndrome.

[0104] Also provided herein are methods for treating, inhibiting, reducing the severity of, preventing metastasis of and/or reducing the relapse of cancers expressing CD19 (e.g., B cell acute lymphocytic leukemia (B-ALL), chronic lymphocytic leukemia, diffuse large cell lymphoma, indolent lymphoma) in a subject in need thereof comprising administering to the subject a therapeutically effective amount of genetically modified cells, as described herein, wherein the genetically modified cells comprise vectors encoding a conventional CAR II targeting CD19 as described herein.

[0105] Also provided herein are methods for treating, inhibiting, reducing the severity of, preventing metastasis of and/or reducing the relapse of a CD19 expressing cancer in a subject in need thereof comprising administering to the subject a therapeutically effective amount of genetically modified cells, as described herein, wherein the genetically modified cells comprise vectors encoding backbone-1, comprising conventional CAR I targeting CD19 and K13-vFLIP or vectors encoding backbone-32, comprising CAR II targeting CD19 and K13-vFLIP. In exemplary embodiments, conventional CAR II targeting CD19 are described in Table 21 and comprise nucleic acid sequences set forth in SEQ ID NOs: 1470-1480 and comprise polypeptide sequences set forth in SEQ ID NOs: 3215-3225. In exemplary embodiments, conventional CAR I targeting CD19 and coexpressing K13-vFLIP (backbone 1) are described in Table 19 and comprise nucleic acid sequences set forth in SEQ ID NOs: 927-941 and comprise polypeptide sequences set forth in SEQ ID NOs: 2672-2686. In exemplary embodiments, conventional CAR II targeting CD19 and coexpressing K13-vFLIP (backbone 32) are described in Tables 20 and 22 and comprise nucleic acid sequences set forth in SEQ ID NOs: 1197-1211 and 1759 and comprise polypeptide sequences set forth in SEQ ID NOs: 2942-2956 and 3504.

[0106] Also provided herein are methods for treating, inhibiting, reducing the severity of, preventing metastasis of and/or reducing the relapse of GRP-78 expressing cancer in a subject in need thereof comprising administering to the subject a therapeutically effective amount of genetically modified cells, as described herein, wherein the genetically modified cells comprise vectors encoding backbone-1, comprising conventional CAR I and K13-vFLIP or vectors encoding backbone-32, comprising CAR II and K13-vFLIP. In one embodiment, the ASD of the CAR targets GRP-78. In exemplary embodiments, CARs targeting GRP-78 and accessory modules are described in Table 22 and comprise nucleic acid sequence set forth in SEQ ID NOs: 1771 and 1775 and comprise polypeptide sequence set forth in SEQ ID NO: 3516 and 3520.

[0107] In various embodiments, additional antigen targets, CAR constructs and accessory modules for use with the instant invention will be apparent to a person of skill in the art. Exemplary embodiments are set forth in Tables 2-22.

[0108] In some embodiments, the therapeutically effective amount of the genetically modified cells is administered at a dosage of 10⁴ to 10⁹ cells/kg body weight, in some instances 10⁵ to 10⁶ cells/kg body weight, including all integer values within those ranges. T cell compositions may also be administered multiple times at these dosages. The cells can be administered by using infusion techniques that are commonly known in immunotherapy (see, e.g., Rosenberg et al., New Eng. J. of Med. 319:1676, 1988). The cells can be administered by injection into the site of the lesion (e.g., intra-tumoral injection).

[0109] In some embodiments, the therapeutic methods described herein further comprise administering to the subject, sequentially or simultaneously, existing therapies. Examples of existing cancer treatment include, but are not limited to, active surveillance, observation, surgical intervention, chemotherapy, immunotherapy, radiation therapy (such as external beam radiation, stereotactic radiosurgery (gamma knife), and fractionated stereotactic radiotherapy (FSR)), focal therapy, systemic therapy, vaccine therapies, viral therapies, molecular targeted therapies, or combinations thereof.

[0110] In some embodiments, the therapeutic methods described herein further comprise administering to the subject, sequentially or simultaneously, any one or more of a kinase inhibitor, a BTK inhibitor, an mTOR inhibitor, a MNK inhibitor, BRD4 inhibitor or a dual PI3K/mTOR inhibitor, or combinations thereof.

[0111] In one embodiment, the kinase inhibitor is a Src family kinase inhibitor, such as dasatinib.

[0112] In one embodiment, the kinase inhibitor is a CDK4 inhibitor, such as K416 inhibitors, selected from ribociclib, abemaciclib and palbociclib.

[0113] In one embodiment, the kinase inhibitor is an mTOR inhibitor, for example, rapamycin, a rapamycin analog, OSI-027. The mTOR inhibitor can be, for example, an mTORC1 inhibitor and/or an mTORC2 inhibitor.

[0114] In one embodiment, the kinase inhibitor is a MNK inhibitor, for example, 4-amino-5-(4-fluoroanilino)-pyrazolo [3,4-d] pyrimidine. The MNK inhibitor can be, for example, an inhibitor of MNK1a, MNK1b, MNK2a and/or MNK2b. The dual PI3K/mTOR inhibitor can be, e.g., PF-04695102.

[0115] In one embodiment, the inhibitor is a Brd4 inhibitor selected from JQ1, MS417, OTXO15, LV 303511 and Brd4 inhibitor as described in US 20140256706 A1 and any analogs thereof.

[0116] In one embodiment of the methods described herein, the kinase inhibitor is a CDK4 inhibitor, e.g., palbociclib (PD0332991), and the palbociclib is administered at a dose of about 50 mg, 60 mg, 70 mg, 75 mg, 80 mg, 90 mg, 100 mg, 105 mg, 110 mg, 115 mg, 120 mg, 125 mg, 130 mg, 135 mg (e.g., 75 mg, 100 mg or 125 mg) daily for a period of time, e.g., daily for 14-21 days of a 28 day cycle, or daily for 7-12 days of a 21 day cycle. In one embodiment, 1, 2, 3, 4, 5, 6, 7, 8, 9, 10, 11, 12 or more cycles of palbociclib are administered.

[0117] In one embodiment of the methods described herein, the kinase inhibitor is a BTK inhibitor selected from ibrutinib (PCI-32765); GDC-0834; RN-486; CGI-560; CGI-1764; HM-71224; CC-292; ONO-4059; CNX-774; and LFM-A13. In one embodiment, the BTK inhibitor does not reduce or inhibit the kinase activity of interleukin-2-inducible kinase (ITK), and is selected from GDC-0834; RN-486; CGI-560; CGI-1764; HM-71224; CC-292; ONO-4059; CNX-774; and LFM-A13. In one embodiment of the methods or uses described herein, the kinase inhibitor is a BTK inhibitor, e.g., ibrutinib (PCI-32765), and the ibrutinib is administered at a dose of about 250 mg, 300 mg, 350 mg, 400 mg, 420 mg, 440 mg, 460 mg, 480 mg, 500 mg, 520 mg, 540 mg, 560 mg, 580 mg, 600 mg (e.g., 250 mg, 420 mg or 560 mg) daily for a period of time, e.g., daily for 21 day cycle, or daily for 28 day cycle. In one embodiment, 1, 2, 3, 4, 5, 6, 7, 8, 9, 10, 11, 12 or more cycles of ibrutinib are administered.

[0118] In one embodiment of the methods or uses described herein, the kinase inhibitor is a BTK inhibitor that does not inhibit the kinase activity of ITK, e.g., RN-486, and RN-486 is administered at a dose of about 100 mg, 110 mg, 120 mg, 130 mg, 140 mg, 150 mg, 160 mg, 170 mg, 180 mg, 190 mg, 200 mg, 210 mg, 220 mg, 230 mg, 240 mg, 250 mg (e.g., 150 mg, 200 mg or 250 mg) daily for a period of time, e.g., daily a 28 day cycle. In one embodiment, 1, 2, 3, 4, 5, 6, 7, or more cycles of RN-486 are administered.

[0119] In one embodiment of the methods described herein, the kinase inhibitor is an mTOR inhibitor selected from temsirolimus; ridaforolimus (1R,2R,4S)-4-[(2R)-2 [(1R,9S,12S,15R,16E,18R,19R,21R,23 S,24E,26E,28Z,30S,32S,35R)-1,18-di hydroxy-19,30-dimethoxy-15, 17,21,23, 29,35-hexamethyl-2,3,10,14,20-pentaoxo-1 1,36-dioxa-4-azatricyclo[30.3.1.0] hexatriaconta-16,24,26,28-tetraen-12-yl]propyl]-2-methoxycyclohexyl dimethylphosphinate, also known as AP23573 and MK8669; everolimus (RAD001); rapamycin (AY22989); simapimod; (5-{2,4-bis[(35″)-3-methylmorpholin-4-yl]pyrido[2,3-(i]pyrimidin-7-yl}-2-methoxyphenyl)methanol (AZD8055); 2-amino-8-[iran5-4-(2-hydroxyethoxy)cyclohexyl]-6-(6-methoxy-3-pyridinyl)-4-methyl-pyrido[2,3-J|pyrimidin-7(8H)-one (PF04691502); and N²-[1,4-dioxo-4-[[4-(4-oxo-8-phenyl-4H-1-benzopyran-2-yl)morpholinium-4-yl]methoxy]butyl]-L-arginylglycyl-L-a-aspartylL-serine-, inner salt (SF1126); and XL765.

[0120] In one embodiment of the methods or uses described herein, the kinase inhibitor is an mTOR inhibitor, e.g., rapamycin, and the rapamycin is administered at a dose of about 3 mg, 4 mg, 5 mg, 6 mg, 7 mg, 8 mg, 9 mg, 10 mg (e.g., 6 mg) daily for a period of time, e.g., daily for 21 day cycle, or daily for 28 day cycle. In one embodiment, 1, 2, 3, 4, 5, 6, 7, 8, 9, 10, 11, 12 or more cycles of rapamycin are administered. In one embodiment, the kinase inhibitor is an mTOR inhibitor, e.g., everolimus and the everolimus is administered at a dose of about 2 mg, 2.5 mg, 3 mg, 4 mg, 5 mg, 6 mg, 7 mg, 8 mg, 9 mg, 10 mg, 11 mg, 12 mg, 13 mg, 14 mg, 15 mg (e.g., 10 mg) daily for a period of time, e.g., daily for 28 day cycle. In one embodiment, 1, 2, 3, 4, 5, 6, 7, 8, 9, 10, 11, 12 or more cycles of everolimus are administered.

[0121] Also provided herein are methods for preparing genetically engineered cells comprising transfecting the cells with vectors comprising nucleic acid encoding the conventional CARs or the CARs on novel backbones described herein. In some embodiments, the cells are immune effector cells, such as human T cells or human NK cells, or stem cells that give rise to immune effector cells. In some embodiments, the cells are autologous human T cells or autologous human NK cells or autologous human stem cells. In some embodiments, the cells are allogeneic human T cells or allogeneic human NK cells or allogeneic human stem cells.

[0122] In one embodiment, the method for preparing the genetically modified cells comprise obtaining a population of cells and depleting the cells of the CD25+T regulatory cells, for example by using antibodies specific to CD25. Methods for depleting CD25+T regulatory cells from the population of cells will be apparent to a person of skill in the art. In some embodiments, the Treg depleted cells comprise less than 30%, 20%, 10%, 5% or less Treg cells. In some embodiments, the vectors encoding the CARs described herein are transfected into Treg depleted cells.

[0123] In some embodiments, prior to transfection, the Treg depleted cells are further depleted of cells which express checkpoint inhibitors. The checkpoint inhibitor may be any one or more of PD-1, LAG-3, TIM3, B7-H1, CD160, P1H, 2B4, CEACAM (e.g., CEACAM-1, CEACAM-3, and/or CEACAM-5), TIGIT, CTLA-4, BTLA, and LAIR1. In some embodiments, the cells comprise less than comprise less than 30%, 20%, 10%, 5% or less cells that express checkpoint inhibitors. In some embodiments, the vectors encoding the CARs described herein are transfected into Treg depleted and checkpoint inhibitor depleted cells.

[0124] In some embodiments, methods for preparing the genetically modified cells comprise obtaining a population of cells and selecting cells that express any one or more of CD3, CD28, CD4, CD8, CD45RA, and/or CD45RO. In certain embodiments, the population of immune effector cells provided are CD3+ and/or CD28+.

[0125] In one embodiment, the method for preparing the genetically modified cells comprise obtaining a population of cells and enriching for the CD25+T regulatory cells, for example by using antibodies specific to CD25. Methods for enriching CD25+T regulatory cells from the population of cells will be apparent to a person of skill in the art. In some embodiments, the Treg enriched cells comprise less than 30%, 20%, 10%, 5% or less non-Treg cells. In some embodiments, the vectors encoding the CARs described herein are transfected into Treg-enriched cells. Treg enriched cells expressing a CAR may be used to induced tolerance to antigen targeted by the CAR.

[0126] In some embodiments, the method further comprises expanding the population of cells after the vectors comprising nucleic acids encoding the CARs described herein have been transfected into the cells. In embodiments, the population of cells is expanded for a period of 8 days or less. In certain embodiments, the population of cells is expanded in culture for 5 days, and the resulting cells are more potent than the same cells expanded in culture for 9 days under the same culture conditions. In other embodiments, the population of cells is expanded in culture for 5 days show at least a one, two, three or four fold increase in cell doublings upon antigen stimulation as compared to the same cells expanded in culture for 9 days under the same culture conditions. In some embodiments, the population of cells is expanded in an appropriate media that includes one or more interleukins that result in at least a 200-fold, 250-fold, 300-fold, or 350-fold increase in cells over a 14 day expansion period, as measured by flow cytometry.

[0127] In various embodiments, the expanded cells comprise one or more CARs as described herein. In some embodiments, the expanded cells comprise one CAR with one, two, three or more ASDs. In some embodiments, the expanded cells further comprise accessory modules and therapeutic controls as described herein.

[0128] Provided herein is a cell comprising nucleic acids encoding a chimeric antigen receptor (CAR) and one or more of signaling proteins selected from K13-vFLIP, MC159-vFLIP, cFLIP-L, cFLIP-p22, HTLV1-Tax and HTLV2-Tax, wherein the CAR comprises an a) extracellular antigen specific domain, b) a transmembrane domain and c) an intracellular signaling domain comprising an immunoreceptor tyrosine-based activation motif (ITAM); wherein c) is located at the C-terminus of the chimeric receptor. In some embodiments, the CAR further comprises one or more co-stimulatory domains.

[0129] Also provided herein is a cell comprising nucleic acids encoding a chimeric antigen receptor (CAR) and K13-vFLIP signaling protein, wherein the CAR comprises an a) extracellular antigen specific domain, b) a transmembrane domain and c) an intracellular signaling domain comprising an immunoreceptor tyrosine-based activation motif (ITAM); wherein c) is located at the C-terminus of the chimeric receptor. In some embodiments, the CAR further comprises one or more co-stimulatory domains.

[0130] Also provided herein is a cell comprising nucleic acids encoding a chimeric antigen receptor (CAR) and MC159-vFLIP signaling protein, wherein the CAR comprises an a) extracellular antigen specific domain, b) a transmembrane domain and c) an intracellular signaling domain comprising an immunoreceptor tyrosine-based activation motif (ITAM); wherein c) is located at the C-terminus of the chimeric receptor. In some embodiments, the CAR further comprises one or more co-stimulatory domains.

[0131] In some embodiment, the cell described herein further comprises nucleic acids encoding MC159-vFLIP signaling protein.

[0132] In some embodiments, the cell further comprises nucleic acids encoding scFvs targeting IL6 and/or IL6 receptor alpha. In some embodiments, the cell further comprises nucleic acid encoding peptide FX06 so as to mitigate capillary leak associated with CAR therapy. In some embodiments, the signaling protein is expressed in fusion with one or more copies of FKBP domain. In some embodiments, the activity of the signaling protein is controlled post-translationally by dimerization of the FKBP domain in the presence of a dimerizing agent. In some embodiments, the dimerizing agent is AP20187.

[0133] In an exemplary embodiment, wherein the antigen specific domain of the CAR targets MPL. In some embodiments, the antigen specific domain targets two antigens, wherein the two antigens are MPL and CD123.

[0134] In some embodiments, the antigen specific domain of the CAR targets CD19, CD23, Lym1, Lym2, CLEC5A, CDH179b, FLT3, GCC, Muc1, CSF2RA, GFRa4, CD32, IL11Ra, IL13Ra, NYBR1, SLea, CD200R, TGFBetaR2, CD276, TROP2, LAMP1, PTK7, DLL3, CDH1, CDH6, CDH17, CDH19, TSHR and tyrosinase.

[0135] In some embodiments, the antigen specific domain of the CAR targets MPL and comprises one or more scFv fragments selected from 161 (SEQ ID NO: 2500 and 2501), 175 (SEQ ID NO: 2499), 178 (SEQ ID NO: 2503), 111 (SEQ ID NO: 2502), AB317 (SEQ ID NO: 2404), 12E10 (SEQ ID NO: 2505) or huVB22Bw5 (SEQ ID NO: 2506) or ligands selected from extracellular receptor binding domains of hTPO (SEQ ID NO: 2323) or mTPO (SEQ ID NO: 2323).

[0136] In some embodiments, the antigen specific domain of the CAR targets CD19 and comprises one or more scFv fragments selected from CD19Bu12 or CD19MM.

[0137] In one embodiment, the cell is a T-lymphocyte (T-cell). In another embodiment, the cell is a Natural Killer (NK) cell.

[0138] Also provided herein are nucleic acids comprising a first polynucleotide encoding the CAR of claim and a second polynucleotide encoding the K13-vFLIP signaling protein. In some embodiments, the nucleic acids further comprise a third polynucleotide encoding the MC159-vFLIP signaling protein. Also provided herein are polypeptides encoded by the nucleic acids described herein and vectors encoding the nucleic acids described herein.

[0139] Further provided herein is a pharmaceutical composition comprising the cells described herein, the nucleic acids described herein, the polypeptides encoded by the nucleic acids described herein or vectors comprising the nucleic acids described herein, and a pharmaceutically acceptable carrier.

[0140] In some embodiments, provided herein is a method for treating a MPL-expressing cancer comprising administering to the subject, a therapeutically effective amount of the cell described herein, wherein the CAR targets MPL. In some embodiments, the cancer is a blood cancer, wherein the blood cancer is any one or more of acute myeloid leukemia, chronic myeloid leukemia, myelodyplastic syndrome, lymphoma, multiple myeloma and acute lymphocytic leukemia. In some embodiments, the method further comprises administering to the subject a tyrosine kinase inhibitor, wherein the inhibitor inhibits the Src family of kinases. In some embodiments, the inhibitor inhibits Lck. In some embodiments, the inhibitor is any one or more of Dasatinib, Ponatinib or A-770041.

### BRIEF DESCRIPTION OF THE DRAWINGS

[0141] Exemplary embodiments are illustrated in referenced figures. It is intended that the embodiments and figures disclosed herein are to be considered illustrative rather than restrictive.

[0142] FIG. 1 depicts, in accordance with various embodiments of the invention, three generations of CARs. Depiction of first, second, and third generation chimeric antigen receptors with the scFv segments in green and the various TCR signaling components in red, blue and yellow (Casucci, Monica and Attilio Bondanza (2011). Journal of Cancer. 2: 378-382)

[0143] FIG. 2A-FIG. 2D depict, in accordance with various embodiments of the invention, FIG. 2A: MPL gene expression in normal tissues. MPL has very restricted expression in normal tissues; FIG. 2B: MPL gene expression in 542 patient samples of Acute Myeloid Leukemia. MPL is expressed in most AML samples; FIG. 2C: MPL gene expression in 206 samples of Myelodysplastic syndrome (MDS). MPL is expressed in most MDS samples. FIG. 2D: MPL gene expression in 76 samples of CIVIL. MPL is expressed in most CML samples.

[0144] FIG. 3A-FIG. 3B depict, in accordance with various embodiments of the invention, strong binding with 161-GGSG-NLuc-AcV5 was observed on HEL.92.1.7-Gluc-vector cells suggesting significant expression of MPL endogenously.

[0145] FIG. 4A-FIG. 4B depicts in accordance with various embodiments of the invention, NLuc assay to measure expression of CAR in 293FT cells. The untransfected 293FT cells, and those transfected with CAR CD8SP-FMC63-(vL-vH)-Myc-BBz-T2A-PAC(112014-A13)[SEQ ID NO:1467] and CD8SP-MPL-161-(vL-vH)-Myc-BBz-T2A-PAC(021015-R07)[SEQ ID NO:1658] CAR were incubated with FLAG-CD19-ECD-GGSG-NLuc-AcV5[SEQ ID NO: 926] and MPL-ECD-GGSG-NLuc-AcV5[SEQ ID NO: 925]supernatants as described in material and methods section followed by washing with PBS and measurement of NLuc activity by Coeleoentrazine (CTZ; Nanolight) diluted in PBS. Luminescence was quantified using a BioTek plate reader. Data represents mean values of triplicate wells +/−standard deviation (SD).

[0146] FIG. 5 depicts, in accordance with various embodiments of the invention, modest binding of MPL-ECD-GGSG-NLuc-AcV5 to 293FT cells transfected with hTPO-(1-187)-Myc-CD28z-T2A-PAC(031915-U04)[SEQ ID NO:1738] and mTPO-(1-187)-Myc-CD28z-T2A-PAC(031915-V03)[SEQ ID NO:1739] constructs and strong binding to 293FT cells transfected with CD8SP-MPL-161-(vL-vH)-Myc-BBz-T2A-PAC(021015-R07)[SEQ ID NO:1658] construct as compared to untransfected cells or cells that had been transfected with control CAR construct.

[0147] FIG. 6 depicts, in accordance with various embodiments of the invention, expression of MPL CARs on the surface of T cells as determined by increased EGFP fluorescence and increased staining with APC-Myc as compared to the uninfected T cells (UI).

[0148] FIG. 7 depicts in accordance with various embodiments, of the invention, strong binding of T cells expressing CD8SP-MPL-161-(vL-vH)-Myc-BBz-T2A-PAC(021015-R07)[SEQ ID NO:1658], CD8SP-175-(vL-vH)-Myc-CD28z-T2A-PAC(031615-Q04)[SEQ ID NO:1733], and CD8SP-MPL-VB22Bw4-(vL-vH)-Myc-CD28z-T2A-PAC(031615-B06)[SEQ ID NO:3536] CARs and modest binding of T cells expressing CD8SP-161-(vL-vH)-Myc-CD28z-T2A-PAC(021715-Z07)[SEQ ID NO:1731], CD8 SP-AB317-(vL-vH)-Myc-CD28z-T2A-PAC(031615-T04)[SEQ ID NO:1735] and CD8SP-12E10-(vL-vH)-Myc-CD28z-T2A-PAC(031615-503)[SEQ ID NO:1736] to MPL-GGSG-NLuc AcV5 supernatant as measured by NLuc assay. SEQ ID NO. 925 comprises MPL-ECD-GGSG-Nluc-AcV5. SEQ ID NO.: 926 comprises FLAG-CD19-ECD-GGSG-NLuc-AcV5. SEQ ID NO: 1734 comprises CD8SP-178-(vL-vH)-Myc-CD28z-T2A-PAC(031615-R04). SEQ ID NO: 3534 comprises CD8SP-4C3-(vL-vH)-Myc-CD28z-T2A-Pac(031615-W05).

[0149] FIG. 8 depicts, in accordance with various embodiments of the invention, increase in GLuc activity following co-culture with T cells expressing MPL-specific CD8SP-161-(vL-vH)-Myc-CD8TM-BBz-T2A-EGFP(090814-C03)[SEQ ID NO:1732] as compared to the uninfected T cells indicating lysis of target cells by the different MPL-CAR-T cells.

[0150] FIG. 9 depicts, in accordance with various embodiments of the invention, increased killing of HEL-GLuc cells by CD8SP-MPL-161-(vL-vH)-Myc-BBz-T2A-PAC(021015-R07)[SEQ ID NO:1658] CAR expressing PBMC as compared to FMC63-(vL-vH)-Myc-BBz-T2A-PAC(112014-A13)[SEQ ID NO:1467] PBMC or uninfected PBMC.

[0151] FIG. 10 depicts, in accordance with an embodiment of the invention, increased killing of HEL-GLuc cells by CD8SP-175-(vL-vH)-Myc-CD28z-T2A-PAC(031615-Q04)[SEQ ID NO:1733] CAR expressing PBMC as compared to uninfected PBMC.

[0152] FIG. 11 depicts, in accordance with an embodiments of the invention, increase in GLuc activity, indicating lysis of target cells, following co-culture with T cells expressing MPL-specific CARs, which was stronger with CD8SP-161-(vL-vH)-Myc-CD28z-T2A-PAC(021715-Z07)[SEQ ID NO:1731], CD8SP-175-(vL-vH)-Myc-CD28z-T2A-PAC(031615-Q04)[SEQ ID NO:1733], and CD8SP-AB317-(vL-vH)-Myc-CD28z-T2A-PAC(031615-T04)[SEQ ID NO:1735] constructs and modest with CD8SP-178-(vL-vH)-Myc-CD28z-T2A-PAC(031615-R04)[SEQ ID NO:1734] construct as compared to the uninfected T cells.

[0153] FIG. 12 depicts, in accordance with various embodiments of the invention, increase in GLuc activity, indicating lysis of target cells, following co-culture with T cells expressing MPL-specific CARs, which was stronger with CD8SP-161-(vL-vH)-Myc-CD28z-T2A-PAC(021715-Z07)[SEQ ID NO:1731], CD8SP-175-(vL-vH)-Myc-CD28z-T2A-PAC(031615-Q04)[SEQ ID NO:1733], CD8SP-AB317-(vL-vH)-Myc-CD28z-T2A-PAC(031615-T04)[SEQ ID NO:1735], and CD8SP-12E10-(vL-vH)-Myc-CD28z-T2A-PAC(031615-503)[SEQ ID NO:1736] constructs and modest with CD8SP-178-(vL-vH)-Myc-CD28z-T2A-PAC(031615-R04)[SEQ ID NO:1734] and CD8SP-VB22Bw4-(vL-vH)-Myc-CD28z-T2A-PAC(031615-B06)[SEQ ID NO:3536] constructs as compared to the uninfected T cells.

[0154] FIG. 13 depicts, in accordance with an embodiment of the invention, increase in GLuc activity, indicating lysis of target cells, following co-culture with NK92MI cells expressing MPL-specific CD8SP-161-(vL-vH)-Myc-CD8TM-BBz-T2A-EGFP(090814-C03)[SEQ ID NO:1732] CAR.

[0155] FIG. 14 depicts, in accordance with an embodiment of the invention, increase in GLuc activity, indicating lysis of target cells, following co-culture with NK92MI cells expressing MPL-specific CARs.

[0156] FIG. 15 depicts, in accordance with an embodiment of the invention, increased secretion of TNFα upon coculture of T cells expressing CAR targeting MPL with HEL cells as compared to uninfected T cells used as controls.

[0157] FIG. 16 depicts, in accordance with an embodiment of the invention, that the median survival of mice given CD8SP-161-(vL-vH)-Myc-CD8TM-BBz-T2A-EGFP(090814-C03)[SEQ ID NO:1732] expressing NK92MI cells was 31.5 days, which was significantly higher than mice given unmodified NK92MI cells (28.5 days; p=0.03) or those given NK92MI cells expressing a control CD8SP-4C3-(vL-vH)-Myc-BBz-T2A-EGFP(100814-K06)[SEQ ID NO:3537] CAR (28 days; p=0.04).

[0158] FIG. 17 depicts, in accordance with an embodiment of the invention, increased expression of the different CD19 CARs (shown with grey lines) on the surface of T cells as determined by staining with APC-Myc as compared to the uninfected T cells (UI; shown with dotted lines). Constructs depicted include CD8SP-FMC63-(vL-vH)-Myc-BBz-T2A-PAC(112014-A13)[SEQ ID NO:1467]; CD8 SP-CD19Bu12-(vL-vH)-Myc-BBz-T2A-PAC(082815-P08)[SEQ ID NO:1470]; CD8SP-2-CD19MM-(vL-vH)-Myc-BBz-T2A-PAC(062915-D03)[SEQ ID NO:1471]; CD8SP-KSHV-4C3-(vL-vH)-Myc-BBz-T2A-PAC(042315-N01)[SEQ ID NO:1643].

[0159] FIG. 18 depicts, in accordance with various embodiments of the invention, strong binding of Jurkats expressing CD8SP-CD19Bu12-(vL-vH)-Myc-BBz-T2A-PAC(082815-P08)[SEQ ID NO:1470], CD8SP-2-CD19MM-(vL-vH)-Myc-BBz-T2A-PAC(062915-D03)[SEQ ID NO:1471] and CD8SP-FMC63-(vL-vH)-Myc-BBz-T2A-PAC(112014-A13)[SEQ ID NO:1467] CAR constructs to FLAG-CD19-ECD-GGSG-NLuc-AcV5 [SEQ ID NO:2671] supernatant, while no significant binding was observed on parental cells or those expressing the CD8SP-KSHV-4C3-(vL-vH)-Myc-BBz-T2A-PAC(042315-N01)[SEQ ID NO:1643] control CAR.

[0160] FIG. 19 depicts, in accordance with various embodiments of the invention, strong binding of T cells expressing CD8SP-CD19Bu12-(vL-vH)-Myc-BBz-T2A-PAC(082815-P08)[SEQ ID NO:1470], CD8SP-2-CD19MM-(vL-vH)-Myc-BBz-T2A-PAC(062915-D03)[SEQ ID NO:1471] and CD8SP-FMC63-(vL-vH)-Myc-BBz-T2A-PAC(112014-A13)[SEQ ID NO:1467] CAR constructs to FLAG-CD19-ECD-GGSG-NLuc-AcV5 [SEQ ID NO:2671] supernatant, while no significant binding was observed on parental cells or those expressing CD8SP-KSHV-4C3-(vL-vH)-Myc-BBz-T2A-PAC(042315-N01)[SEQ ID NO:1643] control CAR.

[0161] FIG. 20 depicts, in accordance with various embodiments of the invention, increase in GLuc activity, indicating lysis of RAJI target cells, following co-culture with T cells expressing CD19-specific CARs as compared to uninfected T cells (T-UI) or those expressing the control CAR 4C3. Constructs depicted include CD8SP-FMC63-(vL-vH)-Myc-BBz-T2A-PAC(112014-A13)[SEQ ID NO:1467]; CD8SP-2-CD19MM-(vL-vH)-Myc-BBz-T2A-PAC(062915-D03)[SEQ ID NO:1471]; CD8SP-CD19Bu12-(vL-vH)-Myc-BBz-T2A-PAC(082815-P08)[SEQ ID NO:1470]; CD8SP-KSHV-4C3-(vL-vH)-Myc-BBz-T2A-PAC(042315-N01)[SEQ ID NO:1643]; (−) indicates CAR-transduced T cells were used without puromycin selection; (+) indicates CAR-transduced T cells were used with puromycin selection.

[0162] FIG. 21 depicts, in accordance with various embodiments of the invention, increase in GLuc activity, indicating lysis of RAJI target cells, following co-culture with T cells expressing CD19-specific CARs as compared to uninfected T cells (T-UI) or those expressing the control CAR 4C3. Constructs depicted include CD8SP-FMC63-(vL-vH)-Myc-BBz-T2A-PAC(112014-A13)[SEQ ID NO:1467]; CD8SP-2-CD19MM-(vL-vH)-Myc-BBz-T2A-PAC(062915-D03)[SEQ ID NO:1471]; CD8SP-KSHV-4C3-(vL-vH)-Myc-BBz-T2A-PAC(042315-N01)[SEQ ID NO:1643]; (−) indicates CAR-transduced T cells were used without puromycin selection; (+) indicates CAR-transduced T cells were used with puromycin selection.

[0163] FIG. 22 depicts, in accordance with various embodiments of the invention, the survival of mice in specific groups.

[0164] FIG. 23 depicts, in accordance with various embodiments of the invention, increased staining with FITC-FLAG antibody in K13-expressing T cells as compared to uninfected T cells. K13 immortalized T cells are CD8+/CD4− (49%), CD8−/CD4+(21%) and CD8+/CD4+(29%).

[0165] FIG. 24 depicts, in accordance with various embodiments of the invention, that CD8SP-FMC63-(vL-vH)-Myc-BBz-T2A-PAC(112014-A13)[SEQ ID NO:1467], and CD8SP-FMC63-(vL-vH)-Myc-BBz-P2A-K13-Flag-T2A-PAC(111014-Y11)[SEQ ID NO:1197] expressing T-cells that have been selected with puromycin induce specific lysis of RS411 cells as measured by Gluc assay.

[0166] FIG. 25 depicts, in accordance with various embodiments of the invention, increase in GLuc activity, indicating lysis of target cells, following co-culture with T cells expressing CD19-specific CARs as compared to uninfected T cells (T-UI) or those expressing the control CAR 4C3.

[0167] FIG. 26 depicts, in accordance with various embodiments of the invention, confirms that incorporation of K13, MC159 or HTLV2-Tax (Tax2) does not negatively impact the killing ability of CARs with or without the presence of 41BB costimulatory domain.

[0168] FIG. 27 depicts, in accordance with various embodiments of the invention, that the T cells expressing CAR constructs that co-expressed MC159 and HTLV2-Tax continue to exert cytotoxicity after 2 months in culture while the T cells expressing the constructs lacking MC159 and HTLV2-Tax lost this ability.

[0169] FIG. 28A-FIG. 28B depict, in accordance with various embodiments of the invention, treatment with AP20187 led to increase in K13- and HTLV2-Tax RS mutant-induced NF-κB-Luc activity in all constructs in which K13 and HTLV2-Tax mutant were expressed in fusion with FKBP. Constructs depicted in FIG. 28A include FKBPX2-K13[SEQ ID NO: 879]; CD8SP-FMC63(vL-vH)-Myc-z-P2A-FKBP-K13-FLAG-T2A-EGFP(112614-B06)[SEQ ID NO:1755]; CD8SP-161-(vL-vH)-Myc-BBz-P2A-FKBP-K13-Flag-T2A-EGFP(112614-E05)[SEQ ID NO:1744]; CD8SP-FMC63(vL-vH)-Myc-z-P2A-FKBPx2-K13-FLAG-T2A-EGFP(120314-J03)[SEQ ID NO:1756]; and CD8SP-FMC63(vL-vH)-Myc-z-P2A-Myr-FKBPx2-K13-FLAG-T2A-EGFP(120314-N07)[SEQ ID NO:1757]. Constructs depicted in FIG. 28B include CD8SP-FMC63(vL-vH)-Myc-BBz-P2A-FKBPx2-FLAG-TAX2U2RS-T2A-eGFP-M03(012315-03)[SEQ ID NO:3539]; and CD8SP-FMC63(vL-vH)-Myc-BBz-P2A-FKBPx2-HTLV2-Tax-RS-T2A-EGFP(012315-001)[SEQ ID NO:1758].

[0170] FIG. 29A-FIG. 29B depict, in accordance with various embodiments of the invention, activation of K13-mediated NF-κB activity by addition of AP20187 does not adversely affect cell killing induced by the CAR constructs that coexpress FKBP-K13. Construct depicted in FIG. 29A include CD8SP-FMC63(vL-vH)-Myc-z-P2A-FKBP-K13-FLAG-T2A-PAC(112316-S06)[SEQ ID NO:1770]. Construct depicted in FIG. 29B include CD8 SP-161-(vL-vH)-Myc-z-P2A-FKBP-K13-FLAG-T2A-PAC(112916-U06)[SEQ ID NO: 1741].

[0171] FIG. 30A-FIG. 30B depict, in accordance with various embodiments of the invention, induction of target cell death by different MPL-directed and CD32-directed CAR constructs that coexpress K13, MC159, HTLV2-Tax or HTLV2-Tax RS mutant.

[0172] FIG. 31 depicts, in accordance with various embodiments of the invention, induction of PC3-target cell death by a TROP2-directed conventional CAR I construct that coexpresses K13.

[0173] FIG. 32A-FIG. 32B depict, in accordance with various embodiments of the invention, induction of target cell death by different LAMP1-directed CAR constructs that coexpress K13,

[0174] FIG. 33 depicts, in accordance with various embodiments of the invention, that activation of K13 signaling in T cells expressing the FKBP-K13 fusion protein by addition of AP20187 compound does not adversely affect activation of CAR-induced NFAT signaling.

[0175] FIG. 34 depicts, in accordance with various embodiments of the invention, NF-κB reporter activity by wild-type K13 and various K13 mutants.

[0176] FIG. 35 depict, in accordance with various embodiments of the invention, shows inhibition of CAR CD8SP-2-CD19MM-(vL-vH)-Myc-BBz-T2A-PAC(062915-D03)[SEQ ID NO:1471]-induced cell death by 50 nM and 100 nM Dasatinib, while Imatinib has no effect.

[0177] FIG. 36 depict, in accordance with various embodiments of the invention, increase in GLuc activity following co-culture with T cells expressing CD19-specific CARs CD8SP-FMC63-(vL-vH)-Myc-BBz-T2A-PAC(112014-A13)[SEQ ID NO:1467] and CD8SP-2-CD19MM-(vL-vH)-Myc-BBz-T2A-PAC(062915-D03)[SEQ ID NO:1471] as compared to the uninfected T cells (T-UI) indicating lysis of target cells by the different CD19-CAR-T cells and its inhibition by Dasatinib and Ponatinib at the indicated doses.

[0178] FIG. 37 depict, in accordance with various embodiments of the invention, that Dasatinib effectively blocks killing of RAJI-GLuc cells by T cells expressing the CD8SP-CD22-m971-(vL-vH)-Myc-BBz-T2A-PAC(091515-A02)[SEQ ID NO:1519] CAR as determined by GLuc assay.

[0179] FIG. 38A-FIG. 38B depict, in accordance with various embodiments of the invention, that FIG. 38A: Dasatinib blocks NK92 cells mediated death of K562 cells as determined by Gluc assay and FIG. 38B: Dasatinib blocks death of RAJI-GLuc cells by CD8SP-FMC63-(vL-vH)-Myc-BBz-T2A-EGFP(070814-D06)[SEQ ID NO:3535] expressing NK92MI cells as determined by Gluc assay.

[0180] FIG. 39A-FIG. 39B depict, in accordance with various embodiments of the invention, that FIG. 39A: treatment with Blinatumomab in the presence of T cells result in strong induction of death of RAJI-GLuc cells which is effectively blocked by 100 nM Dasatinib and FIG. 39B: that co-culture of RAJI-GLuc cells with Blinatumomab in the presence of T cells result in strong induction of IFNγ production which is effectively blocked by 100 nM Dasatinib.

[0181] FIG. 40A-FIG. 40C depict, in accordance with various embodiments of the invention, FIG. 40A shows no significant toxic effect of the various drugs on RAJI-pLenti-Gluc cells that had not been co-cultured with CAR T cells. FIG. 40B shows mild to modest inhibition of CD8SP-CD19Bu12-(vL-vH)-Myc-BBz-T2A-PAC(082815-P08)[SEQ ID NO:1470] CAR-T cells-induced death of RAJI-pLenti-GLuc cells by Ruxolitinib, Fosatamatinib and Alisertib as compared to cells treated with media (Med) alone (FIG. 40A). Dasatinib was used as a positive control. FIG. 40C shows that the above compounds have only a minimal effect on Blinatumomab induced cell death mediated by T cells at the indicated concentrations.

[0182] FIG. 41A-FIG. 41C depict, in accordance with various embodiments of the invention, FIG. 41A shows the release of Gluc in cells treated with the indicated drugs in the presence of media alone without any CAR-T cells. FIG. 41B shows near complete inhibition of CD8SP-CD19Bu12-(vL-vH)-Myc-BBz-T2A-PAC(082815-P08)[SEQ ID NO:1470] CAR-T cells-induced death of RAJI-pLenti-GLuc cells by A-770041 at 100 nM and 200 nM while Saracatinib had no significant effect. Avasimibe had no significant effect on CAR-T cells induced cell death at 100 nM but completely blocked it at 1 μM. FIG. 41C shows that treatment with 100 nM A770041 partially blocked cell death induced by combination of Blinatumomab with T cells while treatment with 200 nM A770041 led to complete inhibition.

[0183] FIG. 42A-FIG. 42B depict, in accordance with various embodiments of the invention, that coculturing of Jurkat cells expressing CD8SP-FMC63(vL-vH)-BBz-P2A-IgHSP-IL6R-M83(vL-vH)-Flag-T2A-PAC(011315-K04)[SEQ ID NO:1763] with RAJI cells led to increase in EGFP expression as compared to cells that had not been exposed to RAJI cells (FIG. 42A). This indicates activation of NFAT signaling. No increase in EGFP expression was observed in parental Jurkats (J-N-G-P) without or with culturing with RAJI (FIG. 42B).

### DETAILED DESCRIPTION

[0184] All references cited herein are incorporated by reference in their entirety as though fully set forth. Unless defined otherwise, technical and scientific terms used herein have the same meaning as commonly understood by one of ordinary skill in the art to which this invention belongs. Allen et al., Remington: The Science and Practice of Pharmacy 22^{nd} ed., Pharmaceutical Press (Sep. 15, 2012); Hornyak et al., Introduction to Nanoscience and Nanotechnology, CRC Press (2008); Singleton and Sainsbury, Dictionary of Microbiology and Molecular Biology 3^{rd} ed., revised ed., J. Wiley & Sons (New York, N.Y. 2006); Smith, March's Advanced Organic Chemistry Reactions, Mechanisms and Structure 7^{th} ed., J. Wiley & Sons (New York, N.Y. 2013); Singleton, Dictionary of DNA and Genome Technology 3^{rd} ed., Wiley-Blackwell (Nov. 28, 2012); and Green and Sambrook, Molecular Cloning: A Laboratory Manual 4th ed., Cold Spring Harbor Laboratory Press (Cold Spring Harbor, N.Y. 2012), provide one skilled in the art with a general guide to many of the terms used in the present application. For references on how to prepare antibodies, see Greenfield, Antibodies A Laboratory Manual 2^{nd} ed., Cold Spring Harbor Press (Cold Spring Harbor N.Y., 2013); Köhler and Milstein, Derivation of specific antibody-producing tissue culture and tumor lines by cell fusion, Eur. J. Immunol. 1976 July, 6(7):511-9; Queen and Selick, Humanized immunoglobulins, U.S. Pat. No. 5,585,089 (1996 December); and Riechmann et al., Reshaping human antibodies for therapy, Nature 1988 Mar. 24, 332(6162):323-7.

[0185] One skilled in the art will recognize many methods and materials similar or equivalent to those described herein, which could be used in the practice of the present invention. Other features and advantages of the invention will become apparent from the following detailed description, taken in conjunction with the accompanying drawings, which illustrate, by way of example, various features of embodiments of the invention. Indeed, the present invention is in no way limited to the methods and materials described. For convenience, certain terms employed herein, in the specification, examples and appended claims are collected here.

[0186] Unless stated otherwise, or implicit from context, the following terms and phrases include the meanings provided below. Unless explicitly stated otherwise, or apparent from context, the terms and phrases below do not exclude the meaning that the term or phrase has acquired in the art to which it pertains. The definitions are provided to aid in describing particular embodiments, and are not intended to limit the claimed invention, because the scope of the invention is limited only by the claims. Unless otherwise defined, all technical and scientific terms used herein have the same meaning as commonly understood by one of ordinary skill in the art to which this invention belongs.

[0187] Chimeric antigen receptors (CAR) are artificial T cell receptors that are under investigation as a therapy for cancer, using a technique called adoptive cell transfer. Hematopoietic cells are removed from a patient and modified so that they express receptors that recognize proteins that are specific to the particular form of cancer. The cells, which can then recognize and kill the cancer cells, are reintroduced into the patient. CAR targeting the human CD19 antigen have shown impressive activity against B cell lineage human blood cancers, such as Acute Lymphocytic Leukemia, chronic lymphocytic leukemia and lymphoma and are under commercial development by several companies. However, there is a need to develop CAR targeting antigens that are expressed on non-lymphoid cells. This invention pertains to CARs targeting several such antigens.

### Definitions

[0188] As used herein the term “comprising” or “comprises” is used in reference to compositions, methods, and respective component(s) thereof, that are useful to an embodiment, yet open to the inclusion of unspecified elements, whether useful or not. It will be understood by those within the art that, in general, terms used herein are generally intended as “open” terms (e.g., the term “including” should be interpreted as “including but not limited to,” the term “having” should be interpreted as “having at least,” the term “includes” should be interpreted as “includes but is not limited to,” etc.).

[0189] Unless stated otherwise, the terms “a” and “an” and “the” and similar references used in the context of describing a particular embodiment of the application (especially in the context of claims) can be construed to cover both the singular and the plural. The recitation of ranges of values herein is merely intended to serve as a shorthand method of referring individually to each separate value falling within the range. Unless otherwise indicated herein, each individual value is incorporated into the specification as if it were individually recited herein. All methods described herein can be performed in any suitable order unless otherwise indicated herein or otherwise clearly contradicted by context. The use of any and all examples, or exemplary language (for example, “such as”) provided with respect to certain embodiments herein is intended merely to better illuminate the application and does not pose a limitation on the scope of the application otherwise claimed. The abbreviation, “e.g.” is derived from the Latin exempli gratia, and is used herein to indicate a non-limiting example. Thus, the abbreviation “e.g.” is synonymous with the term “for example.” No language in the specification should be construed as indicating any non-claimed element essential to the practice of the application.

[0190] As used herein, the term “about” refers to a measurable value such as an amount, a time duration, and the like, and encompasses variations of ±20%, ±10%, ±5%, ±1%, ±0.5% or ±0.1% from the specified value.

[0191] “Chimeric antigen receptor” or “CAR” or “CARs” as used herein refers to engineered receptors, which graft an antigen specificity onto cells (for example T cells such as naïve T cells, central memory T cells, effector memory T cells or combination thereof). CARs are also known as artificial T-cell receptors, chimeric T-cell receptors or chimeric immunoreceptors. In various embodiments, CARs are recombinant polypeptides comprising an antigen-specific domain (ASD), a hinge region (HR), a transmembrane domain (TMD), co-stimulatory domain (CSD) and an intracellular signaling domain (ISD).

[0192] “Antigen-specific domain” (ASD) refers to the portion of the CAR that specifically binds the antigen on the target cell. In some embodiments, the ASD of the CARs comprising any of the backbones described herein comprises an antibody or a functional equivalent thereof or a fragment thereof or a derivative thereof. The targeting regions may comprise full length heavy chain, Fab fragments, single chain Fv (scFv) fragments, divalent single chain antibodies or diabodies, each of which are specific to the target antigen. There are, however, numerous alternatives, such as linked cytokines (which leads to recognition of cells bearing the cytokine receptor), affibodies, ligand binding domains from naturally occurring receptors, soluble protein/peptide ligand for a receptor (for example on a tumor cell), peptides, and vaccines to prompt an immune response, which may each be used in various embodiments of the invention. In some embodiments, almost any molecule that binds a given antigen with high affinity can be used as an ASD, as will be appreciated by those of skill in the art. In some embodiments, the ASD comprises T cell receptors (TCRs) or portions thereof. In exemplary embodiments, nucleic acids encoding ASDs comprising scFVs are set forth herein in SEQ ID NOs: 564-798.

[0193] “Hinge region” (HR) as used herein refers to the hydrophilic region which is between the ASD and the TMD. The hinge regions include but are not limited to Fc fragments of antibodies or fragments or derivatives thereof, hinge regions of antibodies or fragments or derivatives thereof, CH2 regions of antibodies, CH3 regions of antibodies, artificial spacer sequences or combinations thereof. Examples of hinge regions include but are not limited to CD8a hinge, and artificial spacers made of polypeptides which may be as small as, for example, Gly3 or CH1 and CH3 domains of IgGs (such as human IgG4). In some embodiments, the hinge region is any one or more of (i) a hinge, CH2 and CH3 regions of IgG4, (ii) a hinge region of IgG4, (iii) a hinge and CH2 of IgG4, (iv) a hinge region of CD8a, (v) a hinge, CH2 and CH3 regions of IgG1, (vi) a hinge region of IgG1 or (vi) a hinge and CH2 region of IgG1. Other hinge regions will be apparent to those of skill in the art and may be used in connection with alternate embodiments of the invention.

[0194] “Transmembrane domain” (TMD) as used herein refers to the region of the CAR which crosses the plasma membrane. The transmembrane domain of the CAR of the invention is the transmembrane region of a transmembrane protein (for example Type I transmembrane proteins), an artificial hydrophobic sequence or a combination thereof. Other transmembrane domains will be apparent to those of skill in the art and may be used in connection with alternate embodiments of the invention. In some embodiments, the TMD encoded CAR comprising any of the backbones described herein comprises a transmembrane domain selected from the transmembrane domain of an alpha, beta or zeta chain of a T-cell receptor, CD28, CD3 epsilon, CD45, CD4, CD5, CD8, CD9, CD16, CD22, CD33, CD37, CD64, CD80, CD86, CD134, CD137, CD154, KIRDS2, OX40, CD2, CD27, LFA-1 (CD1 1a, CD18), ICOS (CD278), 4-1BB (CD137), GITR, CD40, BAFFR, HVEM (LIGHTR), SLAMF7, NKp80 (KLRF1), CD160, CD19, IL2R beta, IL2R gamma, IL7R a, ITGA1, VLA1, CD49a, ITGA4, IA4, CD49D, ITGA6, VLA-6, CD49f, ITGAD, CD1 1d, ITGAE, CD103, ITGAL, CD1 1a, LFA-1, ITGAM, CD1 1b, ITGAX, CD1 1c, ITGB1, CD29, ITGB2, CD18, LFA-1, ITGB7, TNFR2, DNAM1(CD226), SLAMF4 (CD244, 2B4), CD84, CD96 (Tactile), CEACAM1, CRT AM, Ly9 (CD229), CD160 (BY55), PSGL1, CD100 (SEMA4D), SLAMF6 (NTB-A, Ly108), SLAM (SLAMF1, CD150, IPO-3), BLAME (SLAMF8), SELPLG (CD162), LTBR, PAG/Cbp, NKp44, NKp30, NKp46, NKG2D, and/or NKG2C.

[0195] “Co-stimulatory domain” (CSD) as used herein refers to the portion of the CAR comprising any of the backbones described herein which enhances the proliferation, survival and/or development of memory cells. The CARs of the invention may comprise one or more co-stimulatory domains. Each co-stimulatory domain comprises the costimulatory domain of any one or more of, for example, members of the TNFR superfamily, CD28, CD137 (4-1BB), CD134 (OX40), Dap10, CD27, CD2, CD5, ICAM-1, LFA-1(CD11a/CD18), Lck, TNFR-I, TNFR-II, Fas, CD30, CD40 or combinations thereof. Other co-stimulatory domains (e.g., from other proteins) will be apparent to those of skill in the art and may be used in connection with alternate embodiments of the invention.

[0196] “Intracellular signaling domain” (ISD) or “cytoplasmic domain” as used herein refers to the portion of the CAR comprising any of the backbones described herein which transduces the effector function signal and directs the cell to perform its specialized function. Examples of domains that transduce the effector function signal include but are not limited to the z chain of the T-cell receptor complex or any of its homologs (e.g., h chain, FceRlg and b chains, MB1 (Iga) chain, B29 (Igb) chain, etc.), human CD3 zeta chain, CD3 polypeptides (D, d and e), syk family tyrosine kinases (Syk, ZAP 70, etc.), src family tyrosine kinases (Lck, Fyn, Lyn, etc.) and other molecules involved in T-cell transduction, such as CD2, CD5 and CD28. Other intracellular signaling domains will be apparent to those of skill in the art and may be used in connection with alternate embodiments of the invention.

[0197] “Linker” (L) or “linker domain” or “linker region” as used herein refer to an oligo- or polypeptide region from about 1 to 100 amino acids in length, which links together any of the domains/regions of the CAR of the invention. Linkers may be composed of flexible residues like glycine and serine so that the adjacent protein domains are free to move relative to one another. Longer linkers may be used when it is desirable to ensure that two adjacent domains do not sterically interfere with one another. Linkers may be cleavable or non-cleavable. Examples of cleavable linkers include 2A linkers (for example T2A), 2A-like linkers or functional equivalents thereof and combinations thereof. In some embodiments, the linkers include the picornaviral 2A-like linker, CHYSEL sequences of porcine teschovirus (P2A), Thosea asigna virus (T2A) or combinations, variants and functional equivalents thereof. In other embodiments, the linker sequences may comprise Asp-Val/Ile-Glu-X-Asn-Pro-Gly^{(2A)}-Pro^{(2B)} motif, which results in cleavage between the 2A glycine and the 2B proline. The nucleic sequences of several exemplary cleavable linkers are provided in SEQ ID NO: 831 to SEQ ID NO: 836 and amino acid sequences of several exemplary linkers are provide in SEQ ID NO: 2598 to SEQ ID NO: 2602. Other linkers will be apparent to those of skill in the art and may be used in connection with alternate embodiments of the invention. In an embodiment, a Ser-Gly-Ser-Gly (SGSG) motif (SEQ ID NOs: 837-838 and SEQ ID NO: 2603) is also added upstream of the cleavable linker sequences to enhance the efficiency of cleavage. A potential drawback of the cleavable linkers is the possibility that the small 2A tag left at the end of the N-terminal protein may affect protein function or contribute to the antigenicity of the proteins. To overcome this limitation, in some embodiments, a furine cleavage site (RAKR) (SEQ ID NO: 839-841 and SEQ ID NO: 2604) is added upstream of the SGSG motifs to facilitate cleavage of the residual 2A peptide following translation.

[0198] “Effector function” refers to the specialized function of a differentiated cell. Effector function of a T-cell, for example, may be cytolytic activity or helper activity including the secretion of cytokines.

[0199] “Enhancer”, as used herein, denotes sequence elements that augment, improve or ameliorate transcription of a nucleic acid sequence irrespective of its location and orientation in relation to the nucleic acid sequence to be expressed. An enhancer may enhance transcription from a single promoter or simultaneously from more than one promoter. As long as this functionality of improving transcription is retained or substantially retained (e.g., at least 70%, at least 80%, at least 90% or at least 95% of wild-type activity, that is, activity of a full-length sequence), any truncated, mutated or otherwise modified variants of a wild-type enhancer sequence are also within the above definition.

[0200] “Accessory module” or “accessory modules” as used herein refers to an element that is co-expressed with a CAR to increase, decrease, regulate or modify the expression or activity of a CAR or CAR-expressing cells. In exemplary embodiments, accessory modules include but are not limited to examples described in Table 16. In one embodiment, the accessory module comprises K13-vFLIP (Table 16). In another embodiment, the accessory module comprises MC159-vFLIP (Table 16). In a further embodiment, the accessory module comprises an FKBP((FK506 binding protein)-fusion protein, such as FKBP-K13, in which whose activity can be controlled by the administration of a dimerizer molecule (Table 16).

[0201] “Switch domain,” or a “dimerization domain” as used herein, typically refers to a polypeptide-based entity, that, in the presence of a dimerization molecule, associates with another switch domain. The association results in a functional coupling of a first entity linked to, e.g., fused to, a first switch domain, and a second entity linked to, e.g., fused to, a second switch domain. A first and second switch domain are collectively referred to as a dimerization switch. In embodiments, the first and second switch domains are the same as one another, e.g., they are polypeptides having the same primary amino acid sequence, and are referred to collectively as a homodimerization switch. In embodiments, the switch is intracellular. In embodiments, the switch domain is a polypeptide-based entity, e.g., FKBP (FK506 binding protein), and the dimerization molecule is small molecule, e.g., AP20187.

[0202] “Dimerization molecule,” as that term is used herein refers to a molecule that promotes the association of a first switch domain with a second switch domain. In embodiments, the dimerization molecule does not naturally occur in the subject, or does not occur in concentrations that would result in significant dimerization. In embodiments, the dimerization molecule is a small molecule, e.g., rapamycin or a rapalogue, e.g, RAD001 or AP20187.

[0203] “Therapeutic Controls” as used herein refers to an element used for controlling the activity of a CAR expressing cell. In some embodiments, therapeutic controls for controlling the activity of the CAR expressing cells of the invention comprise any one or more of truncated epidermal growth factor receptor (tEGFR), truncated epidermal growth factor receptor viii (tEGFRviii), truncated CD30 (tCD30), truncated BCMA (tBCMA), truncated CD19 (tCD19), thymidine kinase, cytosine deaminase, nitroreductase, xanthine-guanine phosphoribosyl transferase, human caspase 8, human caspase 9, inducible caspase 9, purine nucleoside phosphorylase, linamarase/linamarin/glucose oxidase, deoxyribonucleoside kinase, horseradish peroxidase (HRP)/indole-3-acetic (IAA), Gamma-glutamylcysteine synthetase, CD20/alphaCD20, CD34/thymidine kinase chimera, dox-depedent caspase-2, mutant thymidine kinase (HSV-TKSR39), AP1903/Fas system, a chimeric cytokine receptor (CCR), a selection marker, and combinations thereof. The nucleic acid sequences of several therapeutic controls are provided in SEQ ID NO: 850 to SEQ ID NO: 856 and SEQ ID NO: 883 (Table 16).

[0204] “Disease targeted by genetically modified cells” as used herein encompasses the targeting of any cell involved in any manner in any disease by the genetically modified cells of the invention, irrespective of whether the genetically modified cells target diseased cells or healthy cells to effectuate a therapeutically beneficial result. The genetically modified cells include but are not limited to genetically modified T-cells, NK cells, hematopoietic stem cells, pluripotent embryonic stem cells or embryonic stem cells. The genetically modified cells express the conventional CARs and novel backbones containing conventional CARs with accessory modules of the invention, which CARs may target any of the antigens expressed on the surface of target cells. Examples of antigens which may be targeted include but are not limited to antigens expressed on B-cells; antigens expressed on carcinomas, sarcomas, lymphomas, leukemia, germ cell tumors, and blastomas; antigens expressed on various immune cells; and antigens expressed on cells associated with various hematologic diseases, autoimmune diseases, and/or inflammatory diseases. Other antigens that may be targeted will be apparent to those of skill in the art and may be targeted by the CARs of the invention in connection with alternate embodiments thereof.

[0205] “Co-express” as used herein refers to simultaneous expression of two or more genes. Genes may be nucleic acids encoding, for example, a single protein or a chimeric protein as a single polypeptide chain. In one embodiment, simultaneous expression includes a single vector encoding a CAR and proteins that modulate an immune response. In another embodiment, simultaneous expression includes a first vector that encodes the CAR and a second vector that encodes one or more proteins that modulate an immune response.

[0206] “Autologous” cells as used herein refers to cells derived from the same individual as to whom the cells are later to be re-administered into.

[0207] “Genetically modified cells”, “redirected cells”, “genetically engineered cells” or “modified cells” as used herein refer to cells that express the CAR of the invention. In some embodiments, the genetically modified cells comprise vectors that encode a CAR. In some embodiments, the genetically modified cells comprise vectors that encode a CAR and one or more accessory molecules in the same vector. In some embodiments, the genetically modified cells comprise a first vector that encodes a CAR and a second vector that encodes the accessory molecule. In some embodiments, the genetically modified cells comprise a first vector that encodes a CAR and a second vector that encodes more than one accessory molecule. In some embodiments, the genetically modified cells comprise a first vector that encodes a CAR and a second vector that encodes the first accessory molecule and a third vector that encodes a second accessory molecule.

[0208] As used herein, the term “backbone” refers to the specific combination of conventional CARs (Table 1) and accessory modules as described in Table 2. In exemplary embodiments, specific combinations of CARs and accessory modules which comprise various backbones are described in Table 2. In one embodiment, the CAR and the accessory module are encoded by a single nucleic acid molecule. In another embodiment, the CAR is encoded by the first nucleic acid molecule and the accessory module is encoded by a second nucleic acid molecule. In some embodiments, the accessory module is encoded by more than one nucleic acid molecule, depending on the number of components in the accessory modules.

[0209] “Immune cell” as used herein refers to the cells of the mammalian immune system including but not limited to antigen presenting cells, B-cells, basophils, cytotoxic T-cells, dendritic cells, eosinophils, granulocytes, helper T-cells, leukocytes, lymphocytes, macrophages, mast cells, memory cells, monocytes, natural killer cells, neutrophils, phagocytes, plasma cells and T-cells.

[0210] The term “immune effector function” of the CAR-containing cell refers to any of the activities shown by the CAR-expressing cell upon stimulation by a stimulatory molecule. Examples of immune effector function, e.g., in a CAR-T cell, include cytolytic activity and helper activity, including the secretion of cytokines.

[0211] “Immune effector cell” as used herein refers to the T cells and natural killer (NK) cells.

[0212] “Immune response” as used herein refers to immunities including but not limited to innate immunity, humoral immunity, cellular immunity, immunity, inflammatory response, acquired (adaptive) immunity, autoimmunity and/or overactive immunity.

[0213] As used herein, “CD4 lymphocytes” refer to lymphocytes that express CD4, i.e., lymphocytes that are CD4+. CD4 lymphocytes may be T cells that express CD4.

[0214] The terms “T-cell” and “T-lymphocyte” are interchangeable and used synonymously herein. Examples include but are not limited to naïve T cells, central memory T cells, effector memory T cells or combinations thereof.

[0215] As used herein, the term “antibody” refers to an intact immunoglobulin or to a monoclonal or polyclonal antigen-binding fragment with the Fc (crystallizable fragment) region or FcRn binding fragment of the Fc region, referred to herein as the “Fc fragment” or “Fc domain”. Antigen-binding fragments may be produced by recombinant DNA techniques or by enzymatic or chemical cleavage of intact antibodies. Antigen-binding fragments include, inter alia, Fab, Fab′, F(ab′)2, Fv, dAb, and complementarity determining region (CDR) fragments, single-chain antibodies (scFv), single domain antibodies, chimeric antibodies, diabodies and polypeptides that contain at least a portion of an immunoglobulin that is sufficient to confer specific antigen binding to the polypeptide. The Fc domain includes portions of two heavy chains contributing to two or three classes of the antibody. The Fc domain may be produced by recombinant DNA techniques or by enzymatic (e.g. papain cleavage) or via chemical cleavage of intact antibodies.

[0216] The term “antibody fragment,” as used herein, refer to a protein fragment that comprises only a portion of an intact antibody, generally including an antigen binding site of the intact antibody and thus retaining the ability to bind antigen. Examples of antibody fragments encompassed by the present definition include: (i) the Fab fragment, having VL, CL, VH and CH1 domains; (ii) the Fab′ fragment, which is a Fab fragment having one or more cysteine residues at the C-terminus of the CH1 domain; (iii) the Fd fragment having VH and CH1 domains; (iv) the Fd′ fragment having VH and CH1 domains and one or more cysteine residues at the C-terminus of the CH1 domain; (v) the Fv fragment having the VL and VH domains of a single arm of an antibody; (vi) the dAb fragment (Ward et al., Nature 341, 544-546 (1989)) which consists of a VH domain; (vii) isolated CDR regions; (viii) F(ab′)2 fragments, a bivalent fragment including two Fab′ fragments linked by a disulphide bridge at the hinge region; (ix) single chain antibody molecules (e.g., single chain Fv; scFv) (Bird et al., Science 242:423-426 (1988); and Huston et al., PNAS (USA) 85:5879-5883 (1988)); (x) “diabodies” with two antigen binding sites, comprising a heavy chain variable domain (VH) connected to a light chain variable domain (VL) in the same polypeptide chain (see, e.g., EP 404,097; WO 93/11161; and Hollinger et al., Proc. Natl. Acad. Sci. USA, 90:6444-6448 (1993)); (xi) “linear antibodies” comprising a pair of tandem Fd segments (VH-CH1-VH-CH1) which, together with complementary light chain polypeptides, form a pair of antigen binding regions (Zapata et al. Protein Eng. 8(10):1057-1062 (1995); and U.S. Pat. No. 5,641,870).

[0217] “Single chain variable fragment”, “single-chain antibody variable fragments” or “scFv” antibodies as used herein refer to forms of antibodies comprising the variable regions of only the heavy (V_{H}) and light (V_{L}) chains, connected by a linker peptide. The scFvs are capable of being expressed as a single chain polypeptide. The scFvs retain the specificity of the intact antibody from which it is derived. The light and heavy chains may be in any order, for example, V_{H}-linker-V_{L} or V_{L}-linker-V_{H}, so long as the specificity of the scFv to the target antigen is retained.

[0218] “Complementarity determining region” (CDR) as used herein refers to the amino acid sequences within the variable regions of antibodies which regions confer specificity and binding affinity. In general, there are three CDRs in each of the light chain variable regions (LCDR1, LCDR2 and LCDR3) and three CDRs in each of the heavy chain variable regions (HCD1, HCDr2 and HCDR3). The boundaries of the CDRs may be determined using methods well known in the art including the “Kabat” numbering scheme and/or “Chothia” number scheme (Kabat et al. Sequences of Proteins of Immunological Interest, 5^{th} Ed. Public Health Services, National Institutes of Health, Bethesda, Md.; Al-Lazikani et al., (1997) JMB 273, 927-948).

[0219] As used herein, the term “specific binding” means the contact between an antibody and an antigen with a binding affinity of at least 10⁻⁶ M. In certain aspects, antibodies bind with affinities of at least about 10⁷M, and preferably 10⁻⁸ M, 10⁻⁹ M, 10⁻¹⁰ M, 10⁻¹¹M, or 10⁻¹² M.

[0220] “Binds the same epitope as” means the ability of an antibody, scFv, antigen specific domain of a CAR or other binding agent to bind to a target and having the same epitope as the exemplified antibody, scFv, antigen specific domain of a CAR or other binding agent. As an example, the epitopes of the exemplified antibody, scFv, or other binding agent and other antibodies can be determined using standard epitope mapping techniques. Epitope mapping techniques, well known in the art include Epitope Mapping Protocols in Methods in Molecular Biology, Vol. 66 (Glenn E.Morris, Ed., 1996) Humana Press, Totowa, N.J. For example, linear epitopes may be determined by e.g., concurrently synthesizing large numbers of peptides on solid supports, the peptides corresponding to portions of the protein molecule, and reacting the peptides with antibodies while the peptides are still attached to the supports. Such techniques are known in the art and described in, e.g., U.S. Pat. No. 4,708,871; Geysen et al, (1984) Proc. Natl. Acad. Sci. USA 8:3998-4002; Geysen et al, (1985) Proc. Natl. Acad. Sci. USA 82:78-182; Geysen et al, (1986) Mol. Immunol. 23: 709-715. Similarly, conformational epitopes are readily identified by determining spatial conformation of amino acids such as by, e.g., hydrogen/deuterium exchange, x-ray crystallography and two-dimensional nuclear magnetic resonance. See, e.g., Epitope Mapping Protocols, supra. Antigenic regions of proteins can also be identified using standard antigenicity and hydropathy plots, such as those calculated using, e.g., the Omiga version 1.0 software program available from the Oxford Molecular Group. This computer program employs the Hopp/Woods method, Hopp et al, (1981) Proc. Natl. Acad. Sci USA 78:3824-3828; for determining antigenicity profiles, and the Kyte-Doolittle technique, Kyte et al, (1982) J. Mol. Bioi. 157: 105-132; for hydropathy plots (FROM MORPHOSYS CD19 patent WO 2013/024097). To determine if selected monoclonal antibodies against a target (e.g., CD19) bind to unique epitopes, each antibody can be biotinylated using commercially available reagents (Pierce, Rockford, Ill.). Competition studies using unlabeled monoclonal antibodies and biotinylated monoclonal antibodies can be performed using CD19-extracellualr domain coated-ELISA plates as described above. Biotinylated mAb binding can be detected with a strep-avidin-alkaline phosphatase probe.

[0221] The epitope recognized by a CAR can be also determined from the epitope recognized by the scFv comprising the CAR. For example, since the antigen specific domain of the CAR CD8SP-MPL-161-(vL-vH)-Myc-BBz-T2A-PAC (SEQ ID NO: 1658 and SEQ ID NO: 3403) targeting MPL is comprised of scFv MPL-161-(vL-vH) (SEQ ID NO: 730 and SEQ ID NO: 2500), it is expected that the CAR would target the same epitope as the scFv and the parental antibody from which the scFv is derived. The epitopes recognized by several scFv and/or their parental antibodies used in the construction of the CARs and backbones of this invention are known in the art. Alternatively, the epitope targeted by a CAR (including the CARs that are present as parat of backbones) can be determined by generating a series of mutants of its target antigen and testing the ability of the mutants to bind to the CAR-expressing cells. As an example, the epitope recognized by the CAR CD8SP-MPL-161-(vL-vH)-Myc-BBz-T2A-PAC (SEQ ID NO: 1658 and SEQ ID NO: 3403) targeting MPL can be determined by generating a panel of mutants of the MPL-ECD-GGSG-Nluc-AcV5 fusion construct (SEQ ID NO: 925 and SEQ ID NO: 2670). The mutant constructs would be transfected into a suitable cell line (e.g., 293FT cells) and the supernatant containing the fusion protein collected and assayed for NLuc activity to assure that the different mutant MPL-ECD-GGSG-Nluc-AcV5 fusion proteins are being secreted in the supernatant. Subsequently, the fusion proteins would be tested for their ability to bind to cells (e.g., Jurkat cells or T cells) expressing the CD8SP-MPL-161-(vL-vH)-Myc-BBz-T2A-PAC (SEQ ID NO: 1658 and SEQ ID NO: 3403) CAR construct. The mutant that fails to bind to the CAR-expressing cells is a candidate for containing the epitope targeted by the MPL-specific CAR. An alternate approach to determine the epitope recognized by a particular CAR could include a functional competitive assay with different test antibodies. For example, T cells expressing the CD8SP-MPL-161-(vL-vH)-Myc-BBz-T2A-PAC (SEQ ID NO: 1658 and SEQ ID NO: 3403) CAR would be co-cultured with a cell line expressing MPL (e.g., HEL cells) in the absence and presence of increasing concentrations of different test MPL antibodies. In case the epitope recognized by a test MPL antibody overlaps with the epitope recognized by the CD8SP-MPL-161-(vL-vH)-Myc-BBz-T2A-PAC (SEQ ID NO: 1658 and SEQ ID NO: 3403) CAR, then the test antibody would be expected to block target-cell killing and cytokine production induced by T cells expressing the CD8SP-MPL-161-(vL-vH)-Myc-BBz-T2A-PAC (SEQ ID NO: 1658 and SEQ ID NO: 3403) CAR in a dose-dependent manner. A non-specific antibody of the same isotype as the test antibody would be included as a control and would be expected to have no effect on the target-cell killing and cytokine production induced by T cells expressing the CAR. Similarly, a specific CAR can be expressed in Jurkat-NFAT-EGFP cells and the ability of a test antibody to block EGFP induction by the CAR-expressing Jurkat-NFAT-GFP cells upon coculture with a target cell line can be used to determine whether the epitope recognized by the test antibody overlaps with the epitope recognized by the said CAR.

[0222] “Therapeutic agents” as used herein refers to agents that are used to, for example, treat, inhibit, prevent, mitigate the effects of, reduce the severity of, reduce the likelihood of developing, slow the progression of and/or cure, a disease. Diseases targeted by the therapeutic agents include but are not limited to infectious diseases, carcinomas, sarcomas, lymphomas, leukemia, germ cell tumors, blastomas, antigens expressed on various immune cells, and antigens expressed on cells associated with various hematologic diseases, and/or inflammatory diseases.

[0223] “Cancer” and “cancerous” refer to or describe the physiological condition in mammals that is typically characterized by unregulated cell growth. The term “cancer” is meant to include all types of cancerous growths or oncogenic processes, metastatic tissues or malignantly transformed cells, tissues, or organs, irrespective of histopathologic type or stage of invasiveness. Examples of solid tumors include malignancies, e.g., sarcomas, adenocarcinomas, and carcinomas, of the various organ systems, such as those affecting liver, lung, breast, lymphoid, gastrointestinal (e.g., colon), genitourinary tract (e.g., renal, urothelial cells), prostate and pharynx. Adenocarcinomas include malignancies such as most colon cancers, rectal cancer, renal-cell carcinoma, liver cancer, non-small cell carcinoma of the lung, cancer of the small intestine and cancer of the esophagus. In one embodiment, the cancer is a melanoma, e.g., an advanced stage melanoma. Metastatic lesions of the aforementioned cancers can also be treated or prevented using the methods and compositions of the invention. Examples of other cancers that can be treated include bone cancer, pancreatic cancer, skin cancer, cancer of the head or neck, cutaneous or intraocular malignant melanoma, uterine cancer, ovarian cancer, rectal cancer, cancer of the anal region, stomach cancer, testicular cancer, uterine cancer, carcinoma of the fallopian tubes, carcinoma of the endometrium, carcinoma of the cervix, carcinoma of the vagina, carcinoma of the vulva, Hodgkin Disease, non-Hodgkin lymphoma, cancer of the esophagus, cancer of the small intestine, cancer of the endocrine system, cancer of the thyroid gland, cancer of the parathyroid gland, cancer of the adrenal gland, sarcoma of soft tissue, cancer of the urethra, cancer of the penis, chronic or acute leukemias including acute myeloid leukemia, chronic myeloid leukemia, acute lymphoblastic leukemia, chronic lymphocytic leukemia, solid tumors of childhood, lymphocytic lymphoma, cancer of the bladder, cancer of the kidney or ureter, carcinoma of the renal pelvis, neoplasm of the central nervous system (CNS), primary CNS lymphoma, tumor angiogenesis, spinal axis tumor, brain stem glioma, pituitary adenoma, Kaposi's sarcoma, epidermoid cancer, squamous cell cancer, T-cell lymphoma, environmentally induced cancers including those induced by asbestos, and combinations of said cancers. Treatment of metastatic cancers, e.g., metastatic cancers that express PD-L1 (Iwai et al. (2005) Int. Immunol. 17:133-144) can be effected using the antibody molecules described herein.

[0224] “Polynucleotide” as used herein includes but is not limited to DNA, RNA, cDNA (complementary DNA), mRNA (messenger RNA), rRNA (ribosomal RNA), shRNA (small hairpin RNA), snRNA (small nuclear RNA), snoRNA (short nucleolar RNA), miRNA (microRNA), genomic DNA, synthetic DNA, synthetic RNA, and/or tRNA.

[0225] It is to be inferred without explicit recitation and unless otherwise intended, that when the present disclosure relates to a polypeptide, protein, polynucleotide, antibody or fragment thereof, an equivalent or a biologically equivalent of such is intended within the scope of this disclosure. As used herein, the term “biological equivalent thereof” is intended to be synonymous with “equivalent thereof” when referring to a reference protein, antibody or fragment thereof, polypeptide or nucleic acid, intends those having minimal homology while still maintaining desired structure or functionality. Unless specifically recited herein, it is contemplated that any of the above also includes equivalents thereof. For example, an equivalent intends at least about 70% homology or identity, or at least 80% homology or identity and alternatively, or at least about 85%, or alternatively at least about 90%, or alternatively at least about 95%, or alternatively at least 98% percent homology or identity and exhibits substantially equivalent biological activity to the reference protein, polypeptide, antibody or fragment thereof or nucleic acid. Alternatively, when referring to polynucleotides, an equivalent thereof is a polynucleotide that hybridizes under stringent conditions to the reference polynucleotide or its complement. Alternatively, when referring to polypeptides or proteins, an equivalent thereof is a expressed polypeptide or protein from a polynucleotide that hybridizes under stringent conditions to the polynucleotide or its complement that encodes the reference polypeptide or protein.

[0226] A polynucleotide or polynucleotide region (or a polypeptide or polypeptide region) having a certain percentage (for example, 80%, 85%, 90%, or 95%) of “sequence identity” to another sequence means that, when aligned, that percentage of bases (or amino acids) are the same in comparing the two sequences. The alignment and the percent homology or sequence identity can be determined using software programs known in the art, for example those described in Current Protocols in Molecular Biology (Ausubel et al., eds. 1987) Supplement 30, section 7.7.18, Table 7.7.1. Preferably, default parameters are used for alignment. A preferred alignment program is BLAST, using default parameters. In particular, preferred programs are BLASTN and BLASTP, using the following default parameters: Genetic code=standard; filter=none; strand=both; cutoff=60; expect=10; Matrix=BLOSUM62; Descriptions=50 sequences; sort by=HIGH SCORE; Databases=non-redundant, GenBank+EMBL+DDBJ+PDB+GenBank CDS translations+SwissProtein+SPupdate+PIR. Details of these programs can be found at the following Internet address: ncbi.nlm.nih.gov/cgi-bin/BLAST.

[0227] The term “isolated” as used herein refers to molecules or biologicals or cellular materials being substantially free from other materials. In one aspect, the term “isolated” refers to nucleic acid, such as DNA or RNA, or protein or polypeptide (e.g., an antibody or derivative thereof), or cell or cellular organelle, or tissue or organ, separated from other DNAs or RNAs, or proteins or polypeptides, or cells or cellular organelles, or tissues or organs, respectively, that are present in the natural source. The term “isolated” also refers to a nucleic acid or peptide that is substantially free of cellular material, viral material, or culture medium when produced by recombinant DNA techniques, or chemical precursors or other chemicals when chemically synthesized. Moreover, an “isolated nucleic acid” is meant to include nucleic acid fragments which are not naturally occurring as fragments and would not be found in the natural state. The term “isolated” is also used herein to refer to polypeptides which are isolated from other cellular proteins and is meant to encompass both purified and recombinant polypeptides. The term “isolated” is also used herein to refer to cells or tissues that are isolated from other cells or tissues and is meant to encompass both, cultured and engineered cells or tissues.

[0228] “Naked DNA” as used herein refers to DNA encoding a CAR cloned in a suitable expression vector in proper orientation for expression. Viral vectors which may be used include but are not limited SIN lentiviral vectors, retroviral vectors, foamy virus vectors, adeno-associated virus (AAV) vectors, hybrid vectors and/or plasmid transposons (for example sleeping beauty transposon system) or integrase based vector systems. Other vectors that may be used in connection with alternate embodiments of the invention will be apparent to those of skill in the art.

[0229] “Target cell” as used herein refers to cells which are involved in a disease and can be targeted by the genetically modified cells of the invention (including but not limited to genetically modified T-cells, NK cells, hematopoietic stem cells, pluripotent stem cells, and embryonic stem cells). Other target cells will be apparent to those of skill in the art and may be used in connection with alternate embodiments of the invention.

[0230] The terms “T-cell” and “T-lymphocyte” are interchangeable and used synonymously herein. Examples include but are not limited to naïve T cells, central memory T cells, effector memory T cells or combinations thereof.

[0231] “Vector”, “cloning vector” and “expression vector” as used herein refer to the vehicle by which a polynucleotide sequence (e.g. a foreign gene) can be introduced into a host cell, so as to transform the host and promote expression (e.g. transcription and translation) of the introduced sequence. Vectors include plasmids, phages, viruses, etc.

[0232] The term “functional” when used in conjunction with “derivative” or “variant” or “fragment” refers to a polypeptide which possess a biological activity that is substantially similar to a biological activity of the entity or molecule of which it is a derivative or variant or fragment thereof.

[0233] As used herein, the term “administering,” refers to the placement an agent as disclosed herein into a subject by a method or route which results in at least partial localization of the agents at a desired site.

[0234] “Beneficial results” may include, but are in no way limited to, lessening or alleviating the severity of the disease condition, preventing the disease condition from worsening, curing the disease condition, preventing the disease condition from developing, lowering the chances of a patient developing the disease condition and prolonging a patient's life or life expectancy. As non-limiting examples, “beneficial results” or “desired results” may be alleviation of one or more symptom(s), diminishment of extent of the deficit, stabilized (i.e., not worsening) state of cancer progression, delay or slowing of metastasis or invasiveness, and amelioration or palliation of symptoms associated with the cancer.

[0235] As used herein, the terms “treat,” “treatment,” “treating,” or “amelioration” refer to therapeutic treatments, wherein the object is to reverse, alleviate, ameliorate, inhibit, slow down or stop the progression or severity of a condition associated with, a disease or disorder. The term “treating” includes reducing or alleviating at least one adverse effect or symptom of a condition, disease or disorder, such as cancer. Treatment is generally “effective” if one or more symptoms or clinical markers are reduced. Alternatively, treatment is “effective” if the progression of a disease is reduced or halted. That is, “treatment” includes not just the improvement of symptoms or markers, but also a cessation of at least slowing of progress or worsening of symptoms that would be expected in absence of treatment. Beneficial or desired clinical results include, but are not limited to, alleviation of one or more symptom(s), diminishment of extent of disease, stabilized (i.e., not worsening) state of disease, delay or slowing of disease progression, amelioration or palliation of the disease state, and remission (whether partial or total), whether detectable or undetectable. The term “treatment” of a disease also includes providing relief from the symptoms or side-effects of the disease (including palliative treatment). In some embodiments, treatment of cancer includes decreasing tumor volume, decreasing the number of cancer cells, inhibiting cancer metastases, increasing life expectancy, decreasing cancer cell proliferation, decreasing cancer cell survival, or amelioration of various physiological symptoms associated with the cancerous condition.

[0236] “Conditions” and “disease conditions,” as used herein may include, cancers, tumors or infectious diseases. In exemplary embodiments, the conditions include but are in no way limited to any form of malignant neoplastic cell proliferative disorders or diseases. In exemplary embodiments, conditions include any one or more of kidney cancer, melanoma, prostate cancer, breast cancer, glioblastoma, lung cancer, colon cancer, or bladder cancer.

[0237] The term “effective amount” or “therapeutically effective amount” as used herein refers to the amount of a pharmaceutical composition comprising one or more peptides as disclosed herein or a mutant, variant, analog or derivative thereof, to decrease at least one or more symptom of the disease or disorder, and relates to a sufficient amount of pharmacological composition to provide the desired effect. The phrase “therapeutically effective amount” as used herein means a sufficient amount of the composition to treat a disorder, at a reasonable benefit/risk ratio applicable to any medical treatment.

[0238] A therapeutically or prophylactically significant reduction in a symptom is, e.g. at least about 10%, at least about 20%, at least about 30%, at least about 40%, at least about 50%, at least about 60%, at least about 70%, at least about 80%, at least about 90%, at least about 100%, at least about 125%, at least about 150% or more in a measured parameter as compared to a control or non-treated subject or the state of the subject prior to administering the oligopeptides described herein. Measured or measurable parameters include clinically detectable markers of disease, for example, elevated or depressed levels of a biological marker, as well as parameters related to a clinically accepted scale of symptoms or markers for diabetes. It will be understood, however, that the total daily usage of the compositions and formulations as disclosed herein will be decided by the attending physician within the scope of sound medical judgment. The exact amount required will vary depending on factors such as the type of disease being treated, gender, age, and weight of the subject.

[0239] The phrase “first line” or “second line” or “third line” refers to the order of treatment received by a patient. First line therapy regimens are treatments given first, whereas second or third line therapy are given after the first line therapy or after the second line therapy, respectively. The National Cancer Institute defines first line therapy as “the first treatment for a disease or condition. In patients with cancer, primary treatment can be surgery, chemotherapy, radiation therapy, or a combination of these therapies. First line therapy is also referred to those skilled in the art as “primary therapy and primary treatment.” See National Cancer Institute website at www.cancer.gov, last visited on May 1, 2008. Typically, a patient is given a subsequent chemotherapy regimen because the patient did not show a positive clinical or sub-clinical response to the first line therapy or the first line therapy has stopped.

[0240] “Mammal” as used herein refers to any member of the class Mammalia, including, without limitation, humans and nonhuman primates such as chimpanzees and other apes and monkey species; farm animals such as cattle, sheep, pigs, goats and horses; domestic mammals such as dogs and cats; laboratory animals including rodents such as mice, rats and guinea pigs, and the like. The term does not denote a particular age or sex. Thus, adult and newborn subjects, as well as fetuses, whether male or female, are intended to be included within the scope of this term.

### Chimeric Antigen Receptors

[0241] Provided herein are compositions comprising a CAR and an accessory module and method of using same to treat diseases, including cancer. As described herein, specific combinations of conventional CARs (Table 1) and accessory modules as described in Table 2 define a ‘backbone’ (Table 2).

TABLE 1
Conventional CAR architectures. First generation conventional
CARs (Conventional CAR I) have an intracellular signaling (ISD)
domain (e.g. CD3z) and no costimulatory domain. Second generation
conventional CARs (Conventional CAR 2 or CAR II) have one
costimulatory domain (e.g. 41BB or CD28) and an intracellular
signaling (ISD) domain (e.g. CD3z). Third generation conventional CARs
(Conventional CAR 3 or CAR III) have two costimulatory domains (e.g.
41BB and CD28) and an intracellular signaling (ISD) domain (e.g. CD3z).
Table 1 Conventional CAR Architectures

| | | | | | | | |
|---|---|---|---|---|---|---|---|
| 1 | Conventional CAR 1 | ASD | HR | TMD | ISD | | |
| | (CAR I) | | | | | | |
| 2 | Conventional CAR 2 | ASD | HR | TMD | CSD | ISD | |
| | (CAR II) | | | | | | |
| 3 | Conventional CAR 3 | ASD | HR | TMD | CSD-I | CSD-II | ISD |
| | (CAR III) | | | | | | |

TABLE 2
Exemplary Backbones

| | | Accessory Module | | |
|---|---|---|---|---|
| | | | SEQ ID | SEQ ID |
| Backbone No. | CAR Component | NAME | (DNA) | (PRT) |
| Backbone 1 | Conventional CAR I | K13-vFLIP | 866 | 2629 |
| Backbone 2 | Conventional CAR I | MC159-vFLIP | 867 | 2630 |
| Backbone 3 | Conventional CAR I | MC160-vFLIP | 868 | 2631 |
| Backbone 4 | Conventional CAR I | E8-vFLIP | 869 | 2632 |
| Backbone 5 | Conventional CAR I | Herpesvirus-saimiri-vFLIP | 870 | 2633 |
| Backbone 6 | Conventional CAR I | Mecaca-vFLIP | 871 | 2634 |
| Backbone 7 | Conventional CAR I | BHV-vFLIP | 872 | 2635 |
| Backbone 8 | Conventional CAR I | cFLIP-L/MRIT-alpha | 873 | 2636 |
| Backbone 9 | Conventional CAR I | cFLIP-p22 | 874 | 2637 |
| Backbone 10 | Conventional CAR I | HTLV1-TAX | 875 | 2638 |
| Backbone 11 | Conventional CAR I | HTLV2-TAX | 876 | 2639 |
| Backbone 12 | Conventional CAR I | HTLV2-TAX-RS | 877 | 2640 |
| Backbone 13 | Conventional CAR I | FKBP-K13 | 878 | 2641 |
| Backbone 14 | Conventional CAR I | FKBPX2-K13 | 879 | 2642 |
| Backbone 15 | Conventional CAR I | Myr-FKBPx2-K13 | 880 | 2643 |
| Backbone 16 | Conventional CAR I | FKBPx2-HTLV2-Tax-RS | 881 | 2644 |
| Backbone 17 | Conventional CAR I | FKBPx2-Flag-HTLV2-Tax-RS | 882 | 2645 |
| Backbone 18 | Conventional CAR I | IL6R-304-vHH | 884 | 2647 |
| Backbone 19 | Conventional CAR I | IGHSP2-IL6R-304-VHH-ALB8-VHH | 886 | 2649 |
| Backbone 20 | Conventional CAR I | IgSP-IL6-19A-scFV | 899 | 2662 |
| Backbone 21 | Conventional CAR I | IgSP-Fx06 | 900 | 2663 |
| Backbone 22 | Conventional CAR I | CD8SP2-PD1-4H1-scFv | 889 | 2652 |
| Backbone 23 | Conventional CAR I | CD8SP2-PD1-5C4-scFv | 890 | 2653 |
| Backbone 24 | Conventional CAR I | CD8SP2-CTLA4-Ipilimumab-scFv | 891 | 2654 |
| Backbone 25 | Conventional CAR I | CD8SP2-PD1-4H1-Alb8-vHH | 892 | 2655 |
| Backbone 26 | Conventional CAR I | CD8SP2-PD1-5C4-Alb8-vHH | 893 | 2656 |
| Backbone 27 | Conventional CAR I | CD8SP2-CTLA4-Ipilimumab-Alb8-vHH | 894 | 2657 |
| Backbone 28 | Conventional CAR I | CD8SP2-sHVEM-Alb8-vHH | 902 | 2665 |
| Backbone 29 | Conventional CAR I | tCD19 | 855 | 2618 |
| Backbone 30 | Conventional CAR I | tBCMA | 856 | 2619 |
| Backbone 31 | Conventional CAR I | CNB30 | 852 | 2615 |
| Backbone 32 | Conventional CAR II | K13-vFLIP | 866 | 2629 |
| Backbone 33 | Conventional CAR II | MC159-vFLIP | 867 | 2630 |
| Backbone 34 | Conventional CAR II | MC160-vFLIP | 868 | 2631 |
| Backbone 35 | Conventional CAR II | E8-vFLIP | 869 | 2632 |
| Backbone 36 | Conventional CAR II | Herpesvirus-saimiri-vFLIP | 870 | 2633 |
| Backbone 37 | Conventional CAR II | Mecaca-vFLIP | 871 | 2634 |
| Backbone 38 | Conventional CAR II | BHV-vFLIP | 872 | 2635 |
| Backbone 39 | Conventional CAR II | cFLIP-L/MRIT-alpha | 873 | 2636 |
| Backbone 40 | Conventional CAR II | cFLIP-p22 | 874 | 2637 |
| Backbone 41 | Conventional CAR II | HTLV1-TAX | 875 | 2638 |
| Backbone 42 | Conventional CAR II | HTLV2-TAX | 876 | 2639 |
| Backbone 43 | Conventional CAR II | HTLV2-TAX-RS | 877 | 2640 |
| Backbone 44 | Conventional CAR II | FKBP-K13 | 878 | 2641 |
| Backbone 45 | Conventional CAR II | FKBPX2-K13 | 879 | 2642 |
| Backbone 46 | Conventional CAR II | Myr-FKBPx2-K13 | 880 | 2643 |
| Backbone 47 | Conventional CAR II | FKBPx2-HTLV2-Tax-RS | 881 | 2644 |
| Backbone 48 | Conventional CAR II | FKBPx2-Flag-HTLV2-Tax-RS | 882 | 2645 |
| Backbone 49 | Conventional CAR II | IL6R-304-vHH | 884 | 2647 |
| Backbone 50 | Conventional CAR II | IGHSP2-IL6R-304-VHH-ALB8-VHH | 886 | 2649 |
| Backbone 51 | Conventional CAR II | IgSP-IL6-19A-scFV | 899 | 2662 |
| Backbone 52 | Conventional CAR II | IgSP-Fx06 | 900 | 2663 |
| Backbone 53 | Conventional CAR II | CD8SP2-PD1-4H1-scFv | 889 | 2652 |
| Backbone 54 | Conventional CAR II | CD8SP2-PD1-5C4-scFv | 890 | 2653 |
| Backbone 55 | Conventional CAR II | CD8SP2-CTLA4-Ipilimumab-scFv | 891 | 2654 |
| Backbone 56 | Conventional CAR II | CD8SP2-PD1-4H1-Alb8-vHH | 892 | 2655 |
| Backbone 57 | Conventional CAR II | CD8SP2-PD1-5C4-Alb8-vHH | 893 | 2656 |
| Backbone 58 | Conventional CAR II | CD8SP2-CTLA4-Ipilimumab-Alb8-vHH | 894 | 2657 |
| Backbone 59 | Conventional CAR II | CD8SP2-sHVEM-Alb8-vHH | 902 | 2665 |
| Backbone 60 | Conventional CAR II | tCD19 | 855 | 2618 |
| Backbone 61 | Conventional CAR II | tBCMA | 856 | 2619 |
| Backbone 62 | Conventional CAR II | CNB30 | 852 | 2615 |

[0242] Exemplary embodiments of the CAR components are described in Tables 1-6, 8, 11, and 15.

[0243] As described herein, the various backbones comprise a CAR component and accessory modules. Exemplary embodiments of the accessory modules are described in Table 16.

[0244] In some embodiments, the compositions comprise nucleic acids encoding conventional CARs I-III (Table 1), wherein the antigen specific domain of the CAR targets one or more specific antigens as described in Tables 21 and 22. In some embodiments, the compositions comprise nucleic acids encoding any one or more of backbones 1-62 (Table 2) where the antigen specific domain of the encoded CAR targets one or more specific antigens as described herein and in Tables 19, 20 and 22. In some embodiments, the compositions comprise nucleic acids encoding backbone-1, wherein the antigen specific domain of the CAR in backbone-1 targets one or more cancer specific antigens as described herein and in Table 19 and 22. In some embodiments, the compositions comprise nucleic acids encoding backbone-2, wherein the antigen specific domain of the CAR in backbone-2 targets one or more cancer specific antigens as described herein. In some embodiments, the compositions comprise nucleic acids encoding backbone-32, wherein the antigen specific domain of the CAR in backbone-32 targets one or more cancer specific antigens as described herein and in Table 20 and 22. In some embodiments, the compositions comprise nucleic acids encoding backbone-33, wherein the antigen specific domain of the CAR in backbone-33 targets one or more cancer specific antigens as described herein. In various embodiments, the nucleic acids are used in the treatment of cancer. In some embodiments, the nucleic acids encoding the CAR component of the backbones described herein comprise more than one antigen specific domain wherein each of the antigen specific domains are contiguous and in the same reading frame as the other antigen specific domains in the same CAR.

[0245] In some embodiments, the compositions comprise polypeptides encoded by nucleic acids encoding any conventional CARs 1-III, wherein the antigen specific domain of the CAR targets one or more specific antigens as described herein and in Tables 21 and 22. In some embodiments, the compositions comprise polypeptides encoded by nucleic acids encoding any one or more of backbones 1-62 (Table 2) where the antigen specific domain of the encoded CAR targets one or more specific antigens as described herein and in Tables 20 to 22. In some embodiments, the compositions comprise polypeptides encoded by nucleic acids encoding backbone-1, wherein the antigen specific domain of the CAR in backbone-1 targets one or more cancer specific antigens as described herein and in Table 19 and 22. In some embodiments, the compositions comprise polypeptides encoded by nucleic acids encoding backbone-2, wherein the antigen specific domain of the CAR in backbone-2 targets one or more cancer specific antigens as described herein. In some embodiments, the compositions comprise nucleic acids encoding backbone-32, wherein the antigen specific domain of the CAR in backbone-32 targets one or more cancer specific antigens as described herein and in Table 20 and 22. In some embodiments, the compositions comprise nucleic acids encoding backbone-33, wherein the antigen specific domain of the CAR in backbone-33 targets one or more cancer specific antigens as described herein. In various embodiments, the polypeptides are used in the treatment of cancer. In some embodiments, polypeptides encoded by the nucleic acids encoding the CAR component of the backbones described herein comprise more than one antigen specific domain wherein each of the antigen specific domains are contiguous and in the same reading frame as the other antigen specific domains in the same CAR.

[0246] In some embodiments, the compositions comprise vectors comprising nucleic acids encoding any of conventional CARs I-III, wherein the antigen specific domain of the CAR targets one or more cancer specific antigens as described herein and in Tables 21 and 22. In some embodiments, the compositions comprise vectors comprising nucleic acids encoding any one or more of backbones 1-62 (Table 2) where the antigen specific domain of the encoded CAR targets one or more specific antigens as described herein and in Tables 20 to 22. In some embodiments, the compositions comprise vectors encoding nucleic acids encoding backbone-1, wherein the antigen specific domain of the CAR in backbone-1 targets one or more cancer specific antigens as described herein and in Tables 19 and 22. In some embodiments, the compositions comprise vectors encoding nucleic acids encoding backbone-2, wherein the antigen specific domain of the CAR in backbone-2 targets one or more cancer specific antigens as described herein. In some embodiments, the compositions comprise vectors encoding nucleic acids encoding backbone-32, wherein the antigen specific domain of the CAR in backbone-32 targets one or more cancer specific antigens as described herein. In some embodiments, the compositions comprise vectors encoding nucleic acids encoding backbone-33, wherein the antigen specific domain of the CAR in backbone-33 targets one or more cancer specific antigens as described herein. In various embodiments, the vectors are used in the treatment of cancer. In some embodiments, vectors comprising nucleic acids encoding the conventional CARs I to III or CAR component of the backbones described herein comprise more than one antigen specific domain wherein each of the antigen specific domains are contiguous and in the same reading frame as the other antigen specific domains in the same CAR.

[0247] In some embodiments, the compositions comprise genetically modified cells which include vectors comprising nucleic acids encoding any one or more of conventional CARs I to III or backbones 1-62 (Table 2) where the antigen specific domain of the encoded CAR targets one or more specific antigens as described herein and in Tables 19 to 22. In some embodiments, the compositions comprise genetically modified cells which include vectors encoding nucleic acids encoding conventional CARs I to III, wherein the antigen specific domain of the CAR targets one or more cancer specific antigens as described herein and in Tables 19 and 22. In some embodiments, the compositions comprise genetically modified cells which include vectors encoding nucleic acids encoding backbone-1, wherein the antigen specific domain of the CAR in backbone-1 targets one or more cancer specific antigens as described herein. In some embodiments, the compositions comprise genetically modified cells which include vectors encoding nucleic acids encoding backbone-2, wherein the antigen specific domain of the CAR in backbone-2 targets one or more cancer specific antigens as described herein. In some embodiments, the compositions comprise genetically modified cells which include vectors encoding nucleic acids encoding backbone-32, wherein the antigen specific domain of the CAR in backbone-32 targets one or more cancer specific antigens as described herein. In some embodiments, the compositions comprise genetically modified cells which include vectors encoding nucleic acids encoding backbone-33, wherein the antigen specific domain of the CAR in backbone-33 targets one or more cancer specific antigens as described herein. In various embodiments, the genetically modified cells are used in treatment of cancer. In some embodiments, the genetically modified cells targets more than one antigen on a cancer cell.

[0248] In various embodiments, the isolated nucleic acid molecules encoding the CAR components of the backbones described herein, encode one, two, three or more antigen specific domains.

[0249] In various embodiments, the isolated nucleic acid molecules encoding the CAR components of the backbones described herein, encode one, two, three or more co-stimulatory domains.

[0250] In various embodiments, the isolated nucleic acid molecules encoding the CAR components of the backbones described herein, encode one, two, three or more intracellular signaling domain.

[0251] The nucleic acid sequences encoding for the desired components of the CARs and accessory modules described herein can be obtained using recombinant methods known in the art, such as, for example by screening libraries from cells expressing the nucleic acid molecule, by deriving the nucleic acid molecule from a vector known to include the same, or by isolating directly from cells and tissues containing the same, using standard techniques. Alternatively, the nucleic acid of interest can be produced synthetically, rather than cloned. In exemplary embodiments, the nucleic acid sequences encoding for the desired components of the CARs and accessory modules described herein are described in Tables 3-22.

[0252] In some embodiments, the genetically modified cells described herein that express the CARs and accessory components described herein also express agents that reduce toxicity of CARs. In exemplary embodiments, such agents are set forth in Table 16. In exemplary embodiments, such agents include but are not limited to any one, two, three or more of scFv against IL-6 (for example, SEQ ID NO: 899), a camelid vHH against IL-6 receptor alpha (for example, SEQ ID NO: 884), a bispecific camelid vHH targeting IL-6 receptor alpha and albumin (SEQ ID NO: 886), Fx06 peptide (SEQ ID NO: 900), or combinations thereof.

[0253] In some embodiments, the genetically modified cells described herein that express the CARs and accessory components described herein also express agents that enhance the activity of CARs. In exemplary embodiments, such agents are set forth in Table 16. In exemplary embodiments, such agents include but are not limited to any one, two, three or more of hTERT (SEQ ID NO: 903), heparinase (SEQ ID NO: 904), soluble HVEM (SEQ ID NO: 901), a fusion protein containing soluble HVEM and a camelid vHH targeting albumin (SEQ ID NO: 902), scFvs targeting PD1 (SEQ ID NOs: 889 and 890), scFv targeting CTLA4 (SEQ ID NO: 894), bispecific proteins targeting PD1 and albumin (SEQ ID NO: 892 and 893), bispecific proteins targeting CTLA4 and albumin (SEQ ID NO: 894) or combinations thereof. The rationale for targeting albumin in the bispecific proteins is to extend the half-lives of the scFvs and vHH fragments which are otherwise rapidly cleared by the kidneys due to their relatively small size.

[0254] In specific embodiments, exemplary constructs containing backbone-1, which comprises a conventional CAR I containing a CD3z activation domain and coexpresses a K13-vFLIP accessory module, are set forth in Table 19.

[0255] In specific embodiments, exemplary constructs containing backbone-32, which comprises a conventional CAR II containing a 41BB costimulatory domain, a CD3z activation domain and coexpresses a K13-vFLIP accessory module, are set forth in Table 20.

[0256] In specific embodiments, exemplary conventional CAR II constructs containing a 41BB costimulatory domain and a CD3z activation domain are described in Table 21.

[0257] In specific embodiments, exemplary CAR constructs in various embodiments of the inventions are described in Table 22.

### Antigen Specific Domain

[0258] The compositions comprising various backbones as described herein comprise CARs which comprise one or more ASD that binds specifically to a cancer associated antigen as described herein. The sequences of the ASD are contiguous with and in the same reading frame as a nucleic acid sequence encoding the remainder of the CAR.

[0259] In one embodiment, each antigen specific region comprises the full-length IgG heavy chain (specific for the target antigen) having the V_{H}, CH1, hinge, and the CH2 and CH3 (Fc) Ig domains, if the V_{H} domain alone is sufficient to confer antigen-specificity (“single-domain antibodies”). The full length IgG heavy chain may be linked to the co-stimulatory domain and the intracellular signaling domain via the appropriate transmembrane domain. If both, the V_{H} and the V_{L} domains, are necessary to generate a fully active antigen-specific targeting region, the V_{H}-containing CAR and the full-length lambda light chain (IgL) are both introduced into the cells to generate an active antigen-specific targeting region.

[0260] In some embodiments, the antigen specific domain of the encoded CAR molecule comprises an antibody, an antibody fragment, an scFv, a Fv, a Fab, a (Fab′)₂, a single domain antibody (SDAB), a VH or VL domain, or a camelid VHH domain. In some embodiments, the antigen binding domain of the CAR is a scFv antibody fragment that is humanized compared to the murine sequence of the scFv from which it is derived.

[0261] In some instances, scFvs can be prepared according to methods known in the art (for example, Bird et al., (1988) Science 242:423-426 and Huston et al., (1988) Proc.Natl. Acad. Sci. USA 85:5879-5883). ScFv molecules can be produced by linking V_{H} and V_{L} regions together using flexible polypeptide linkers. The scFv molecules comprise a linker (e.g., a Ser-Gly linker) with an optimized length and/or amino acid composition. The linker length can greatly affect how the variable regions of a scFv fold and interact. For example, if a short polypeptide linker is employed (for example, between 5-10 amino acids) intrachain folding is prevented. Interchain folding is also required to bring the two variable regions together to form a functional epitope binding site. For examples of linker orientation and size see, e.g., Hollinger et al. 1993 Proc Natl Acad. Sci. U.S.A. 90:6444-6448, U.S. Patent Application Publication Nos. 2005/0100543, 2005/0175606, 2007/0014794, and PCT publication Nos. WO2006/020258 and WO2007/024715, is incorporated herein by reference.

[0262] An scFv can comprise a linker of at least 1, 2, 3, 4, 5, 6, 7, 8, 9, 10, 11, 12, 13, 14, 15, 16, 17, 18, 19, 20, 25, 30, 35, 40, 45, 50, or more amino acid residues between its V_{L} and V_{H} regions. The linker sequence may comprise any naturally occurring amino acid. In some embodiments, the linker sequence comprises amino acids glycine and serine. In another embodiment, the linker sequence comprises sets of glycine and serine repeats such as (Gly4Ser)n, where n is a positive integer equal to or greater than 1 (SEQ ID NO:252, SEQ ID NO:253). In one embodiment, the linker can be (Gly4Ser)3 (SEQ ID NO:254, SEQ ID NO:254) or (Gly4Ser)3 (SEQ ID NO:250-SEQ ID NO:255). Variation in the linker length may retain or enhance activity, giving rise to superior efficacy in activity studies.

[0263] In another aspect, the antigen binding domain is a T cell receptor (“TCR”), or a fragment thereof, for example, a single chain TCR (scTCR). Methods to make such TCRs are known in the art. See, e.g., Willemsen R A et al, Gene Therapy 7: 1369-1377 (2000); Zhang T et al, Cancer Gene Ther 11: 487-496 (2004); Aggen et al, Gene Ther. 19(4):365-74 (2012) (references are incorporated herein by its entirety). For example, scTCR can be engineered that contains the Vα and vβ genes from a T cell clone linked by a linker (e.g., a flexible peptide). This approach is very useful to cancer associated target that itself is intracellular, however, a fragment of such antigen (peptide) is presented on the surface of the cancer cells by MHC

[0264] In one embodiment, the antigen specific domain comprises one, two or all three heavy chain (hc) CDRs, hcCDR1, hcCDR2 and hcCDR3 of an antibody listed herein, and/or one, two or all three light chain (lc) CDRs, lcCDR1, lcCDR2 and lcCDR3 of an antibody listed herein.

[0265] In another embodiment, the antigen specific domain comprises a humanized antibody or an antibody fragment. In some aspects, a non-human antibody is humanized, where specific sequences or regions of the antibody are modified to increase similarity to an antibody naturally produced in a human or fragment thereof. In one aspect, the antigen binding domain is humanized. A humanized antibody can be produced using a variety of techniques known in the art, including but not limited to, CDR-grafting (see, e.g., European Patent No. EP 239,400; International Publication No. WO 91/09967; and U.S. Pat. Nos. 5,225,539, 5,530,101, and 5,585,089, each of which is incorporated herein in its entirety by reference), veneering or resurfacing (see, e.g., European Patent Nos. EP 592,106 and EP 519,596; Padlan, 1991, Molecular Immunology, 28(4/5):489-498; Studnicka et al., 1994, Protein Engineering, 7(6):805-814; and Roguska et al., 1994, PNAS, 91:969-973, each of which is incorporated herein by its entirety by reference), chain shuffling (see, e.g., U.S. Pat. No. 5,565,332, which is incorporated herein in its entirety by reference), and techniques disclosed in, e.g., U.S. Patent Application Publication No. US2005/0042664, U.S. Patent Application Publication No. US2005/0048617, U.S. Pat. Nos. 6,407,213, 5,766,886, International Publication No. WO 9317105, Tan et al., J. Immunol., 169:1119-25 (2002), Caldas et al., Protein Eng., 13(5):353-60 (2000), Morea et al., Methods, 20(3):267-79 (2000), Baca et al., J. Biol. Chem., 272(16): 10678-84 (1997), Roguska et al., Protein Eng., 9(10):895-904 (1996), Couto et al., Cancer Res., 55 (23 Supp):5973s-5977s (1995), Couto et al., Cancer Res., 55(8): 1717-22 (1995), Sandhu J S, Gene, 150(2):409-10 (1994), and Pedersen et al., J. Mol. Biol., 235(3):959-73 (1994), each of which is incorporated herein in its entirety by reference. In some embodiments, the portion of a CAR composition of the invention that comprises an antibody fragment is humanized with retention of high affinity for the target antigen and other favorable biological properties

[0266] In some embodiments, the antigen specific domain is a T cell receptor specific for the target antigen or a fragment of the T cell receptor, wherein the fragment retains the specificity for the target antigen.

[0267] In some embodiments, the antigen specific domain of a CAR described herein is a scFv antibody fragment. In some embodiments, the antigen specific scFv antibody fragments are functional in that they bind the same antigen with the same or comparable affinity as the IgG antibody from which it is derived. In other embodiments, the antibody fragment has a lower binding affinity to the antigen compared to the antibody from which it is derived but is functional in that it provides a biological response described herein. In one embodiment, the CAR molecule comprises an antibody fragment that has a binding affinity KD of 10⁻⁴ M to 10⁻⁸M, 10⁻⁵M to 10⁻⁷M, 10⁻⁶M or 10⁻⁸ M, for the target antigen.

[0268] In some embodiments, antigen specific domain of a CAR described herein binds to a MHC presented peptide. Normally, peptides derived from endogenous proteins fill the pockets of Major histocompatibility complex (MHC) class I molecules, and are recognized by T cell receptors (TCRs) on CD8+T lymphocytes. The MHC class I complexes are constitutively expressed by all nucleated cells. In cancer, virus-specific and/or tumor-specific peptide/MHC complexes represent a unique class of cell surface targets for immunotherapy. TCR-like antibodies targeting peptides derived from viral or tumor antigens in the context of human leukocyte antigen (HLA)-A1 or HLA-A2 have been described (see, e.g., Sastry et al., J Viral. 2011 85(5):1935-1942; Sergeeva et al., Blood, 2011117(16):4262-4272; Verma et al., Jlmmunol2010 184(4):2156-2165; Willemsen et al., Gene Ther20018(21):1601-1608; Dao et al., Sci Transl Med 2013 5(176):176ra33; Tassev et al., Cancer Gene Ther 2012 19(2):84-100). For example, TCR-like antibody can be identified from screening a library, such as a human scFv phage displayed library. Exemplary CARs that are based on TCR-like antibodies targeting WT1 in association with HLA-A2 are represented by SEQ ID NO: 1176 to SEQ ID NO: 1179. In the instant invention, CARs were generated using antigen binding domain derived from TCR like antibodies against several HLA-A2 restricted intracellular peptides. The target protein antigens, the peptide fragment and the sequence of the peptide are shown in Table 23.

[0269] In some embodiments, when the CARs comprising functional fragments of antibodies (including scFv fragments) described herein bind the target antigen, a biological response is induced such as activation of an immune response, inhibition of signal-transduction originating from its target antigen, inhibition of kinase activity, and the like, as will be understood by a skilled artisan.

[0270] In some embodiments, the antigens specific for disease which may be targeted by the CARs when expressed alone or with the accessory modules as described herein include but are not limited to any one or more of CD19, CD22, CD23, MPL, CD123, CD32, CD138, CD200R, CD276, CD324, CD30, CD32, FcRH5, CD99, Tissue Factor, amyloid, Fc region of an immunoglobulin, CD171, CS-1, CLL-1 (CLECL1), CD33, EGFRvIII, GD2, GD3, BCMA, Tn Ag, PSMA, ROR1, FLT3, FAP, TAG72, CD38, CD44v6, CEA, EPCAM, B7H3, KIT, IL-13Ra2, IL11Ra, Mesothelin, PSCA, VEGFR2, Lewis Y, CD24, PDGFR-beta, PRSS21, SSEA-4, CD20, Folate receptor alpha, ERBB2 (Her2/neu), MUC1, EGFR, NCAM, Prostase, PAP, ELF2M, Ephrin B2, IGF-I receptor, CAIX, LMP2, gp100, bcr-abl, tyrosinase, EphA2, Fucosyl GM1, sLea, GM3, TGS5, HMWMAA, o-acetyl-GD2, Folate receptor beta, TEM1/CD248, TEM7R, CLDN6, TSHR, TCR-beta1 constant chain, TCR beta2 constant chain, TCR gamma-delta, GPRC5D, CXORF61, CD97, CD179a, ALK, Polysialic acid, PLAC1, GloboH, NY-BR-1, UPK2, HAVCR1, ADRB3, PANX3, GPR20, LY6K, OR51E2, TARP, WT1, NY-ESO-1, LAGE-1a, legumain, HPV E6, E7, HTLV1-Tax, KSHV K8.1 protein, EBB gp350, HIV1-envelop glycoprotein gp120, MAGE-Al, MAGE Al, ETV6-AML, sperm protein 17, XAGE1, Tie 2, MAD-CT-1, MAD-CT-2, Fos-related antigen 1, p53, p53 mutant, prostein, survivin and telomerase, PCTA-1/Galectin 8, MelanA/MART1, Ras mutant, hTERT, DLL3, TROP2, PTK7, GCC, AFP, sarcoma translocation breakpoints, ML-IAP, ERG (TMPRSS2 ETS fusion gene), NA17, PAX3, Androgen receptor, Cyclin B1, MYCN, RhoC, TRP-2, CYP1B1, BORIS, SART3, PAX5, OY-TES1, LCK, AKAP-4, SSX2, RAGE-1, RU1, RU2, intestinal carboxyl esterase, mut hsp70-2, CD79a, CD79b, CD72, LAIR1, FCAR, LILRA2, CD300LF, CLEC12A, BST2, EMR2, LY75, GPC3, FCRL5, IGLL1, FITC, Leutenizing hormone receptor (LHR), Follicle stimulating hormone receptor (FSHR), Chorionic Gonadotropin Hormone receptor (CGHR), CCR4, GD3, SLAMF6, SLAMF4, FITC, Leutenizing hormone receptor (LHR), Follicle stimulating hormone receptor (FSHR), Chorionic Gonadotropin Hormone receptor (CGHR), CCR4, GD3, SLAMF6, SLAMF4, or combinations thereof.

[0271] In some embodiments, the antigens specific for a disease which may be targeted by the CARs when expressed alone or with the accessory modules as described herein include but are not limited to any one or more of 4-1BB, 5T4, adenocarcinoma antigen, alpha-fetoprotein, BAFF, B-lymphoma cell, C242 antigen, CA-125, carbonic anhydrase 9 (CA-IX), C-MET, CCR4, CD152, CD19, CD20, CD200, CD22, CD221, CD23 (IgE receptor), CD28, CD30 (TNFRSF8), CD33, CD4, CD40, CD44 v6, CD51, CD52, CD56, CD74, CD80, CD123, CEA, CNT0888, CTLA-4, DR5, EGFR, EpCAM, CD3, FAP, fibronectin extra domain-B, folate receptor 1, GD2, GD3 ganglioside, glycoprotein 75, GPNMB, HER2/neu, HGF, human scatter factor receptor kinase, IGF-1 receptor, IGF-I, IgG1, L1-CAM, IL-13, IL-6, insulin-like growth factor I receptor, integrin α5β1, integrin avβ3, LAMP1, MORAb-009, MS4A1, MUC1, mucin CanAg, N-glycolylneuraminic acid, NPC-1C, PDGF-R a, PDL192, phosphatidylserine, prostatic carcinoma cells, RANKL, RON, ROR1, SCH 900105, SDC1, SLAMF7, TAG-72, tenascin C, TGF beta 2, TGF-β, TRAIL-R1, TRAIL-R2, tumor antigen CTAA16.88, VEGF-A, VEGFR-1, VEGFR2, vimentin or combinations thereof. Other antigens specific for cancer will be apparent to those of skill in the art and may be used in connection with alternate embodiments of the invention.

[0272] In some embodiments, the antigens specific for cancer which may be targeted by the CARs when expressed alone or with the accessory modules as described herein include but are not limited to any one or more of MPL, CD19, FLT3, GRP-78, CD79b, Ly-1, Lym2, CD23, CD179b, CDH1, CDH6, CDH19, CDH17, DLL3, PTK7, TROP2, TIM1, LAMP1 or combinations thereof. In some embodiments, the antigen specific domains of the CARs specific for MPL, CD19, FLT3, GRP-78, CD79b, Lym1, Lym2, CD23, CDH1, CDH6, CDH19, CDH17, DLL3, PTK7, TROP2, TIM1, LAMP1 comprise scFv sequences set forth in Table 11.

[0273] A CAR when used alone or with accessory modules as described herein can comprise an antigen binding domain (e.g., antibody or antibody fragment) that binds to a disease-supporting antigen (e.g., a disease-supporting antigen as described herein). In some embodiments, the disease-supporting antigen is an antigen present on cells that support the survival and proliferation of disease causing cells. In some embodiments, the disease-supporting antigen is an antigen present on a stromal cell or a myeloid-derived suppressor cell (MDSC). Stromal cells can secrete growth factors and cytokines to promote cell proliferation in the microenvironment. MDSC cells can block T cell proliferation and activation. Without wishing to be bound by theory, in some embodiments, the CAR-expressing cells destroy the disease-supporting cells, thereby indirectly blocking growth or survival of disease causing cells.

[0274] In embodiments, the stromal cell antigen is selected from one or more of: bone marrow stromal cell antigen 2 (BST2), fibroblast activation protein (FAP) and tenascin. In an embodiment, the FAP-specific antibody is, competes for binding with, or has the same CDRs as, sibrotuzumab. In embodiments, the MDSC antigen is selected from one or more of: CD33, CDllb, C14, CD15, and CD66b. Accordingly, in some embodiments, the disease supporting antigen is selected from one or more of: bone marrow stromal cell antigen 2 (BST2), fibroblast activation protein (FAP) or tenascin, CD33, CDllb, C14, CD15, and CD66b.

[0275] In a further embodiment, each antigen specific region of the CAR may comprise a divalent (or bivalent) single-chain variable fragment (di-scFvs, bi-scFvs). In CARs comprising di-scFVs, two scFvs specific for each antigen are linked together by producing a single peptide chain with two V_{H} and two V_{L} regions, yielding tandem scFvs. (Xiong, Cheng-Yi; Natarajan, A; Shi, X B; Denardo, G L; Denardo, S J (2006). “Development of tumor targeting anti-MUC-1 multimer: effects of di-scFv unpaired cysteine location on PEGylation and tumor binding”. Protein Engineering Design and Selection 19 (8): 359-367; Kufer, Peter; Lutterbüse, Ralf; Baeuerle, Patrick A. (2004). “A revival of bispecific antibodies”. Trends in Biotechnology 22 (5): 238-244). CARs comprising at least two antigen-specific targeting regions would express two scFvs specific for each of the two antigens. The resulting ASD is joined to the co-stimulatory domain and the intracellular signaling domain via a hinge region and a transmembrane domain. Alternatively, CARs comprising two antigen specific targeting regions would express two vHH specific for each of the two antigens or two epitopes of the same antigen. Exemplary CARs targeting two antigens are represented by SEQ ID NOs: 1042, 1043, 1049, 1050 and 1087.

[0276] In an additional embodiment, each ASD of the CAR comprises a diabody. In a diabody, the scFvs are created with linker peptides that are too short for the two variable regions to fold together, driving the scFvs to dimerize. Still shorter linkers (one or two amino acids) lead to the formation of trimers, the so-called triabodies or tribodies. Tetrabodies may also be used.

[0277] In some embodiments, the ASD of the CAR comprises V_{L} fragments as described in Table 4.

[0278] In some embodiments, the ASD of the CAR comprises V_{H} fragments as described in Table 6.

[0279] In some embodiments, the ASD of the CAR comprises V_{HH} fragments (nanobodies) as described in Table 7.

[0280] In some embodiments, the ASD of the CAR comprises affibodies as described in Table 8.

[0281] In some embodiments, the ASD of the CAR comprises ligands as describes in Table 10.

[0282] In some embodiments, the ASD of the CAR comprises scFv fragments as describes in Table 11.

[0283] In one embodiment, an antigen specific domain of a CAR against a target antigen is an antigen binding portion, e.g., CDRs, of vL and vH fragments targeting this antigen as shown in Tables 4 and 6, respectively.

[0284] In one embodiment, an antigen specific domain of a CAR against a target antigen is an antigen binding portion, e.g., CDRs, of vHH fragments targeting this antigen as shown in Table 7.

[0285] In one embodiment, an antigen specific domain of a CAR against a target antigen is an antigen binding portion of a non-immunoglobulin scaffold targeting this antigen as shown in Table 8.

[0286] In one embodiment, an antigen specific domain of a CAR against a target antigen is an antigen binding portion of a receptor known to bind this target antigen.

[0287] In one embodiment, an antigen binding specific domain of a CAR against a target antigen is an antigen binding portion of a ligand known to bind this target antigen.

[0288] In one embodiment, an antigen specific domain of a CAR against a target antigen is an antigen binding portion, e.g., CDRs, of vL and vH fragments of a scFV targeting this antigen as shown in Table 11.

[0289] In another embodiment, the invention provides CARs that bind to the same epitope on the different targets described in Tables 19-22 as any of the CARs of the invention (i.e., CARs that have the ability to cross-compete for binding to the different targets with any of the CARs of the invention). In some embodiments, the antigen specific domains of these CARs could be derived from vL fragments, vH fragments or scFv fragments of antibodies. In some embodiments, the reference antibodies for cross-competition studies to determine the target-epitope recognized by a CAR of the invention described in Tables 19-22 are scFvs having sequences as shown in SEQ ID NOs: 2334-2568 (Table 11). In an exemplary embodiment, the reference scFv FMC63(vL-vH) represented by SEQ ID NO: 2334 can be used in cross-competition studies to determine the target-epitope recognized by FMC63-based conventional CARs and backbones of the invention (SEQ ID NOs:2672, 2942, 3212, 3495-3515) described in Tables 19-22. In some embodiments, the reference vHH fragments for cross-competition studies to determine the target-epitope recognized by a CAR of the invention described in Tables 19-22 are vHH fragments having sequences as shown in SEQ ID NOs: 2269-2293 (Table 7). In some embodiments, the reference non-immunoglobulin antigen binding scaffolds for cross-competition studies for cross-competition studies to determine the target-epitope recognized by a CAR of the invention described in Tables 19-22 are non-immunoglobulin antigen binding scaffolds having sequences as shown in SEQ ID NOs: 2294-2298 (Table 8).). In some embodiments, the reference ligands for cross-competition studies to determine the target-epitope recognized by a CAR of the invention described in Tables 19-22 are ligands having sequences as shown in SEQ ID NOs: 2323-2333 (Table 10). In some embodiments, the reference CARs for cross-competition studies against different targets are CARs having sequences as shown in SEQ ID NOs: 2672-2941 (Table 19).

[0290] In an embodiment, the reference antibodies for cross-competition studies to determine the target-epitopes recognized by the MPL-targeting CARs of the invention (e.g., SEQ ID NOs: 1117-1125) are antibodies mAb-1.6, mAb-1.111, mAb-1.75, mAb-1.78, mAb-1.169, and mAb-1.36 described in patent application US 2012/0269814 A1.

[0291] In an embodiment, the reference scFvs for cross-competition studies to determine the target-epitopes recognized by the MPL-targeting CARs of the invention (e.g., SEQ ID NOs: 1117-1125) are scFvs having sequences as shown in SEQ ID NOs: 2499-2506 (Table 11).

[0292] In an embodiment, the reference ligands for cross-competition studies to determine the target-epitopes recognized by the MPL-targeting CARs of the invention (e.g., SEQ ID NOs: 1117-1125) are ligands having sequences as shown in SEQ ID NOs: 2323-2324 (Table 10).

[0293] In an embodiment, the reference CARs for cross-competition studies to determine the target-epitopes recognized by the MPL-targeting CARs of the invention are CARs having sequences as shown in SEQ ID NOs: 1117-1125 and 1164 (Table 19).

[0294] In the preferred embodiment, an MPL-targeting CAR of the invention binds to an MPL-epitope corresponding to or overlapping with the peptide sequence -PWQDGPK-.

[0295] In an embodiment, the reference scFvs for cross-competition studies to determine the target-epitopes recognized by the CD19-targeting CARs of the invention (e.g., SEQ ID NOs: 930-941) are scFvs having sequences as shown in SEQ ID NOs: 2336-2347 (Table 11).

[0296] In an embodiment, the reference CARs for cross-competition studies to determine the target-epitopes recognized by the CD19-targeting CARs of the invention are CARs having sequences as shown in SEQ ID NOs: 930-941 (Table 19).

[0297] In an embodiment, the reference scFvs for cross-competition studies to determine the target-epitopes recognized by the CD20-targeting CARs of the invention (e.g., SEQ ID NOs: 964-977) are scFvs having sequences as shown in SEQ ID NOs: 2366-2380 (Table 11).

[0298] In an embodiment, the reference CARs for cross-competition studies to determine the target-epitopes recognized by the CD20-targeting CARs of the invention are CARs having sequences as shown in SEQ ID NOs: 964-977 (Table 19).

[0299] In the preferred embodiment, the CD20-targeting CARs of the invention bind to the epitopes corresponding to one or more of the sequences -PAGIYAPI-, -FLKMESLNFIRAHTP-, -HFLKMESLNFIRAHTPY-, -YNAEPANPSEKNSPSTQY-, -YNAEPANPSEKNSPST- and -YNCEPANPSEKNSP-.

[0300] In an embodiment, the reference scFvs for cross-competition studies against DLL3-targeting CARs of the invention (e.g., SEQ ID NOs: 1044-1045) are scFvs having sequences as shown in SEQ ID NOs: 2443-2444 (Table 11).

[0301] In an embodiment, the reference CARs for cross-competition studies against DLL3-targeting CARs of the invention are CARs having sequences as shown in SEQ ID NOs: 1044-1045 (Table 19).

[0302] In an embodiment, the reference scFvs for cross-competition studies against LAMP1-targeting CARs of the invention (e.g., SEQ ID NOs: 1104-1105) are scFvs having sequences as shown in SEQ ID NOs: 2489-2490 (Table 11).

[0303] In an embodiment, the reference CARs for cross-competition studies against LAMP1-targeting CARs of the invention are CARs having sequences as shown in SEQ ID NOs: 1104-1105 (Table 19).

[0304] In an embodiment, the reference scFvs for cross-competition studies against TROP2-targeting CARs of the invention (e.g., SEQ ID NOs: 2910-2911) are scFvs having sequences as shown in SEQ ID NOs: 2544-2545 (Table 11).

[0305] In an embodiment, the reference CARs for cross-competition studies against TROP2-targeting CARs of the invention are CARs having sequences as shown in SEQ ID NOs: 2910-2911 (Table 19).

[0306] In an embodiment, the reference scFvs for cross-competition studies against PTK7-targeting CARs of the invention (e.g., SEQ ID NOs: 1143-1144) are scFvs having sequences as shown in SEQ ID NOs: 2523-2524 (Table 11).

[0307] In an embodiment, the reference CARs for cross-competition studies against PTK7-targeting CARs of the invention are CARs having sequences as shown in SEQ ID NOs: 1143-1144 (Table 19).

[0308] In an embodiment, the reference scFv for cross-competition studies against a CD23-targeting CAR (e.g., SEQ ID NO: 2932) is a scFv having sequence as shown in SEQ ID NO: 2565 (Table 11).

[0309] In an embodiment, the reference CAR for cross-competition studies against a CD23-targeting CAR of the invention is a CAR having sequences as shown in SEQ ID NO: 2932 (Table 19).

[0310] In an embodiment, the reference scFvs for cross-competition studies against a TCR-gamma-delta-targeting CAR (e.g., SEQ ID NO: 1155) is a scFv having sequence as shown in SEQ ID NO: 2535 (Table 11).

[0311] In an embodiment, the reference CAR for cross-competition studies against TCR-gamma-delta-targeting-targeting CAR of the invention is a CAR having sequences as shown in SEQ ID NO: 1155 (Table 19).

[0312] In an embodiment, the reference scFvs for cross-competition studies against CDH6-targeting CARs of the invention (e.g., SEQ ID NOs: 1016-1017) are scFvs having sequences as shown in SEQ ID NOs: 2418-2419 (Table 11).

[0313] In an embodiment, the reference CARs for cross-competition studies against CDH6-targeting CARs of the invention are CARs having sequences as shown in SEQ ID NOs: 1016-1017 (Table 19).

[0314] In an embodiment, the reference scFvs for cross-competition studies against CDH19-targeting CARs of the invention (e.g., SEQ ID NOs: 1019 and 1180) are scFvs having sequences as shown in SEQ ID NOs: 2421 and 2558 (Table 11).

[0315] In an embodiment, the reference CARs for cross-competition studies against CDH19-targeting CARs of the invention are CARs having sequences as shown in SEQ ID NOs: 1019 and 1180 (Table 19).

[0316] In an embodiment, the reference scFvs for cross-competition studies against CD324-targeting CARs of the invention (e.g., SEQ ID NOs: 1014-1015) are scFvs having sequences as shown in SEQ ID NOs: 2416-2417 (Table 11).

[0317] In an embodiment, the reference CARs for cross-competition studies against CD324-targeting CARs of the invention are CARs having sequences as shown in SEQ ID NOs: 1014-1015 (Table 19).

[0318] In an embodiment, the reference scFv for cross-competition studies against a CD276-targeting CAR (e.g., SEQ ID NO: 2578) is a scFv having sequence as shown in SEQ ID NO: 2415 (Table 11).

[0319] In an embodiment, the reference CAR for cross-competition studies against a CD276-targeting CARs of the invention is a CAR having sequences as shown in SEQ ID NO: 2578 (Table 19).

[0320] In an embodiment, the reference scFvs for cross-competition studies against GFRa4-targeting CARs of the invention (e.g., SEQ ID NOs: 1066-1067) are scFvs having sequences as shown in SEQ ID NOs: 2461-2462 (Table 11).

[0321] In an embodiment, the reference CARs for cross-competition studies against GFRa4-targeting CARs of the invention are CARs having sequences as shown in SEQ ID NOs: 1066-1067 (Table 19).

[0322] In an embodiment, the reference scFvs for cross-competition studies against CSF2RA-targeting CARs of the invention (e.g., SEQ ID NOs: 1040-1041) are scFvs having sequences as shown in SEQ ID NOs: 2441-2442 (Table 11).

[0323] In an embodiment, the reference CARs for cross-competition studies against CSF2RA-targeting CARs of the invention are CARs having sequences as shown in SEQ ID NOs: 1040-1041 (Table 19).

[0324] In an embodiment, the reference scFvs for cross-competition studies against B7H4-targeting CARs of the invention (e.g., SEQ ID NOs: 2929-2930) are scFvs having sequences as shown in SEQ ID NOs: 2562-2563 (Table 11).

[0325] In an embodiment, the reference CARs for cross-competition studies against B7H4-targeting CARs of the invention are CARs having sequences as shown in SEQ ID NOs: 2929-2930 (Table 19).

[0326] In an embodiment, the reference scFv for cross-competition studies against a NY-BR1-targeting CAR (e.g., SEQ ID NO: 1131) is a scFv having sequence as shown in SEQ ID NO: 2512 (Table 11).

[0327] In an embodiment, the reference CAR for cross-competition studies against a NY-BR1-targeting CARs of the invention is a CAR having sequences as shown in SEQ ID NO: 1131 (Table 19).

[0328] In an embodiment, the reference scFv for cross-competition studies against a CD200R-targeting CAR (e.g., SEQ ID NO: 1190) is a scFv having sequence as shown in SEQ ID NO: 2568 (Table 11).

[0329] In an embodiment, the reference CAR for cross-competition studies against a CD200R-targeting CARs of the invention is a CAR having sequences as shown in SEQ ID NO: 1190 (Table 19).

[0330] In an embodiment, the reference scFv for cross-competition studies against a HIV1-envelop glycoprotein gp120-targeting CAR (e.g., SEQ ID NO: 945) is a scFv having sequence as shown in SEQ ID NO: 2512 (Table 11).

[0331] In an embodiment, the reference CAR for cross-competition studies against a HIV1-envelop glycoprotein gp120-targeting CAR of the invention is a CAR having sequences as shown in SEQ ID NO: 945 (Table 19).

[0332] In an embodiment, the reference ligand for cross-competition studies against a TSHR-targeting CAR (e.g., SEQ ID NOs: 1167) is a ligand having sequences as shown in SEQ ID NO: (Table 11).

[0333] In an embodiment, the reference scFvs for cross-competition studies against TSHR-targeting CARs of the invention (e.g., SEQ ID NOs: 1168-1170) are scFvs having sequences as shown in SEQ ID NOs: 2333 (Table 10).

[0334] In an embodiment, the reference CARs for cross-competition studies against TSHR-targeting CARs of the invention are CARs having sequences as shown in SEQ ID NOs: 1167-1170 (Table 19).

[0335] In some embodiment, the CARs targeting gp100, MART, Tyrosinase, hTERT, MUC1, CMV-pp65, HTLV1-Tax, HIV1-gag, NY-ESO, WT1, AFP, HPV-16-E7, PR1 bind to target peptides shown in Table 23 in complex with MEW class I (HLA-A2). Linkers

[0336] In some embodiments, two or more functional domains of the CARs as described herein, are separated by one or more linkers. Linkers are oligo- or polypeptides region from about 1 to 100 amino acids in length, that link together any of the domains/regions of the CAR of the invention. In some embodiments, the linkers may be for example, 5-12 amino acids in length, 5-15 amino acids in length or 5 to 20 amino acids in length. Linkers may be composed of flexible residues like glycine and serine so that the adjacent protein domains are free to move relative to one another. Longer linkers, for example those longer than 100 amino acids, may be used in connection with alternate embodiments of the invention, and may be selected to, for example, ensure that two adjacent domains do not sterically interfere with one another. In exemplary embodiments, linkers are described in SEQ ID NOs: 250-258 (Tables 5).

### Hinge Region

[0337] In some embodiments, the CARs (which form part of the backbones) described herein comprise a hinge region between the antigen specific domain and the transmembrane domain. In some embodiments, the hinge region comprises any one or more of human CD8a or an Fc fragment of an antibody or a functional equivalent, fragment or derivative thereof, a hinge region of human CD8a or an antibody or a functional equivalent, fragment or derivative thereof, a CH2 region of an antibody, a CH3 region of an antibody, an artificial spacer sequence and combinations thereof. In exemplary embodiments, the hinge region comprises any one or more of (i) a hinge, CH2 and CH3 region of IgG4, (ii) a hinge region of IgG4, (iii) a hinge and CH2 region of IgG4, (iv) a hinge region of CD8a, (v) a hinge, CH2 and CH3 region of IgG1, (vi) a hinge region of IgG1, (vi) a hinge and CH2 region of IgG1, or (vii) combinations thereof.

### Transmembrane Domain

[0338] As described herein, the CARs (which form part of the backbones) described herein comprise a transmembrane domain. The transmembrane domain may comprise the transmembrane sequence from any protein which has a transmembrane domain, including any of the type I, type II or type III transmembrane proteins. The transmembrane domain of the CAR of the invention may also comprise an artificial hydrophobic sequence. The transmembrane domains of the CARs described herein may be selected so that the transmembrane domain do not dimerize. In some embodiments, the TMD encoded CAR comprising any of the backbones described herein comprises a transmembrane domain selected from the transmembrane domain of an alpha, beta or zeta chain of a T-cell receptor, CD28, CD3 epsilon, CD45, CD4, CD5, CD8, CD9, CD16, CD22, CD33, CD37, CD64, CD80, CD86, CD134, CD137, CD154, KIRDS2, OX40, CD2, CD27, LFA-1 (CD1 1a, CD18), ICOS (CD278), 4-1BB (CD137), GITR, CD40, BAFFR, HVEM (LIGHTR), SLAMF7, NKp80 (KLRF1), CD160, CD19, IL2R beta, IL2R gamma, IL7R a, ITGA1, VLA1, CD49a, ITGA4, IA4, CD49D, ITGA6, VLA-6, CD49f, ITGAD, CD1 1d, ITGAE, CD103, ITGAL, CD1 1a, LFA-1, ITGAM, CD1 1b, ITGAX, CD1 lc, ITGB1, CD29, ITGB2, CD18, LFA-1, ITGB7, TNFR2, DNAM1(CD226), SLAMF4 (CD244, 2B4), CD84, CD96 (Tactile), CEACAM1, CRT AM, Ly9 (CD229), CD160 (BY55), PSGL1, CDIOO (SEMA4D), SLAMF6 (NTB-A, Ly108), SLAM (SLAMF1, CD150, IPO-3), BLAME (SLAMF8), SELPLG (CD162), LTBR, PAG/Cbp, NKp44, NKp30, NKp46, NKG2D, and/or NKG2C

[0339] A transmembrane domain can include one or more additional amino acids adjacent to the transmembrane region, e.g., one or more amino acid associated with the extracellular region of the protein from which the transmembrane was derived (e.g., 1, 2, 3, 4, 5, 6, 7, 8, 9, 10 up to 15 amino acids of the extracellular region) and/or one or more additional amino acids associated with the intracellular region of the protein from which the transmembrane protein is derived (e.g., 1, 2, 3, 4, 5, 6, 7, 8, 9, 10 up to 15 amino acids of the intracellular region). In one aspect, the transmembrane domain is contiguous with one of the other domains of the CAR. In one embodiment, the transmembrane domain may be from the same protein that the signaling domain, costimulatory domain or the hinge domain is derived from. In another aspect, the transmembrane domain is not derived from the same protein that any other domain of the CAR is derived from.

### Intracellular Signaling Domain of Chimeric Antigen Receptors

[0340] As described herein, the CARs (which form part of the backbones) described herein comprise an intracellular signaling domain. This domain may be cytoplasmic and may transduce the effector function signal and direct the cell to perform its specialized function. Examples of intracellular signaling domains include, but are not limited to, chain of the T-cell receptor or any of its homologs (e.g., η chain, FcεR1γ and β chains, MB1 (Igα) chain, B29 (Igβ) chain, etc.), CD3 polypeptides (Δ, δ and ε), syk family tyrosine kinases (Syk, ZAP 70, etc.), src family tyrosine kinases (Lck, Fyn, Lyn, etc.) and other molecules involved in T-cell transduction, such as CD2, CD5 and CD28. Specifically, the intracellular signaling domain may be human CD3 zeta chain, FcγRIII, FcεRI, cytoplasmic tails of Fc receptors, immunoreceptor tyrosine-based activation motif (ITAM) bearing cytoplasmic receptors or combinations thereof. Additional intracellular signaling domains will be apparent to those of skill in the art and may be used in connection with alternate embodiments of the invention. In some embodiments, the intracellular signaling domain comprises a signaling domain of one or more of a human CD3 zeta chain, FcgRIII, FceRI, a cytoplasmic tail of a Fc receptor, an immunoreceptor tyrosine-based activation motif (ITAM) bearing cytoplasmic receptors, and combinations thereof.

### Co-Stimulatory Domain

[0341] As described herein, the CARs (which form part of the backbones) described herein comprise a co-stimulatory domain. In exemplary embodiments, the co-stimulatory domain comprises a signaling domain from any one or more of CD28, CD137 (4-1BB), CD134 (OX40), Dap10, CD27, CD2, CD5, ICAM-1, LFA-1, Lck, TNFR-I, TNFR-II, Fas, CD30, CD40 and combinations thereof.

### Cleavable Linkers

[0342] Cleavable linkers as described herein include 2A linkers (for example T2A), 2A-like linkers or functional equivalents thereof and combinations thereof. In some embodiments, the linkers include the picornaviral 2A-like linker, CHYSEL sequences of porcine teschovirus (P2A), Thosea asigna virus (T2A) or combinations, variants and functional equivalents thereof. In other embodiments, the linker sequences may comprise Asp-Val/Ile-Glu-X-Asn-Pro-Gly^{(2A)}-Pro^{(2B)} motif, which results in cleavage between the 2A glycine and the 2B proline. The nucleic sequences of several exemplary cleavable linkers are provided in SEQ ID NO: 831 to SEQ ID NO: 836 and amino acid sequences of several exemplary linkers are provided in SEQ ID NO: 2598 to SEQ ID NO: 2602. Other linkers will be apparent to those of skill in the art and may be used in connection with alternate embodiments of the invention. In an embodiment, a Ser-Gly-Ser-Gly (SGSG) motif (SEQ ID NOs: 837-838 and SEQ ID NO: 2603) is also added upstream of the cleavable linker sequences to enhance the efficiency of cleavage. A potential drawback of the cleavable linkers is the possibility that the small 2A tag left at the end of the N-terminal protein may affect protein function or contribute to the antigenicity of the proteins. To overcome this limitation, in some embodiments, a furine cleavage site (RAKR) (SEQ ID NO: 839-841 and SEQ ID NO: 2604) is added upstream of the SGSG motifs to facilitate cleavage of the residual 2A peptide following translation. In an embodiment, cleavable linkers are placed between the polypeptide encoding the CAR and the polypeptide encoding the accessory modules. The cleavage at the site of cleavable linker results in separation of the two polypeptides.

### Accessory Modules

[0343] “Accessory modules” as used herein refer to agents that enhance, reduce or modify the activity of T cells expressing the CARs or reduce toxicity associated with CARs so that the therapeutic response of the CARs is enhanced.

[0344] In some embodiments, vectors comprising polynucleotides encoding CARs further comprise polynucleotides encoding viral and cellular signaling proteins which (i) extend the life span of T cells expressing the CARs, (ii) stimulate T cell proliferation and/or (iii) protect T cells expressing the CARs from apoptosis. In exemplary embodiments, such proteins include but are not limited to vFLIP-K13 from Kaposi's sarcoma associated herpes virus (SEQ ID NO: 866), MC159 from molluscum contagiosum virus (SEQ ID NO: 867), cFLIP-L/MRITα (SEQ ID NO: 873), cFLIP-p22 (SEQ ID NO: 874) and Tax from human T cell leukemia/lymphoma virus (HTLV-1 and HTLV-2) (SEQ ID NOs: 875 and SEQ ID NO: 876) and Tax-RS mutant from HTLV-2 (SEQ ID NO: 877).

[0345] In one embodiment, vectors encoding CARs further encode vFLIP-K13. In another embodiment, vectors encoding CARs further encode MC159. In another embodiment, vectors encoding CARs further encode HTLV1-Tax. In another embodiment, vectors encoding CARs further encode HTLV2-Tax. In another embodiment, vectors encoding CARs further encode cFLIP-L/MRITα.

[0346] In some embodiments, the accessory molecules are encoded by vectors that are distinct from the vectors encoding by the CARs described herein. In some embodiments, effector cells comprising vectors encoding CARs also comprise vectors encoding accessory molecules.

[0347] In some embodiments, vectors comprising polynucleotides encoding CARs further express accessory molecule vFLIP MC160 from molluscum contagiosum virus, vFLIP E8 from equine herpes virus 2, vFLIP from human herpes virus saimiri, vFLIP from bovine herpes virus (BHV) 4, vFLIP from mecaca herpes virus and/or full length or N-terminal fragment of human cellular FLICE inhibitory protein (cFLIP-L/MRITα or cFLIP-p22). (Table 16).

[0348] In some embodiments, vectors comprising polynucleotides encoding CARs further comprise polynucleotides encoding siRNA or scFv specific for cytokines. In exemplary embodiments, the cytokines are any one or more of IL-10, IL-6, IFNγ or combinations thereof. In some embodiment, the CARs are co-expressed with a secreted bispecific antibody fragment that binds to IL6 receptor α and human serum albumin. In some embodiment, the CARs are co-expressed with a secreted scFv fragment that binds to IL6. In some embodiments, the CARs are coexpressed with the peptide FX06 so as to mitigate capillary leak associated with CAR therapy.

[0349] In further embodiments, vectors comprising polynucleotides encoding CARs further comprise polynucleotides encoding siRNA or a nuclease targeting the endogenous TCR-a, TCR-β, TCR-γ, TCR-delta, CD3gamma, CD3zeta, CD3epsilon, CD3-delta.

[0350] In further embodiments, vectors comprising polynucleotides encoding CARs further comprise polynucleotides encoding a selectable marker. In exemplary embodiment, the selectable marker can encode a drug resistance gene, such as gene that confers resistance to puromycin or calcineurin inhibitors (e.g. CNB30; SEQ ID NO: 852). In some embodiment, the selectable marker may encode for extracellular and transmembrane domains of human CD30, CD20, CD19 (SEQ ID NO: 854), BCMA (SEQ ID NO: 855), EGFR (SEQ ID NO: 853), CD34, or any protein or protein fragment that is expressed on cell surface and can be recognized by an antibody that can be used to eliminate cells expressing its target antigen. In an exemplary embodiment, cetuximab, an anti-EGFR monoclonal is used to eliminate CAR-expressing cells of the invention which coexpress a truncated EGFR (SEQ ID NO: 853). The selectable marker(s) can be used to enrich for cells expressing the CAR, to select for cells that express high levels of CAR and/or to reduce the clonal diversity of the cells expressing the CAR. In further embodiments, polynucleotides encoding CARs may encode for epitope tags that are expressed on the extracellular domain of the CARs and can be used to enrich for cells expressing the CAR, to select for cells that express high levels of CAR and/or to reduce the clonal diversity of the cells expressing the CAR. Non-limiting examples of such tags are provided in SEQ ID NOs: 553-563 and 3526-3530 (Table 12). Reducing the clonal diversity of allogeneic T cells expressing the CARs will in turn lead to reduced incidence of Graft versus Host Disease (GVHD), thereby allowing the use of allogeneic T cells for CAR-T cell therapy.

### Polynucleotides and Polypeptides

[0351] Provided herein are one or more polypeptides encoded by one or more nucleic acid molecules encoding conventional CARs I to III or any one or more of backbones 1-62 described herein (Table 2).

[0352] Also provided herein are one or more polypeptides encoded by one or more nucleic acid molecules encoding conventional CARs I to III. In some embodiments, the antigen-specific domain of the CARs is specific to one, two, three or more antigens on target cells, such as cancer cells. As described herein, each component of the CAR is contiguous and in the same reading frame with each other components of the CAR. In some embodiments, in the CAR comprising backbone comprises more than one antigen specific domain, each of the antigen specific domains are contiguous and in the same reading frame as the other antigen specific domains in the same CAR.

[0353] Also provided herein are one or more polypeptides encoded by one or more nucleic acid molecules encoding backbone-1 comprising conventional CAR I and K13-vFLIP as described herein. In some embodiments, the antigen-specific domain of the CAR comprising backbone-1 is specific to one, two, three or more antigens on target cells, such as cancer cells. As described herein, each component of the CAR is contiguous and in the same reading frame with each other components of the CAR comprising backbone-1. In some embodiments, in the CAR comprising backbone-1 comprises more than one antigen specific domain, each of the antigen specific domains are contiguous and in the same reading frame as the other antigen specific domains in the same CAR.

[0354] Also provided herein are one or more polypeptides encoded by one or more nucleic acid molecules encoding backbone-32 which comprises conventional CAR II and K13-vFLIP as described herein. In some embodiments, the antigen-specific domain of the CAR comprising backbone-32 is specific to one, two, three or more antigens on target cells, such as cancer cells. As described herein, each component of the CAR is contiguous and in the same reading frame with each other components of the CAR. In some embodiments, in the CAR comprising backbone-32 comprises more than one antigen specific domain, each of the antigen specific domains are contiguous and in the same reading frame as the other antigen specific domains in the same CAR.

[0355] In various embodiments, the polypeptides encoded by the nucleic acid molecules encoding CARs which are part of conventional CARs I to III or part of the backbones described herein, such as backbone-1, backbone-2, backbone-32 or backbone-33, comprise two, three or more antigen specific domains.

[0356] In various embodiments, the polypeptides encoded by the nucleic acid molecules encoding CARs which are part of conventional CARs I to III or part of the backbones described herein, such as backbone-1, backbone-2, backbone-32 or backbone-33, comprise two, three or more co-stimulatory domains.

[0357] In various embodiments, the polypeptides encoded by the nucleic acid molecules encoding CARs which are part of conventional CARs I to III or part of the backbones described herein, such as backbone-1, backbone-2, backbone-32 or backbone-33, comprise two, three or more intracellular signaling domain.

[0358] In various embodiments, the polypeptides encoded by the nucleic acid molecules encoding CARs which are part of the backbones described herein, such as backbone-1, backbone-2, backbone-32 or backbone-33, comprise one, two, three or more viral and/or cellular signaling proteins.

[0359] The nucleic acid sequences encoding for the desired components of the CARs described herein can be obtained using recombinant methods known in the art, such as, for example by screening libraries from cells expressing the nucleic acid molecule, by deriving the nucleic acid molecule from a vector known to include the same, or by isolating directly from cells and tissues containing the same, using standard techniques. Alternatively, the nucleic acid of interest can be produced synthetically, rather than cloned.

[0360] In some embodiments, provided herein are polypeptides encoded by the nucleic acid molecules encoding CARs which are part of the conventional CARs I to III or are part of backbones described herein, such as backbone-1, backbone-2, backbone-32 or backbone-33, wherein the antigen-specific domain of the CARs is specific to target as described in Tables 19-22.

[0361] In one embodiment, an antigen specific domain of a CAR against a target antigen is an antigen binding portion, e.g., CDRs, of vL and vH fragments targeting this antigen as shown in Tables 4 and 6, respectively.

[0362] In one embodiment, an antigen specific domain of a CAR against a target antigen is an antigen binding portion, e.g., CDRs, of vHH fragments targeting this antigen as shown in Table 7.

[0363] In one embodiment, an antigen specific domain of a CAR against a target antigen is an antigen binding portion of a non-immunoglobulin scaffold targeting this antigen as shown in Table 8.

[0364] In one embodiment, an antigen specific domain of a CAR against a target antigen is an antigen binding portion of a receptor known to bind this target antigen.

[0365] In one embodiment, an antigen binding specific domain of a CAR against a target antigen is an antigen binding portion of a ligand known to bind this target antigen.

[0366] In one embodiment, an antigen specific domain of a CAR against a target antigen is an antigen binding portion, e.g., CDRs, of vL and vH fragments of a scFV targeting this antigen as shown in Table 11.

[0367] In some embodiments, provided herein are polypeptides encoded by the nucleic acid molecules encoding CARs which are part of the conventional CARs I to III or are part of backbones described herein, such as backbone-1, backbone-2, backbone-32 or backbone-33, wherein the antigen-specific domain of the CARs is specific to the targets described in Tables 19-22.

[0368] In some embodiments, provided herein are polypeptides encoded by the nucleic acid molecules encoding CARs which are part of the conventional CARs I to III or are part of the backbones described herein, such as backbone-1, backbone-2, backbone-32 or backbone-33, wherein the antigen-specific domain of the CARs is specific to the thrombopoietin receptor, MPL.

[0369] In some embodiments, provided herein are polypeptides encoded by the nucleic acid molecules encoding CARs which are part of the conventional CARs I to III or are part of backbones described herein, such as backbone-1, backbone-2, backbone-32 or backbone-33, wherein the antigen-specific domain of the CARs is specific to CD19.

[0370] In some embodiments, provided herein are polypeptides encoded by the nucleic acid molecules encoding CARs which are part of the conventional CARs I to III or are part of backbones described herein, such as backbone-1, backbone-2, backbone-32 or backbone-33, wherein the antigen-specific domain of the CARs is specific to CD20.

[0371] In some embodiments, provided herein are polypeptides encoded by the nucleic acid molecules encoding CARs which are part of the conventional CARs I to III or are part of backbones described herein, such as backbone-1, backbone-2, backbone-32 or backbone-33, wherein the antigen-specific domain of the CARs is specific to CD22.

[0372] In some embodiments, provided herein are polypeptides encoded by the nucleic acid molecules encoding CARs which are part of the conventional CARs I to III or are part of backbones described herein, such as backbone-1, backbone-2, backbone-32 or backbone-33, wherein the antigen-specific domain of the CARs is specific to CD23

[0373] In some embodiments, provided herein are polypeptides encoded by the nucleic acid molecules encoding CARs which are part of the conventional CARs I to III or are part of backbones described herein, such as backbone-1, backbone-2, backbone-32 or backbone-33, wherein the antigen-specific domain of the CARs is specific to CD30.

[0374] In some embodiments, provided herein are polypeptides encoded by the nucleic acid molecules encoding CARs which are part of the conventional CARs I to III or are part of backbones described herein, such as backbone-1, backbone-2, backbone-32 or backbone-33, wherein the antigen-specific domain of the CARs is specific to CD32.

[0375] In some embodiments, provided herein are polypeptides encoded by the nucleic acid molecules encoding CARs which are part of the conventional CARs I to III or are part of backbones described herein, such as backbone-1, backbone-2, backbone-32 or backbone-33, wherein the antigen-specific domain of the CARs is specific to CD33.

[0376] In some embodiments, provided herein are polypeptides encoded by the nucleic acid molecules encoding CARs which are part of the conventional CARs I to III or are part of backbones described herein, such as backbone-1, backbone-2, backbone-32 or backbone-33, wherein the antigen-specific domain of the CARs is specific to CD123.

[0377] In some embodiments, provided herein are polypeptides encoded by the nucleic acid molecules encoding CARs which are part of the conventional CARs I to III or are part of backbones described herein, such as backbone-1, backbone-2, backbone-32 or backbone-33, wherein the antigen-specific domain of the CARs is specific to CD138.

[0378] In some embodiments, provided herein are polypeptides encoded by the nucleic acid molecules encoding CARs which are part of the conventional CARs I to III or are part of backbones described herein, such as backbone-1, backbone-2, backbone-32 or backbone-33, wherein the antigen-specific domain of the CARs is specific to CD200R.

[0379] In some embodiments, provided herein are polypeptides encoded by the nucleic acid molecules encoding CARs which are part of the conventional CARs I to III or are part of backbones described herein, such as backbone-1, backbone-2, backbone-32 or backbone-33, wherein the antigen-specific domain of the CARs is specific to CD276.

[0380] In some embodiments, provided herein are polypeptides encoded by the nucleic acid molecules encoding CARs which are part of the conventional CARs I to III or are part of backbones described herein, such as backbone-1, backbone-2, backbone-32 or backbone-33, wherein the antigen-specific domain of the CARs is specific to CD324.

[0381] In some embodiments, provided herein are polypeptides encoded by the nucleic acid molecules encoding CARs which are part of the conventional CARs I to III or are part of backbones described herein, such as backbone-1, backbone-2, backbone-32 or backbone-33, wherein the antigen-specific domain of the CARs is specific to BCMA.

[0382] In some embodiments, provided herein are polypeptides encoded by the nucleic acid molecules encoding CARs which are part of the conventional CARs I to III or are part of backbones described herein, such as backbone-1, backbone-2, backbone-32 or backbone-33, wherein the antigen-specific domain of the CARs is specific to CS1.

[0383] In some embodiments, provided herein are polypeptides encoded by the nucleic acid molecules encoding CARs which are part of the conventional CARs I to III or are part of backbones described herein, such as backbone-1, backbone-2, backbone-32 or backbone-33, wherein the antigen-specific domain of the CARs is specific to ALK1.

[0384] In some embodiments, provided herein are polypeptides encoded by the nucleic acid molecules encoding CARs which are part of the conventional CARs I to III or are part of backbones described herein, such as backbone-1, backbone-2, backbone-32 or backbone-33, wherein the antigen-specific domain of the CARs is specific to ROR1.

[0385] In some embodiments, provided herein are polypeptides encoded by the nucleic acid molecules encoding CARs which are part of the conventional CARs I to III or are part of backbones described herein, such as backbone-1, backbone-2, backbone-32 or backbone-33, wherein the antigen-specific domain of the CARs is specific to CDH6

[0386] In some embodiments, provided herein are polypeptides encoded by the nucleic acid molecules encoding CARs which are part of the conventional CARs I to III or are part of backbones described herein, such as backbone-1, backbone-2, backbone-32 or backbone-33, wherein the antigen-specific domain of the CARs is specific to CDH16.

[0387] In some embodiments, provided herein are polypeptides encoded by the nucleic acid molecules encoding CARs which are part of the conventional CARs I to III or are part of backbones described herein, such as backbone-1, backbone-2, backbone-32 or backbone-33, wherein the antigen-specific domain of the CARs is specific to CDH17.

[0388] In some embodiments, provided herein are polypeptides encoded by the nucleic acid molecules encoding CARs which are part of the conventional CARs I to III or are part of backbones described herein, such as backbone-1, backbone-2, backbone-32 or backbone-33, wherein the antigen-specific domain of the CARs is specific to CDH19.

[0389] In some embodiments, provided herein are polypeptides encoded by the nucleic acid molecules encoding CARs which are part of the conventional CARs I to III or are part of backbones described herein, such as backbone-1, backbone-2, backbone-32 or backbone-33, wherein the antigen-specific domain of the CARs is specific to EGFRviii.

[0390] In some embodiments, provided herein are polypeptides encoded by the nucleic acid molecules encoding CARs which are part of the conventional CARs I to III or are part of backbones described herein, such as backbone-1, backbone-2, backbone-32 or backbone-33, wherein the antigen-specific domain of the CARs is specific to Her2.

[0391] In some embodiments, provided herein are polypeptides encoded by the nucleic acid molecules encoding CARs which are part of the conventional CARs I to III or are part of backbones described herein, such as backbone-1, backbone-2, backbone-32 or backbone-33, wherein the antigen-specific domain of the CARs is specific to Her3.

[0392] In some embodiments, provided herein are polypeptides encoded by the nucleic acid molecules encoding CARs which are part of the conventional CARs I to III or are part of backbones described herein, such as backbone-1, backbone-2, backbone-32 or backbone-33, wherein the antigen-specific domain of the CARs is specific to Mesothelin.

[0393] In some embodiments, provided herein are polypeptides encoded by the nucleic acid molecules encoding CARs which are part of the conventional CARs I to III or are part of backbones described herein, such as backbone-1, backbone-2, backbone-32 or backbone-33, wherein the antigen-specific domain of the CARs is specific to Folate Receptor alpha.

[0394] In some embodiments, provided herein are polypeptides encoded by the nucleic acid molecules encoding CARs which are part of the conventional CARs I to III or are part of backbones described herein, such as backbone-1, backbone-2, backbone-32 or backbone-33, wherein the antigen-specific domain of the CARs is specific to Folate Receptor beta.

[0395] In some embodiments, provided herein are polypeptides encoded by the nucleic acid molecules encoding CARs which are part of the conventional CARs I to III or are part of backbones described herein, such as backbone-1, backbone-2, backbone-32 or backbone-33, wherein the antigen-specific domain of the CARs is specific to CLL-1.

[0396] In some embodiments, provided herein are polypeptides encoded by the nucleic acid molecules encoding CARs which are part of the conventional CARs I to III or are part of backbones described herein, such as backbone-1, backbone-2, backbone-32 or backbone-33, wherein the antigen-specific domain of the CARs is specific to CLEC5A.

[0397] In some embodiments, provided herein are polypeptides encoded by the nucleic acid molecules encoding CARs which are part of the conventional CARs I to III or are part of backbones described herein, such as backbone-1, backbone-2, backbone-32 or backbone-33, wherein the antigen-specific domain of the CARs is specific to NY-ESO/MHC class I complex.

[0398] In some embodiments, provided herein are polypeptides encoded by the nucleic acid molecules encoding CARs which are part of the conventional CARs I to III or are part of backbones described herein, such as backbone-1, backbone-2, backbone-32 or backbone-33, wherein the antigen-specific domain of the CARs is specific to WT1/MHC class I complex.

[0399] In some embodiments, provided herein are polypeptides encoded by the nucleic acid molecules encoding CARs which are part of the conventional CARs I to III or are part of backbones described herein, such as backbone-1, backbone-2, backbone-32 or backbone-33, wherein the antigen-specific domain of the CARs is specific to WT1/MHC class I complex.

[0400] In some embodiments, provided herein are polypeptides encoded by the nucleic acid molecules encoding CARs which are part of the conventional CARs I to III or are part of backbones described herein, such as backbone-1, backbone-2, backbone-32 or backbone-33, wherein the antigen-specific domain of the CARs is specific to AFP/MHC class I complex.

[0401] In some embodiments, provided herein are polypeptides encoded by the nucleic acid molecules encoding CARs which are part of the conventional CARs I to III or are part of backbones described herein, such as backbone-1, backbone-2, backbone-32 or backbone-33, wherein the antigen-specific domain of the CARs is specific to HPV16-E7/MHC class I complex.

[0402] In some embodiments, provided herein are polypeptides encoded by the nucleic acid molecules encoding CARs which are part of the conventional CARs I to III or are part of backbones described herein, such as backbone-1, backbone-2, backbone-32 or backbone-33, wherein the antigen-specific domain of the CARs is specific to gp100/MHC class I complex.

[0403] In some embodiments, provided herein are polypeptides encoded by the nucleic acid molecules encoding CARs which are part of the conventional CARs I to III or are part of backbones described herein, such as backbone-1, backbone-2, backbone-32 or backbone-33, wherein the antigen-specific domain of the CARs is specific to hTERT/MHC class I complex.

[0404] In some embodiments, provided herein are polypeptides encoded by the nucleic acid molecules encoding CARs which are part of the conventional CARs I to III or are part of backbones described herein, such as backbone-1, backbone-2, backbone-32 or backbone-33, wherein the antigen-specific domain of the CARs is specific to MART1/MHC class I complex.

[0405] In some embodiments, provided herein are polypeptides encoded by the nucleic acid molecules encoding CARs which are part of the conventional CARs I to III or are part of backbones described herein, such as backbone-1, backbone-2, backbone-32 or backbone-33, wherein the antigen-specific domain of the CARs is specific to HTLV1-Tax/MHC class I complex.

[0406] In some embodiments, provided herein are polypeptides encoded by the nucleic acid molecules encoding CARs which are part of the conventional CARs I to III or are part of backbones described herein, such as backbone-1, backbone-2, backbone-32 or backbone-33, wherein the antigen-specific domain of the CARs is specific to PR1/MHC class I complex.

[0407] In some embodiments, provided herein are polypeptides encoded by the nucleic acid molecules encoding CARs which are part of the conventional CARs I to III or are part of backbones described herein, such as backbone-1, backbone-2, backbone-32 or backbone-33, wherein the antigen-specific domain of the CARs is specific to HIV1-gag/MHC class I complex.

[0408] In some embodiments, provided herein are polypeptides encoded by the nucleic acid molecules encoding CARs which are part of the conventional CARs I to III or are part of backbones described herein, such as backbone-1, backbone-2, backbone-32 or backbone-33, wherein the antigen-specific domain of the CARs is specific to HIV1-envelop gp120.

[0409] In some embodiments, provided herein are polypeptides encoded by the nucleic acid molecules encoding CARs which are part of the conventional CARs I to III or are part of backbones described herein, such as backbone-1, backbone-2, backbone-32 or backbone-33, wherein the antigen-specific domain of the CARs is specific to DLL3.

[0410] In some embodiments, provided herein are polypeptides encoded by the nucleic acid molecules encoding CARs which are part of the conventional CARs I to III or are part of backbones described herein, such as backbone-1, backbone-2, backbone-32 or backbone-33, wherein the antigen-specific domain of the CARs is specific to PTK7.

[0411] In some embodiments, provided herein are polypeptides encoded by the nucleic acid molecules encoding CARs which are part of the conventional CARs I to III or are part of backbones described herein, such as backbone-1, backbone-2, backbone-32 or backbone-33, wherein the antigen-specific domain of the CARs is specific to TROP2.

[0412] In some embodiments, provided herein are polypeptides encoded by the nucleic acid molecules encoding CARs which are part of the conventional CARs I to III or are part of backbones described herein, such as backbone-1, backbone-2, backbone-32 or backbone-33, wherein the antigen-specific domain of the CARs is specific to LAMP1.

[0413] In some embodiments, provided herein are polypeptides encoded by the nucleic acid molecules encoding CARs which are part of the conventional CARs I to III or are part of backbones described herein, such as backbone-1, backbone-2, backbone-32 or backbone-33, wherein the antigen-specific domain of the CARs is specific to Tim1.

[0414] In some embodiments, provided herein are polypeptides encoded by the nucleic acid molecules encoding CARs which are part of the conventional CARs I to III or are part of backbones described herein, such as backbone-1, backbone-2, backbone-32 or backbone-33, wherein the antigen-specific domain of the CARs is specific to TCR gamma-delta.

[0415] In some embodiments, provided herein are polypeptides encoded by the nucleic acid molecules encoding CARs which are part of the conventional CARs I to III or are part of backbones described herein, such as backbone-1, backbone-2, backbone-32 or backbone-33, wherein the antigen-specific domain of the CARs is specific to TCR beta1 constant chain.

[0416] In some embodiments, provided herein are polypeptides encoded by the nucleic acid molecules encoding CARs which are part of the conventional CARs I to III or are part of backbones described herein, such as backbone-1, backbone-2, backbone-32 or backbone-33, wherein the antigen-specific domain of the CARs is specific to TCR beta2 constant chain.

[0417] In some embodiments, provided herein are polypeptides encoded by the nucleic acid molecules encoding CARs which are part of the conventional CARs I to III or are part of backbones described herein, such as backbone-1, backbone-2, backbone-32 or backbone-33, wherein the antigen-specific domain of the CARs is specific to GCC.

[0418] In some embodiments, provided herein are polypeptides encoded by the nucleic acid molecules encoding CARs which are part of the conventional CARs I to III or are part of backbones described herein, such as backbone-1, backbone-2, backbone-32 or backbone-33, wherein the antigen-specific domain of the CARs is specific to B7H4.

[0419] In some embodiments, provided herein are polypeptides encoded by the nucleic acid molecules encoding CARs which are part of the conventional CARs I to III or are part of backbones described herein, such as backbone-1, backbone-2, backbone-32 or backbone-33, wherein the antigen-specific domain of the CARs is specific to LHR.

[0420] In some embodiments, provided herein are polypeptides encoded by the nucleic acid molecules encoding CARs which are part of the conventional CARs I to III or are part of backbones described herein, such as backbone-1, backbone-2, backbone-32 or backbone-33, wherein the antigen-specific domain of the CARs is specific to TSHR.

[0421] In some embodiments, provided herein are polypeptides encoded by the nucleic acid molecules encoding CARs which are part of the conventional CARs I to III or are part of backbones described herein, such as backbone-1, backbone-2, backbone-32 or backbone-33, wherein the antigen-specific domain of the CARs is specific to Tn-Muc1.

[0422] In some embodiments, provided herein are polypeptides encoded by the nucleic acid molecules encoding CARs which are part of the conventional CARs I to III or are part of backbones described herein, such as backbone-1, backbone-2, backbone-32 or backbone-33, wherein the antigen-specific domain of the CARs is specific to TSLPR.

[0423] In some embodiments, provided herein are polypeptides encoded by the nucleic acid molecules encoding CARs which are part of the conventional CARs I to III or are part of backbones described herein, such as backbone-1, backbone-2, backbone-32 or backbone-33, wherein the antigen-specific domain of the CARs is specific to Tissue Factor.

[0424] In some embodiments, provided herein are polypeptides encoded by the nucleic acid molecules encoding CARs which are part of the conventional CARs I to III or are part of backbones described herein, such as backbone-1, backbone-2, backbone-32 or backbone-33, wherein the antigen-specific domain of the CARs is specific to SSEA-4.

[0425] In some embodiments, provided herein are polypeptides encoded by the nucleic acid molecules encoding CARs which are part of the conventional CARs I to III or are part of backbones described herein, such as backbone-1, backbone-2, backbone-32 or backbone-33, wherein the antigen-specific domain of the CARs is specific to SLea.

[0426] In some embodiments, provided herein are polypeptides encoded by the nucleic acid molecules encoding CARs which are part of the conventional CARs I to III or are part of backbones described herein, such as backbone-1, backbone-2, backbone-32 or backbone-33, wherein the antigen-specific domain of the CARs is specific to Muc1/MHC class I complex.

[0427] In some embodiments, provided herein are polypeptides encoded by the nucleic acid molecules encoding CARs which are part of the conventional CARs I to III or are part of backbones described herein, such as backbone-1, backbone-2, backbone-32 or backbone-33, wherein the antigen-specific domain of the CARs is specific to Muc16.

[0428] In some embodiments, provided herein are polypeptides encoded by the nucleic acid molecules encoding CARs which are part of the conventional CARs I to III or are part of backbones described herein, such as backbone-1, backbone-2, backbone-32 or backbone-33, wherein the antigen-specific domain of the CARs is specific to NYBR-1.

[0429] In some embodiments, provided herein are polypeptides encoded by the nucleic acid molecules encoding CARs which are part of the conventional CARs I to III or are part of backbones described herein, such as backbone-1, backbone-2, backbone-32 or backbone-33, wherein the antigen-specific domain of the CARs is specific to IL13Ra2.

[0430] In some embodiments, provided herein are polypeptides encoded by the nucleic acid molecules encoding CARs which are part of the conventional CARs I to III or are part of backbones described herein, such as backbone-1, backbone-2, backbone-32 or backbone-33, wherein the antigen-specific domain of the CARs is specific to IL11Ra.

[0431] In some embodiments, provided herein are polypeptides encoded by the nucleic acid molecules encoding CARs which are part of the conventional CARs I to III or are part of backbones described herein, such as backbone-1, backbone-2, backbone-32 or backbone-33, wherein the antigen-specific domain of the CARs is specific to L1 CAM.

[0432] In some embodiments, provided herein are polypeptides encoded by the nucleic acid molecules encoding CARs which are part of the conventional CARs I to III or are part of backbones described herein, such as backbone-1, backbone-2, backbone-32 or backbone-33, wherein the antigen-specific domain of the CARs is specific to EpCAM1.

[0433] In some embodiments, provided herein are polypeptides encoded by the nucleic acid molecules encoding CARs which are part of the conventional CARs I to III or are part of backbones described herein, such as backbone-1, backbone-2, backbone-32 or backbone-33, wherein the antigen-specific domain of the CARs is specific to gpNMB.

[0434] In some embodiments, provided herein are polypeptides encoded by the nucleic acid molecules encoding CARs which are part of the conventional CARs I to III or are part of backbones described herein, such as backbone-1, backbone-2, backbone-32 or backbone-33, wherein the antigen-specific domain of the CARs is specific to GRP78.

[0435] In some embodiments, provided herein are polypeptides encoded by the nucleic acid molecules encoding CARs which are part of the conventional CARs I to III or are part of backbones described herein, such as backbone-1, backbone-2, backbone-32 or backbone-33, wherein the antigen-specific domain of the CARs is specific to GPC3.

[0436] In some embodiments, provided herein are polypeptides encoded by the nucleic acid molecules encoding CARs which are part of the conventional CARs I to III or are part of backbones described herein, such as backbone-1, backbone-2, backbone-32 or backbone-33, wherein the antigen-specific domain of the CARs is specific to GRPC5D.

[0437] In some embodiments, provided herein are polypeptides encoded by the nucleic acid molecules encoding CARs which are part of the conventional CARs I to III or are part of backbones described herein, such as backbone-1, backbone-2, backbone-32 or backbone-33, wherein the antigen-specific domain of the CARs is specific to GFRa4.

[0438] In some embodiments, provided herein are polypeptides encoded by the nucleic acid molecules encoding CARs which are part of the conventional CARs I to III or are part of backbones described herein, such as backbone-1, backbone-2, backbone-32 or backbone-33, wherein the antigen-specific domain of the CARs is specific to FITC.

[0439] In some embodiments, provided herein are polypeptides encoded by the nucleic acid molecules encoding CARs which are part of the conventional CARs I to III or are part of backbones described herein, such as backbone-1, backbone-2, backbone-32 or backbone-33, wherein the antigen-specific domain of the CARs is specific to CD79b.

[0440] In some embodiments, provided herein are polypeptides encoded by the nucleic acid molecules encoding CARs which are part of the conventional CARs I to III or are part of backbones described herein, such as backbone-1, backbone-2, backbone-32 or backbone-33, wherein the antigen-specific domain of the CARs is specific to Lym1.

[0441] In some embodiments, provided herein are polypeptides encoded by the nucleic acid molecules encoding CARs which are part of the conventional CARs I to III or are part of backbones described herein, such as backbone-1, backbone-2, backbone-32 or backbone-33, wherein the antigen-specific domain of the CARs is specific to Lym2.

[0442] In some embodiments, provided herein are polypeptides encoded by the nucleic acid molecules encoding CARs which are part of the conventional CARs I to III or are part of backbones described herein, such as backbone-1, backbone-2, backbone-32 or backbone-33, wherein the antigen-specific domain of the CARs is specific to Fc portion of an antibody (i.e. Ig Fc). An exemplary CAR with the antigen-specific domain specific to Ig Fc is represented by SEQ ID NO: 2708 and contains the extracellular domain of CD16-V158 as the antigen specific domain.

[0443] In some embodiments, the nucleic acid molecule encoding the CARs and/or accessory molecules described herein is provided as a messenger RNA (mRNA) transcript. In another embodiment, the nucleic acid molecule encoding the CARs and/or accessory molecules described herein is provided as a DNA construct.

[0444] Also provided herein are vectors comprising the polynucleotides described herein. In some embodiments, the vectors are viral vectors. Examples of viral vectors include but are not limited to retrovirus, an adenovirus, an adeno-associated virus, a lentivirus, a pox virus, a herpes virus vector or a sleeping beauty transposon vector. In various embodiments, the present invention includes retroviral and lentiviral vector constructs expressing the CAR and the accessory molecules that can be directly transduced into a cell.

[0445] The present invention also includes an RNA construct that can be directly transfected into a cell. A method for generating mRNA for use in transfection involves in vitro transcription (IVT) of a template with specially designed primers, followed by polyA addition, to produce a construct containing 3′ and 5′ untranslated sequence (“UTR”) (e.g., a 3′ and/or 5′ UTR described herein), a 5′ cap (e.g., a 5′ cap described herein) and/or Internal Ribosome Entry Site (IRES) (e.g., an IRES described herein), the nucleic acid to be expressed, and a polyA tail, typically 50-2000 bases in length (SEQ ID NO:922). RNA so produced can efficiently transfect different kinds of cells. In one embodiment, the template includes sequences for the CAR. In an embodiment, an RNA CAR vector is transduced into a cell, e.g., a T cell or a NK cell, by electroporation. In another embodiment, an RNA CAR vector is transduced into a cell, e.g., a T cell or a NK cell, by causing transient perturbations in cell membrane using a microfluid device as described in patent application WO 2013/059343 A1 (PCT/US2012/060646). The polynucleotide sequences coding for the desired molecules can be obtained using recombinant methods known in the art, for example by screening libraries from cells expressing the gene, by deriving the gene from a vector known to include the same, or by isolating directly from cells and tissues containing the same, using standard techniques. Alternatively, the gene of interest can be produced synthetically, rather than cloned.

[0446] The present invention also provides vectors in which a DNA encoding the CARs of the present invention is inserted. Vectors derived from retroviruses such as the lentivirus are suitable tools to achieve long-term gene transfer since they allow long-term, stable integration of a transgene and its propagation in daughter cells. Lentiviral vectors have the added advantage over vectors derived from onco-retroviruses such as murine leukemia viruses in that they can transduce non-proliferating cells, such as hepatocytes. They also have the added advantage of low immunogenicity. Exemplary lentiviral vectors are provided in SEQ ID NOs: 905-906. A retroviral vector may also be, e.g., a gammaretroviral vector. A gammaretroviral vector may include, e.g., a promoter, a packaging signal (w), a primer binding site (PBS), one or more (e.g., two) long terminal repeats (LTR), and a transgene of interest, e.g., a gene encoding a CAR. A gammaretroviral vector may lack viral structural gens such as gag, pol, and env. Exemplary gammaretroviral vectors include Murine Leukemia Virus (MLV), Spleen-Focus Forming Virus (SFFV), and Myeloproliferative Sarcoma Virus (MPSV), and vectors derived therefrom. Other gammaretroviral vectors are described, e.g., in Tobias Maetzig et al., “Gammaretroviral Vectors: Biology, Technology and Application” Viruses. 2011 June; 3(6): 677-713. An exemplary retroviral vector is provided in SEQ ID NO: 907. In another embodiment, the vector comprising the nucleic acid encoding the desired CAR of the invention is an adenoviral vector (A5/35).

[0447] The expression of natural or synthetic nucleic acids encoding CARs is typically achieved by operably linking a nucleic acid encoding the CAR polypeptide or portions thereof to a promoter, and incorporating the construct into an expression vector. The vectors can be suitable for replication and integration eukaryotes. Typical cloning vectors contain transcription and translation terminators, initiation sequences, and promoters useful for regulation of the expression of the desired nucleic acid sequence. The expression constructs of the present invention may also be used for nucleic acid immunization and gene therapy, using standard gene delivery protocols. Methods for gene delivery are known in the art. See, e.g., U.S. Pat. Nos. 5,399,346, 5,580,859, 5,589,466, incorporated by reference herein in their entireties.

[0448] Cloning and expression methods will be apparent to a person of skill in the art and may be as described in WO 2015/142675; Sambrook et al., 2012, MOLECULAR CLONING: A LABORATORY MANUAL, volumes 1-4, Cold Spring Harbor Press, NY; June et al. 2009 Nature Reviews Immunology 9.10: 704-716; WO 01/96584; WO 01/29058; U.S. Pat. No. 6,326,193, the contents of each of which are herein incorporated by reference in their entirety as though set forth herein.

[0449] Physical methods for introducing polynucleotides of into host cells such as calcium phosphate transfection and the like are well known in the art and will be apparent to a person of skill in the art. In exemplary embodiments, such methods are set forth in Sambrook et al., 2012, MOLECULAR CLONING: A LABORATORY MANUAL, volumes 1-4, Cold Spring Harbor Press, NY); U.S. Pat. Nos. 5,350,674 and 5,585,362, the contents of each of which are herein incorporated by reference in their entirety as though set forth herein. In another embodiment, a CAR vector is transduced into a cell, e.g., a T cell or a NK cell, by causing transient perturbations in cell membrane using a microfluid device as described in patent application WO 2013/059343 A1 (PCT/US2012/060646) and in Ding X et al, Nat. Biomed. Eng. 1, 0039 (2017) the contents of each of which are herein incorporated by reference in their entirety as though set forth herein.

### Genetically Engineered Cells

[0450] In various embodiments, the cells for modifications with CARs described herein, including T cells or NK cells may be obtained from a subject desiring therapy. T cells can be obtained from a number of sources, including peripheral blood mononuclear cells, bone marrow, lymph node tissue, cord blood, thymus tissue, tissue from a site of infection, ascites, pleural effusion, spleen tissue, and tumors. T cells could be tissue resident gamma-delta T cells, which can be cultured and expanded in vitro prior to expression of the CAR.

[0451] In one aspect, the invention provides a number of chimeric antigen receptors (CAR) comprising an antigen binding domain (e.g., antibody or antibody fragment, TCR or TCR fragment) engineered for specific binding to a disease-associated antigen, e.g., a tumor antigen described herein. In one aspect, the invention provides an immune effector cell (e.g., T cell, NK cell) engineered to express a CAR, wherein the engineered immune effector cell exhibits a therapeutic property. In one aspect, the invention provides an immune effector cell (e.g., T cell, NK cell) engineered to express a CAR, wherein the engineered immune effector cell exhibits an anticancer property. In one aspect, a cell is transformed with the CAR and the CAR is expressed on the cell surface. In some embodiments, the cell (e.g., T cell, NK cell) is transduced with a viral vector encoding a CAR. In some embodiments, the viral vector is a retroviral vector. In some embodiments, the viral vector is a lentiviral vector. In some such embodiments, the cell may stably express the CAR. In another embodiment, the cell (e.g., T cell, NK cell) is transfected with a nucleic acid, e.g., mRNA, cDNA, DNA, encoding a CAR. In some such embodiments, the cell may transiently express the CAR.

[0452] The present invention provides immune effector cells (e.g., T cells, NK cells) that are engineered to contain one or more CARs that direct the immune effector cells to diseased cells or disease-associated cells, such as cancer cells. This is achieved through an antigen binding domain on the CAR that is specific for a cancer associated antigen. There are two classes of cancer associated antigens (tumor antigens) that can be targeted by the CARs of the instant invention: (1) cancer associated antigens that are expressed on the surface of cancer cells; and (2) cancer associated antigens that itself is intracellular, however, a fragment of such antigen (peptide) is presented on the surface of the cancer cells by MHC (major histocompatibility complex).

[0453] Furthermore, the present invention provides CARs and CAR-expressing cells and their use in medicaments or methods for treating, among other diseases, cancer or any malignancy or autoimmune diseases or infectious disease or degenerative disease or allergic disease involving cells or tissues which express a tumor antigen or disease associated antigen as described herein.

[0454] In one aspect, the invention provides an immune effector cell (e.g., T cell, NK cell) engineered to express a chimeric antigen receptor (CAR), wherein the engineered immune effector cell exhibits an anti-disease property, such as antitumor property. A preferred antigen is a cancer associated antigen (i.e., tumor antigen) described herein. In one aspect, the antigen binding domain of the CAR comprises a partially humanized antibody fragment. In one aspect, the antigen binding domain of the CAR comprises a partially humanized scFv. Accordingly, the invention provides CARs that comprises a humanized antigen binding domain and is engineered into a cell, e.g., a T cell or a NK cell, and methods of their use for adoptive therapy.

[0455] Further provided herein are genetically engineered cells, comprising the polynucleotides and/or the chimeric antigen receptors described herein. In some embodiments, the cell is a T-lymphocyte (T-cell). In some embodiment the cell is a naïve T cells, a central memory T cells, an effector memory T cell, a regulatory T cell (Treg) or a combination thereof. In some embodiments, the cell is a natural killer (NK) cell, a hematopoietic stem cell (HSC), an embryonic stem cell, or a pluripotent stem cell. Genetically engineered cells which may comprise and express the CARs of the invention include, but are not limited to, T-lymphocytes (T-cells), naïve T cells (TN), memory T cells (for example, central memory T cells (TCM), effector memory cells (TEM)), natural killer cells, hematopoietic stem cells and/or pluripotent embryonic/induced stem cells capable of giving rise to therapeutically relevant progeny. In an embodiment, the genetically engineered cells are autologous cells. In an embodiment, the genetically engineered cells are allogeneic cells. By way of example, individual T-cells of the invention may be CD4+/CD8-, CD4-/CD8+, CD4-/CD8- or CD4+/CD8+. The T-cells may be a mixed population of CD4+/CD8- and CD4-/CD8+ cells or a population of a single clone. CD4+ T-cells of the invention may produce IL-2, IFNγ, TNFα and other T-cell effector cytokines when co-cultured in vitro with cells expressing the target antigens (for example CD20+ and/or CD19+ tumor cells). CD8+ T-cells of the invention may lyse antigen-specific target cells when co-cultured in vitro with the target cells. In some embodiments, T cells may be any one or more of CD45RA+CD62L+naïve cells, CD45RO+CD62L+ central memory cells, CD62L− effector memory cells or a combination thereof (Berger et al., Adoptive transfer of virus-specific and tumor-specific T cell immunity. Curr Opin Immunol 2009 21(2)224-232). Genetically modified cells may be produced by stably transfecting cells with DNA encoding the CAR of the invention.

[0456] Various methods produce stable transfectants which express the CARs of the invention. In one embodiment, a method of stably transfecting and re-directing cells is by electroporation using naked DNA. By using naked DNA, the time required to produce redirected cells may be significantly reduced. Additional methods to genetically engineer cells using naked DNA encoding the CAR of the invention include but are not limited to chemical transformation methods (e.g., using calcium phosphate, dendrimers, liposomes and/or cationic polymers), non-chemical transformation methods (e.g., electroporation, optical transformation, gene electrotransfer, transient perturbation in cell membranes and/or hydrodynamic delivery) and/or particle-based methods (e.g., impalefection, using a gene gun and/or magnetofection). The transfected cells demonstrating presence of a single integrated un-rearranged vector and expression of the CAR may be expanded ex vivo. In one embodiment, the cells selected for ex vivo expansion are CD8+ and demonstrates the capacity to specifically recognize and lyse antigen-specific target cells.

[0457] Viral transduction methods may also be used to generate redirected cells which express the CAR of the invention. Cell types that may be used to generate genetically modified cells expressing the CAR of the invention include but are not limited to T-lymphocytes (T-cells), natural killer cells, hematopoietic stem cells and/or pluripotent embryonic/induced stem cells capable of giving rise to therapeutically relevant progeny.

[0458] Stimulation of the T-cells by an antigen under proper conditions results in proliferation (expansion) of the cells and/or production of IL-2. The cells comprising the CAR of the invention will expand in number in response to the binding of one or more antigens to the antigen-specific targeting regions of the CAR. The invention also provides a method of making and expanding cells expressing a CAR. The method comprises transfecting or transducing the cells with the vector expressing the CAR and stimulating the cells with cells expressing the target antigens, recombinant target antigens, or an antibody to the receptor to cause the cells to proliferate, so as to make and expand T-cells. In an embodiment, the cells may be any one or more of T-lymphocytes (T-cells), natural killer (NK) cells, hematopoietic stem cells (HSCs) or pluripotent embryonic/induced stem cells capable of giving rise to therapeutically relevant progeny.

[0459] In some embodiments, genetically engineered cells described herein express the various backbones described herein, wherein the CAR component of the backbone determines target specificity based on the antigen specific domain of the CAR.

[0460] In one embodiment, the genetically engineered cells comprise nucleic acid molecules encoding conventional CARs I to III or conventional CARs I to III which are part of the backbones described herein, such as backbone-1, backbone-2, backbone-32 or backbone-33, wherein the antigen-specific domain of the CARs is specific to MPL.

[0461] In one embodiment, the genetically engineered cells comprise nucleic acid molecules encoding conventional CARs I to III or conventional CARs I to III which are part of the backbones described herein, such as backbone-1, backbone-2, backbone-32 or backbone-33, wherein the antigen-specific domain of the CARs is specific to CD19.

[0462] In one embodiment, the genetically engineered cells comprise nucleic acid molecules encoding conventional CARs I to III or conventional CARs I to III which are part of the backbones described herein, such as backbone-1, backbone-2, backbone-32 or backbone-33, wherein the antigen-specific domain of the CARs is specific to CD20.

[0463] In one embodiment, the genetically engineered cells comprise nucleic acid molecules encoding conventional CARs I to III or conventional CARs I to III which are part of the backbones described herein, such as backbone-1, backbone-2, backbone-32 or backbone-33, wherein the antigen-specific domain of the CARs is specific to BCMA.

[0464] In one embodiment, the genetically engineered cells comprise nucleic acid molecules encoding conventional CARs I to III or conventional CARs I to III which are part of the backbones described herein, such as backbone-1, backbone-2, backbone-32 or backbone-33, wherein the antigen-specific domain of the CARs is specific to CD22.

[0465] In one embodiment, the genetically engineered cells comprise nucleic acid molecules encoding conventional CARs I to III or conventional CARs I to III which are part of the backbones described herein, such as backbone-1, backbone-2, backbone-32 or backbone-33, wherein the antigen-specific domain of the CARs is specific to CD30.

[0466] In one embodiment, the genetically engineered cells comprise nucleic acid molecules encoding conventional CARs I to III or conventional CARs I to III which are part of the backbones described herein, such as backbone-1, backbone-2, backbone-32 or backbone-33, wherein the antigen-specific domain of the CARs is specific to CD33.

[0467] In one embodiment, the genetically engineered cells comprise nucleic acid molecules encoding conventional CARs I to III or conventional CARs I to III which are part of the backbones described herein, such as backbone-1, backbone-2, backbone-32 or backbone-33, wherein the antigen-specific domain of the CARs is specific to CD123.

[0468] In one embodiment, the genetically engineered cells comprise nucleic acid molecules encoding conventional CARs I to III or conventional CARs I to III which are part of the backbones described herein, such as backbone-1, backbone-2, backbone-32 or backbone-33, wherein the antigen-specific domain of the CARs is specific to CD138.

[0469] In one embodiment, the genetically engineered cells comprise nucleic acid molecules encoding conventional CARs I to III or conventional CARs I to III which are part of the backbones described herein, such as backbone-1, backbone-2, backbone-32 or backbone-33, wherein the antigen-specific domain of the CARs is specific to CLL1.

[0470] In one embodiment, the genetically engineered cells comprise nucleic acid molecules encoding conventional CARs I to III or conventional CARs I to III which are part of the backbones described herein, such as backbone-1, backbone-2, backbone-32 or backbone-33, wherein the antigen-specific domain of the CARs is specific to TCR-beta1 constant chain.

[0471] In one embodiment, the genetically engineered cells comprise nucleic acid molecules encoding conventional CARs I to III or conventional CARs I to III which are part of the backbones described herein, such as backbone-1, backbone-2, backbone-32 or backbone-33, wherein the antigen-specific domain of the CARs is specific to TCR-beta2 constant chain.

[0472] In one embodiment, the genetically engineered cells comprise nucleic acid molecules encoding conventional CARs I to III or conventional CARs I to III which are part of the backbones described herein, such as backbone-1, backbone-2, backbone-32 or backbone-33, wherein the antigen-specific domain of the CARs is specific to ALK.

[0473] In one embodiment, the genetically engineered cells comprise nucleic acid molecules encoding conventional CARs I to III or conventional CARs I to III which are part of the backbones described herein, such as backbone-1, backbone-2, backbone-32 or backbone-33, wherein the antigen-specific domain of the CARs is specific to PTK7.

[0474] In one embodiment, the genetically engineered cells comprise nucleic acid molecules encoding conventional CARs I to III or conventional CARs I to III which are part of the backbones described herein, such as backbone-1, backbone-2, backbone-32 or backbone-33, wherein the antigen-specific domain of the CARs is specific to DLL3.

[0475] In one embodiment, the genetically engineered cells comprise nucleic acid molecules encoding conventional CARs I to III or conventional CARs I to III which are part of the backbones described herein, such as backbone-1, backbone-2, backbone-32 or backbone-33, wherein the antigen-specific domain of the CARs is specific to TROP2.

[0476] In one embodiment, the genetically engineered cells comprise nucleic acid molecules encoding conventional CARs I to III or conventional CARs I to III which are part of the backbones described herein, such as backbone-1, backbone-2, backbone-32 or backbone-33, wherein the antigen-specific domain of the CARs is specific to Tim1.

[0477] In one embodiment, the genetically engineered cells comprise nucleic acid molecules encoding conventional CARs I to III or conventional CARs I to III which are part of the backbones described herein, such as backbone-1, backbone-2, backbone-32 or backbone-33, wherein the antigen-specific domain of the CARs is specific to LAMP1.

[0478] In one embodiment, the genetically engineered cells comprise nucleic acid molecules encoding conventional CARs I to III or conventional CARs I to III which are part of the backbones described herein, such as backbone-1, backbone-2, backbone-32 or backbone-33, wherein the antigen-specific domain of the CARs is specific to CS1.

[0479] In one embodiment, the genetically engineered cells comprise nucleic acid molecules encoding conventional CARs I to III or conventional CARs I to III which are part of the backbones described herein, such as backbone-1, backbone-2, backbone-32 or backbone-33, wherein the antigen-specific domain of the CARs is specific to Lym1.

[0480] In one embodiment, the genetically engineered cells comprise nucleic acid molecules encoding conventional CARs I to III or conventional CARs I to III which are part of the backbones described herein, such as backbone-1, backbone-2, backbone-32 or backbone-33, wherein the antigen-specific domain of the CARs is specific to Lym2.

[0481] In one embodiment, the genetically engineered cells comprise nucleic acid molecules encoding conventional CARs I to III or conventional CARs I to III which are part of the backbones described herein, such as backbone-1, backbone-2, backbone-32 or backbone-33, wherein the antigen-specific domain of the CARs is specific to TSHR.

[0482] In one embodiment, the genetically engineered cells comprise nucleic acid molecules encoding conventional CARs I to III or conventional CARs I to III which are part of the backbones described herein, such as backbone-1, backbone-2, backbone-32 or backbone-33, wherein the antigen-specific domain of the CARs is specific to NY-ESO/MHC class I complex.

[0483] In one embodiment, the genetically engineered cells comprise nucleic acid molecules encoding conventional CARs I to III or conventional CARs I to III which are part of the backbones described herein, such as backbone-1, backbone-2, backbone-32 or backbone-33, wherein the antigen-specific domain of the CARs is specific to WT1/MHC class I complex.

[0484] In one embodiment, the genetically engineered cells comprise nucleic acid molecules encoding conventional CARs I to III or conventional CARs I to III which are part of the backbones described herein, such as backbone-1, backbone-2, backbone-32 or backbone-33, wherein the antigen-specific domain of the CARs is specific to HIV1 envelop glycoprotein gp120.

[0485] In one embodiment, the genetically engineered cells comprise nucleic acid molecules encoding conventional CARs I to III or conventional CARs I to III which are part of the backbones described herein, such as backbone-1, backbone-2, backbone-32 or backbone-33, wherein the antigen-specific domain of the CARs is specific to Fc region of an immunoglobulin.

[0486] In various embodiments, the genetically engineered cells comprise nucleic acid molecules encoding conventional CARs I to III or conventional CARs I to III which are part of the backbones described herein, such as backbone-1, backbone-2, backbone-32 or backbone-33, wherein the antigen specific domain targets antigen described in Tables 4, 7, 8, 11, 19, 20, 21 or 22.

[0487] Immune effector cells such as T cells and NK cells comprising CARs and/or enhancers as described herein may be activated and expanded generally using methods as described, for example, in U.S. Pat. Nos. 6,352,694; 6,534,055; 6,905,680; 6,692,964; 5,858,358; 6,887,466; 6,905,681; 7,144,575; 7,067,318; 7,172,869; 7,232,566; 7,175,843; 5,883,223; 6,905,874; 6,797,514; 6,867,041; and U.S. Patent Application Publication No. 20060121005.

### Therapeutic Methods

[0488] Provided herein are methods for treating a disease associated with expression of a disease-associated antigen or a cancer associated antigen.

[0489] In one embodiment, provided herein are methods for treating a disease in a subject in need thereof by administering to the subject a therapeutically effective amount of genetically modified cells described herein (such as T cells, NK cells) that are engineered to express an antigen-specific CAR alone or an antigen specific CAR and an accessory molecule, wherein the antigen is a disease specific antigen as described herein, and wherein the disease causing or disease-associated cells express the said disease-specific antigen.

[0490] In one embodiment, provided herein are methods for treating cancer in a subject in need thereof by administering to the subject a therapeutically effective amount of genetically modified cells described herein (such as T cells, NK cells) that are engineered to express an antigen-specific CAR alone or an antigen specific CAR and an accessory molecule, wherein the antigen is a cancer specific antigen as described herein, and wherein the cancer cells express the said tumor antigen.

[0491] In one embodiment, the cancer specific antigen is expressed on both normal cells and cancers cells, but is expressed at lower levels on normal cells. In one embodiment, the method further comprises selecting a CAR that binds the cancer specific antigen of interest with an affinity that allows the antigen specific CAR to bind and kill the cancer cells. In some embodiments, the antigen specific CAR kills cancer cells but kills less than 30%, 25%, 20%, 15%, 10%, 5% or less of the normal cells expressing the cancer antigen. In exemplary embodiments, the percentage of cells killed by the antigen specific CARs may be determined using the cell death assays described herein.

[0492] In some embodiment, the present invention provides methods of treating cancer in a subject in need thereof comprising administering to the subject a therapeutically effective amount of the genetically modified cells (e.g., T cells, NK cells) that are engineered to express conventional CARs I to III, wherein the ASD of the CARs is specific to the antigen that is expressed on cancer cells (for example, the antigen is expressed at lower levels on normal cells relative to cancer cells).

[0493] In some embodiment, the present invention provides methods of treating cancer in a subject in need thereof comprising administering to the subject a therapeutically effective amount of the genetically modified cells (e.g., NK cells) that are engineered to express backbone-1 comprising the conventional CARs I and the accessory module K13-vFLIP, wherein the ASD of the CARs is specific to the antigen that is expressed on cancer cells (for example, the antigen is expressed at lower levels on normal cells relative to cancer cells).

[0494] In some embodiment, the present invention provides methods of treating cancer in a subject in need thereof comprising administering to the subject a therapeutically effective amount of the genetically modified cells (e.g., T cells, NK cells) that are engineered to comprising backbone-2 comprising the conventional CARs I and the accessory module MC159-vFLIP, wherein the ASD of the CARs is specific to the antigen that is expressed on cancer cells (for example, the antigen is expressed at lower levels on normal cells relative to cancer cells).

[0495] In some embodiment, the present invention provides methods of treating cancer in a subject in need thereof comprising administering to the subject a therapeutically effective amount of the genetically modified cells (e.g., T cells, NK cells) that are engineered to comprising backbone-32 comprising the conventional CAR II and the accessory module K13-vFLIP, wherein the ASD of the CARs is specific to the antigen that is expressed on cancer cells (for example, the antigen is expressed at lower levels on normal cells relative to cancer cells).

[0496] In some embodiment, the present invention provides methods of treating cancer in a subject in need thereof comprising administering to the subject a therapeutically effective amount of the genetically modified cells (e.g., NK cells) that are engineered to comprising backbone-33 comprising the conventional CAR II and the accessory module MC159-vFLIP, wherein the ASD of the CARs is specific to the antigen that is expressed on cancer cells (for example, the antigen is expressed at lower levels on normal cells relative to cancer cells).

[0497] In exemplary embodiments, the antigens that may be targeted for the therapeutic methods described herein include but are not limited to any one, two, three, four or more of: CD19; CD123; CD22; CD23, CD30; CD32, CD99; Tissue Factor; MPL; CD171; CS-1 (also referred to as CD2 subset 1, CRACC, SLAMF7, CD319, and 19A24); C-type lectin-like molecule-1 (CLL-1 or CLECL1); CD33; epidermal growth factor receptor variant III (EGFRvIII); ganglioside G2 (GD2); ganglioside GD3(aNeu5Ac(2-8)aNeu5Ac(2-3)bDGalp(1-4)bDGlcp(l-l)Cer); TNF receptor family member B cell maturation (BCMA); Tn antigen ((Tn Ag) or (GalNAca-Ser/Thr)): prostate-specific membrane antigen (PSMA); Receptor tyrosine kinase-like orphan receptor 1 (ROR1); Fms-Like Tyrosine Kinase 3 (FLT3); Tumor-associated glycoprotein 72 (TAG72); CD38; CD44v6; Carcinoembryonic antigen (CEA); Epithelial cell adhesion molecule (EPCAM); B7H3 (CD276); KIT (CD117); Interleukin-13 receptor subunit alpha-2 (IL-13Ra2 or CD213A2); Mesothelin; Interleukin 11 receptor alpha (IL-1 lRa); prostate stem cell antigen (PSCA); Protease Serine 21 (Testisin or PRSS21); vascular endothelial growth factor receptor 2 (VEGFR2); Lewis(Y) antigen; CD24; Platelet-derived growth factor receptor beta (PDGFR-beta); Stage-specific embryonic antigen-4 (SSEA-4); CD20; Folate receptor alpha; Receptor tyrosine-protein kinase ERBB2 (Her2/neu); Mucin 1, cell surface associated (MUC1); epidermal growth factor receptor (EGFR); neural cell adhesion molecule (NCAM); Prostase; prostatic acid phosphatase (PAP); elongation factor 2 mutated (ELF2M); Ephrin B2; fibroblast activation protein alpha (FAP); insulin-like growth factor 1 receptor (IGF-I receptor), carbonic anhydrase IX (CAFX); Proteasome (Prosome, Macropain) Subunit, Beta Type, 9 (LMP2); glycoprotein 100 (gplOO); oncogene fusion protein consisting of breakpoint cluster region (BCR) and Abelson murine leukemia viral oncogene homolog 1 (Abl) (bcr-abl); tyrosinase; ephrin type-A receptor 2 (EphA2); Fucosyl GM1; sialyl Lewis adhesion molecule (sLe); ganglioside GM3 (aNeu5Ac(2-3)bDGalp(1-4)bDGlcp(l-l)Cer); transglutaminase 5 (TGS5); high molecular weight-melanoma-associated antigen (HMWMAA); o-acetyl-GD2 ganglioside (OAcGD2); Folate receptor beta; tumor endothelial marker 1 (TEM1/CD248); tumor endothelial marker 7-related (TEM7R); claudin 6 (CLDN6); thyroid stimulating hormone receptor (TSHR); G protein-coupled receptor class C group 5, member D (GPRC5D); chromosome X open reading frame 61 (CXORF61); CD97; CD179a; anaplastic lymphoma kinase (ALK); Polysialic acid; placenta-specific I (PLAC1); hexasaccharide portion of globoH glycoceramide (GloboH); mammary gland differentiation antigen (NY-BR-1); uroplakin 2 (UPK2); Hepatitis A virus cellular receptor I (HAVCR1); adrenoceptor beta 3 (ADRB3); pannexin 3 (PANX3); G protein-coupled receptor 20 (GPR20); lymphocyte antigen 6 complex, locus K 9 (LY6K); Olfactory receptor 51 E2 (OR51E2); TCR Gamma Alternate Reading Frame Protein (TARP); Wilms tumor protein (WTI); Cancer/testis antigen 1 (NY-ESO-1); Cancer/testis antigen 2 (LAGE-1a); Melanoma-associated antigen 1 (MAGE-Al); ETS translocation-variant gene 6, located on chromosome 12p (ETV6-AML); sperm protein 17 (SPA17); X Antigen Family, Member 1A (XAGE1); angiopoietin-binding cell surface receptor 2 (Tie 2); melanoma cancer testis antigen-1 (MAD-CT-1); melanoma cancer testis antigen-2 (MAD-CT-2); Fos-related antigen 1; tumor protein p53 (p53); p53 mutant; prostein; surviving; telomerase; prostate carcinoma tumor antigen-1 (PCTA-1 or Galectin 8), melanoma antigen recognized by T cells 1 (MelanA or MARTI); Rat sarcoma (Ras) mutant; human Telomerase reverse transcriptase (hTERT); sarcoma translocation breakpoints; melanoma inhibitor of apoptosis (ML-IAP); ERG (transmembrane protease, serine 2 (TMPRSS2) ETS fusion gene); N-Acetyl glucosaminyl-transferase V (NA17); paired box protein Pax-3 (PAX3); Androgen receptor; Cyclin Bl; v-myc avian myelocytomatosis viral oncogene neuroblastoma derived homolog (MYCN); Ras Homolog Family Member C (RhoC); Tyrosinase-related protein 2 (TRP-2); Cytochrome P450 1B1 (CYPBI); CCCTC-Binding Factor (Zinc Finger Protein)-Like (BORIS or Brother of the Regulator of Imprinted Sites), Squamous Cell Carcinoma Antigen Recognized By T Cells 3 (SART3); Paired box protein Pax-5 (PAX5); proacrosin binding protein sp32 (OY-TES1); lymphocyte-specific protein tyrosine kinase (LCK); A kinase anchor protein 4 (AKAP-4); synovial sarcoma, X breakpoint 2 (SSX2); Receptor for Advanced Glycation Endproducts (RAGE-1); renal ubiquitous 1 (RU1); renal ubiquitous 2 (RU2); legumain; human papilloma virus E6 (HPV E6); human papilloma virus E7 (HPV E7); intestinal carboxyl esterase; heat shock protein 70-2 mutated (mut hsp70-2); CD79a; CD79b; CD72; Leukocyte-associated immunoglobulin-like receptor 1 (LAIR1); Fc fragment of IgA receptor (FCAR or CD89); Leukocyte immunoglobulin-like receptor subfamily A member 2 (LILRA2); CD300 molecule-like family member f (CD300LF); C-type lectin domain family 12 member A (CLEC12A); bone marrow stromal cell antigen 2 (BST2); EGF-like module-containing mucin-like hormone receptor-like 2 (EMR2); lymphocyte antigen 75 (LY75); Glypican-3 (GPC3); Fc receptor-like 5 (FCRL5); and immunoglobulin lambda-like polypeptide 1 (IGLL1), PTK7, LAMP1, TROP2, Tim1 and HIV1-envelop glycoprotein gp120.

[0498] In exemplary embodiments, the antigens that may be targeted for the therapeutic methods described herein include but are not limited to any one, two, three, four or more of: TSHR, CD171, CS-1, CLL-1, GD3, Tn Ag, FLT3, CD38, CD44v6, B7H3, KIT, IL-13Ra2, IL-llRa, PSCA, PRSS21, VEGFR2, LewisY, CD24, PDGFR-beta, SSEA-4, MUC1, EGFR, NCAM, CAIX, LMP2, EphA2, Fucosyl GM1, sLe, GM3, TGS5, HMWMAA, o-acetyl-GD2, Folate receptor beta, TEMI/CD248, TEM7R, CLDN6, GPRC5D, CXORF61, CD97, CD179a, ALK, Polysialic acid, PLAC1, GloboH, NY-BR-1, UPK2, HAVCR1, ADRB3, PANX3, GPR20, LY6K, OR51E2, TARP, WTI, ETV6-AML, sperm protein 17, XAGE1, Tie 2, MAD-CT-1, MAD-CT-2, Fos-related antigen 1, p53 mutant, hTERT, sarcoma translocation breakpoints, ML-IAP, ERG (TMPRSS2 ETS fusion gene), NA17, PAX3, Androgen receptor, Cyclin BI, MYCN, RhoC, CYP1B1, BORIS, SART3, PAX5, OY-TES1, LCK, AKAP-4, SSX2, CD79a, CD79b, CD72, LAIR1, FCAR, LILRA2, CD300LF, CLEC12A, BST2, EMR2, LY75, GPC3, FCRL5, and IGLL1.

[0499] In exemplary embodiments, the antigens that may be targeted for the therapeutic methods described herein include but are not limited to any one, two, three, four or more of: WT-1, hTERT, PRAME, HMMR/Rhamm, PRI, CG1, CD33, Cyclin-Al, NY-ESO-1, MAGE, HA-1, ACC1, T4A, LB-LY75-IK, BCR-ABL, FLT3-ITD, B-cell receptor idiotype, HTLV-I Tax protein, CD19, Lewis Y, CD22 and ROR1.

[0500] In exemplary embodiments, the antigens that may be targeted for the therapeutic methods described herein include but are not limited to any one, two, three, four or more of the targets described in Tables 4, 7, 8, 11, 19, 20, 21 or 22.

[0501] In one embodiment, the present invention provides methods of treating cancer by providing to the subject in need thereof immune effector cells (e.g., T cells, NK cells) that are engineered to express conventional CARs I to III or backbones (for example, backbone-1, backbone-2, backbone-32 or backbone-33) specific to MPL, wherein the cancer cells express MPL. In one embodiment, the cancer to be treated is acute myeloid leukemia, chronic myeloid leukemia, and myelodysplastic syndrome. In one embodiment, the antigen specific domain of the MPL specific CAR comprises V_{L} fragments as described in SEQ ID NOs: 180-187, V_{H} fragments as described in SEQ ID NOs: 427-434 and/or scFV as described in SEQ ID NOs: 729-736. In some embodiments, the activity of CAR-T cells may be controlled using Dasatinib, Ponatinib and/or A-770041, concurrently or sequentially with the immune effector cells described herein.

[0502] In one embodiment, the present invention provides methods of treating cancer, autoimmune or allergic disease by providing to the subject in need thereof immune effector cells (e.g., T cells, NK cells) that are engineered to express conventional CARs I to III or backbones (for example, backbone-1, backbone-2, backbone-32 or backbone-33) specific to CD19, wherein the cancer cells express CD19. In one embodiment, the cancer to be treated is acute lymphoblastic leukemia, chronic lymphocytic leukemia, B cell malignancy, non-Hodgkins lymphoma, diffuse large B-cell lymphoma, mantle cell lymphoma, or, multiple myeloma. In one embodiment, the antigen specific domain of the CD19 specific CAR comprises V_{L} fragments as described in SEQ ID NOs: 40-55, V_{H} fragments as described in SEQ ID NOs: 288-303 and/or scFV as described in SEQ ID NOs: 564-577. In some embodiments, the activity of CAR-T cells may be controlled using Dasatinib, Ponatinib and/or A-770041, concurrently or sequentially with the immune effector cells described herein.

[0503] In one embodiment, the present invention provides methods of treating cancer by providing to the subject in need thereof immune effector cells (e.g., T cells, NK cells) that are engineered to express backbones (for example, backbone-1, backbone-2, backbone-32 or backbone-33) specific to GRP-78, wherein the cancer cells express GRP-78. In one embodiment, the cancer to be treated is breast cancer. In one embodiment, when the immune effector cells expressing the GRP-78 CAR also expresses an MPL CAR, the cancer to be treated is acute lymphoblastic leukemia, chronic lymphocytic leukemia, chronic myeloid leukemia, diffuse large B-cell lymphoma, mantle cell lymphoma, myelodysplastic syndrome or multiple myeloma. In one embodiment, the antigen specific domain of the GRP-78 specific CAR comprises scFV as described in SEQ ID NO: 703. In one embodiment, the antigen specific domain of the MPL specific CAR comprises V_{L} fragments as described in SEQ ID NOs: 180-187, V_{H} fragments as described in SEQ ID NOs: 427-434 and/or scFV as described in SEQ ID NOs: 729-736. In some embodiments, the activity of CAR-T cells may be controlled using Dasatinib, Ponatinib and/or A-770041, concurrently or sequentially with the immune effector cells described herein.

[0504] In one embodiment, the present invention provides methods of treating cancer, autoimmune or allergic disease by providing to the subject in need thereof immune effector cells (e.g., T cells, NK cells) that are engineered to express backbones (for example, backbone-1, backbone-2, backbone-32 or backbone-33) specific to CD79b, wherein the cancer cells express CD79b. In one embodiment, the cancer to be treated is acute lymphoblastic leukemia, chronic lymphocytic leukemia, chronic myeloid leukemia, diffuse large B-cell lymphoma, mantle cell lymphoma, myelodysplastic syndrome or multiple myeloma. In one embodiment, the antigen specific domain of the CD79b specific CAR comprises V_{L} fragments as described in SEQ ID NOs: 92-93, V_{H} fragments as described in SEQ ID NOs: 340-341 and/or scFV as described in SEQ ID NO: 628. In some embodiments, the activity of CAR-T cells may be controlled using Dasatinib, Ponatinib and/or A-770041, concurrently or sequentially with the immune effector cells described herein.

[0505] In one embodiment, the present invention provides methods of treating cancer, autoimmune or allergic disease by providing to the subject in need thereof immune effector cells (e.g., T cells, NK cells) that are engineered to express conventional CARs I to III or backbones (for example, backbone-1, backbone-2, backbone-32 or backbone-33) specific to ROR-1 (Receptor tyrosine kinase-like orphan receptor 1), wherein the disease associated or disease causing cells express ROR-1. In some embodiments, cancer to be treated is chronic lymphocytic leukemia or solid organ tumors. In one embodiment, the antigen specific domain of the ROR-1 specific CAR comprises V_{H} fragments as described in SEQ ID NOs: 454-455 and/or scFV as described in SEQ ID NO: 755-756. In some embodiments, the activity of CAR-T cells may be controlled using Dasatinib, Ponatinib and/or A-770041, concurrently or sequentially with the immune effector cells described herein.

[0506] In one embodiment, the present invention provides methods of treating cancer, autoimmune or allergic a disease by providing to the subject in need thereof immune effector cells (e.g., T cells, NK cells) that are engineered to express backbones (for example, backbone-1, backbone-2, backbone-32 or backbone-33) specific to Lym-1. In one embodiment, the cancer to be treated or prevented is a B cell malignancy. In one embodiment, the antigen specific domain of the Lym-1 specific CAR comprises V_{L} fragments as described in SEQ ID NO: 175, V_{H} fragments as described in SEQ ID NO: 421 and/or scFV as described in SEQ ID NO: 723. In some embodiments, the activity of CAR-T cells may be controlled using Dasatinib, Ponatinib and/or A-770041, concurrently or sequentially with the immune effector cells described herein.

[0507] In one embodiment, the present invention provides methods of treating cancer, autoimmune or allergic disease by providing to the subject in need thereof immune effector cells (e.g., T cells, NK cells) that are engineered to express conventional CAR I to III or backbones (for example, backbone-1, backbone-2, backbone-32 or backbone-33) specific to Lym-2. In some embodiments, the cancer to be treated is blood cancer, ovarian cancer, prostate cancer or pancreatic tumors. In one embodiment, the antigen specific domain of the Lym-2 specific CAR comprises V_{L} fragments as described in SEQ ID NO: 176, V_{H}fragments as described in SEQ ID NO: 422 and/or scFV as described in SEQ ID NO: 724. In some embodiments, the activity of CAR-T cells may be controlled using Dasatinib, Ponatinib and/or A-770041, concurrently or sequentially with the immune effector cells described herein.

[0508] In one aspect, the present invention provides methods of treating or preventing a disease by providing to the subject in need thereof immune effector cells (e.g., T cells, NK cells) or stem cells that can give rise to immune effector cells that are engineered to express a CD123-specific conventional CAR or backbones 1-62 (for example, backbone-1, backbone-2, backbone-32 or backbone-33), wherein the disease causing or disease associated cells express CD123. In one embodiment, the disease to be treated or prevented is a cancer. In one embodiment, the cancer to be treated or prevented is AML or myelodysplastic syndrome (MDS). In some embodiments, the activity of CAR-T cells may be controlled using Dasatinib, Ponatinib and/or A-770041, concurrently or sequentially with the immune effector cells described herein.

[0509] In one aspect, the present invention provides methods of treating or preventing a disease by providing to the subject in need thereof immune effector cells (e.g., T cells, NK cells) or stem cells that can give rise to immune effector cells that are engineered to express a CD22-specific conventional CAR or backbones 1-62 (for example, backbone-1, backbone-2, backbone-32 or backbone-33), wherein the disease causing or disease associated cells express CD22. In one embodiment, the disease to be treated or prevented is a cancer. In one embodiment, the cancer to be treated or prevented is B cell malignancies. In one embodiment, the disease to be treated or prevented is an immune disease or allergic disease.

[0510] In some embodiments, the activity of CAR-T cells may be controlled using Dasatinib, Ponatinib and/or A-770041, concurrently or sequentially with the immune effector cells described herein.

[0511] In one aspect, the present invention provides methods of treating or preventing a disease by providing to the subject in need thereof immune effector cells (e.g., T cells, NK cells) or stem cells that can give rise to immune effector cells that are engineered to express a CD23-specific conventional CAR or backbones 1-62 (for example, backbone-1, backbone-2, backbone-32 or backbone-33), wherein the disease causing or disease associated cells express CD23. In one embodiment, the disease to be treated or prevented is a cancer. In one embodiment, the cancer to be treated or prevented is B cell malignancies. In one embodiment, the disease to be treated or prevented is an immune disease or allergic disease. In some embodiments, the activity of CAR-T cells may be controlled using Dasatinib, Ponatinib and/or A-770041, concurrently or sequentially with the administration of immune effector cells described herein,

[0512] In one aspect, the present invention provides methods of treating or preventing a disease by providing to the subject in need thereof immune effector cells (e.g., T cells, NK cells) or stem cells that can give rise to immune effector cells that are engineered to express a CS-1-specific conventional CAR or backbones 1-62 (for example, backbone-1, backbone-2, backbone-32 or backbone-33), wherein the disease causing or disease associated cells express CS-1. In one embodiment, the disease to be treated or prevented is an immune disease or allergic disease. In one embodiment, the disease to be treated or prevented is a cancer. In one embodiment, the cancer to be treated or prevented is a plasma cell malignancy or multiple myeloma or primary effusion lymphoma. In some embodiments, the activity of CAR-T cells may be controlled using Dasatinib, Ponatinib and/or A-770041, concurrently or sequentially with the administration of immune effector cells described herein.

[0513] In one aspect, the present invention provides methods of treating or preventing a disease by providing to the subject in need thereof immune effector cells (e.g., T cells, NK cells) or stem cells that can give rise to immune effector cells that are engineered to express a BCMA-CAR, wherein the disease causing or disease associated cells express BCMA. In one embodiment, the disease to be treated or prevented is an immune disease or allergic disease. In one embodiment, the disease to be treated or prevented is a cancer. In one embodiment, the cancer to be treated or prevented is a plasma cell malignancy or multiple myeloma or primary effusion lymphoma. In one embodiment, the disease to be treated or prevented is an immune disease. In some embodiments, the activity of CAR-T cells may be controlled using Dasatinib, Ponatinib and/or A-770041, concurrently or sequentially with the administration of immune effector cells described herein.

[0514] In one aspect, the present invention provides methods of treating or preventing a disease by providing to the subject in need thereof immune effector cells (e.g., T cells, NK cells) or stem cells that can give rise to immune effector cells that are engineered to express a CLL-1-specific conventional CAR or backbones 1-62 (for example, backbone-1, backbone-2, backbone-32 or backbone-33), wherein the disease causing or disease associated cells express CLL-1. In one embodiment, the disease to be treated or prevented is a cancer. In one embodiment, the cancer to be treated or prevented is AML or MDS. In some embodiments, the activity of CAR-T cells may be controlled using Dasatinib, Ponatinib and/or A-770041, concurrently or sequentially with the administration of immune effector cells described herein.

[0515] In one aspect, the present invention provides methods of treating or preventing a disease by providing to the subject in need thereof immune effector cells (e.g., T cells, NK cells) or stem cells that can give rise to immune effector cells that are engineered to express a CD30-specific conventional CAR or backbones 1-62 (for example, backbone-1, backbone-2, backbone-32 or backbone-33), wherein the disease causing or disease associated cells express CD30. In one embodiment, the disease to be treated or prevented is a cancer. In one embodiment, the cancer to be treated or prevented is lymphoma or leukemia. In some embodiments, the activity of CAR-T cells may be controlled using Dasatinib, Ponatinib and/or A-770041, concurrently or sequentially with the administration of immune effector cells described herein.

[0516] In one aspect, the present invention provides methods of treating or preventing a disease by providing to the subject in need thereof immune effector cells (e.g., T cells, NK cells) or stem cells that can give rise to immune effector cells that are engineered to express a CD33-specific conventional CAR or backbones 1-62 (for example, backbone-1, backbone-2, backbone-32 or backbone-33), wherein the disease causing or disease associated cells express CD33. In one embodiment, the disease to be treated or prevented is a cancer. In one embodiment, the cancer to be treated or prevented is AML or MDS. In some embodiments, the activity of CAR-T cells may be controlled using Dasatinib, Ponatinib and/or A-770041, concurrently or sequentially with the administration of immune effector cells described herein.

[0517] In one aspect, the present invention provides methods of treating or preventing a disease by providing to the subject in need thereof immune effector cells (e.g., T cells, NK cells) or stem cells that can give rise to immune effector cells that are engineered to express a IL-13Ra2-specific conventional CAR or backbones 1-62 (for example, backbone-1, backbone-2, backbone-32 or backbone-33), wherein the disease causing or disease associated cells express IL-13Ra2. In one embodiment, the disease to be treated or prevented is a cancer. In one embodiment, the cancer to be treated or prevented is glioblastoma. In some embodiments, the activity of CAR-T cells may be controlled using Dasatinib, Ponatinib and/or A-770041, concurrently or sequentially with the administration of immune effector cells described herein,

[0518] In one aspect, the present invention provides methods of treating or preventing a disease by providing to the subject in need thereof immune effector cells (e.g., T cells, NK cells) or stem cells that can give rise to immune effector cells that are engineered to express a IL-11Ra-CAR, wherein the disease causing or disease associated cells express IL-11Ra. In one embodiment, the disease to be treated or prevented is a cancer. In one embodiment, the cancer to be treated or prevented is osteosarcoma. In some embodiments, the activity of CAR-T cells may be controlled using Dasatinib. Ponatinib and/or A-770041, concurrently or sequentially with the administration of immune effector cells described herein.

[0519] In one aspect, the present invention provides methods of treating or preventing a disease by providing to the subject in need thereof immune effector cells (e.g., T cells, NK cells) or stem cells that can give rise to immune effector cells that are engineered to express CD20-CAR, wherein the disease causing or disease associated cells express CD20. In one embodiment, the disease to be treated or prevented is a cancer. In one embodiment, the cancer to be treated or prevented is a B cell malignancy, such as chronic lymphocytic leukemia, acute lymphocytic leukemia, diffuse large cell lymphoma, follicular lymphoma or mantle cell lymphoma. In one embodiment, the disease to be treated or prevented is an immune disease or allergic disease. In some embodiments, the activity of CAR-T cells may be controlled using Dasatinib, Ponatinib and/or A-770041, concurrently or sequentially with the administration of immune effector cells described herein.

[0520] In one aspect, the present invention provides methods of treating or preventing a disease by providing to the subject in need thereof immune effector cells (e.g., T cells, NK cells) or stem cells that can give rise to immune effector cells that are engineered to express folate receptor alpha-specific conventional CAR or backbones 1-62 (for example, backbone-1, backbone-2, backbone-32 or backbone-33), wherein the disease causing or disease associated cells express folate receptor alpha. In one embodiment, the disease to be treated or prevented is a cancer. In one embodiment, the cancer to be treated or prevented is ovarian cancer, NSCLC, endometrial cancer, renal cancer, or other solid tumors. In some embodiments, the activity of CAR-T cells may be controlled using Dasatinib, Ponatinib and/or A-770041, concurrently or sequentially with the administration of immune effector cells described herein,

[0521] In one aspect, the present invention provides methods of treating or preventing a disease by providing to the subject in need thereof immune effector cells (e.g., T cells, NK cells) or stem cells that can give rise to immune effector cells that are engineered to express TSHR-specific conventional CAR or backbones 1-62 (for example, backbone-1, backbone-2, backbone-32 or backbone-33), wherein the disease causing or disease associated cells express TSHR (Thyroid Stimulating Hormone Receptor). In one embodiment, the disease to be treated or prevented is cancer. In one embodiment, the cancer to be treated or prevented is thyroid cancer, or multiple myeloma or T cell leukemia or T cell lymphoma. In some embodiments, the activity of CAR-T cells may be controlled using Dasatinib, Ponatinib and/or A-770041, concurrently or sequentially with the administration of immune effector cells described herein.

[0522] In one aspect, the present invention provides methods of treating or preventing a disease by providing to the subject in need thereof immune effector cells (e.g., T cells, NK cells) or stem cells that can give rise to immune effector cells that are engineered to express GPRC5D-specific conventional CAR or backbones 1-62 (for example, backbone-1, backbone-2, backbone-32 or backbone-33), wherein the disease causing or disease associated cells express GPRC5D. In one embodiment, the disease to be treated or prevented is cancer, immune or allergic disease. In one embodiment, the cancer to be treated or prevented is a plasma cell disorder, multiple myeloma or primary effusion lymphoma. In some embodiments, the activity of CAR-T cells may be controlled using Dasatinib, Ponatinib and/or A-770041, concurrently or sequentially with the administration of immune effector cells described herein.

[0523] In one aspect, the present invention provides methods of treating or preventing a disease by providing to the subject in need thereof immune effector cells (e.g., T cells, NK cells) or stem cells that can give rise to immune effector cells that are engineered to express ALK-specific conventional CAR or backbones 1-62 (for example, backbone-1, backbone-2, backbone-32 or backbone-33), wherein the disease causing or disease associated cells express ALK. In one embodiment, the disease to be treated or prevented is a cancer. In one embodiment, the cancer to be treated or prevented is a NSCLC, ALCL (anaplastic large cell lymphoma), IMT (inflammatory myofibroblastic tumor), or neuroblastoma. In some embodiments, the activity of CAR-T cells may be controlled using Dasatinib, Ponatinib and/or A-770041, concurrently or sequentially with the administration of immune effector cells described herein.

[0524] In one aspect, the present invention provides methods of treating or preventing a disease by providing to the subject in need thereof immune effector cells (e.g., T cells, NK cells) or stem cells that can give rise to immune effector cells that are engineered to express a HAVCR1-specific conventional CAR or backbones 1-62 (for example, backbone-1, backbone-2, backbone-32 or backbone-33), wherein the disease causing or disease associated cells express HAVCR1. In one embodiment, the disease to be treated or prevented is a cancer. In one embodiment, the cancer to be treated or prevented is renal cancer. In some embodiments, the activity of CAR-T cells may be controlled using Dasatinib, Ponatinib and/or A-7:′0041, concurrently or sequentially with the administration of immune effector cells described herein.

[0525] In one aspect, the present invention provides methods of treating or preventing a disease by providing to the subject in need thereof immune effector cells (e.g., T cells, NK cells) or stem cells that can give rise to immune effector cells that are engineered to express a WT1/MHC I complex-specific CAR, wherein the disease causing or disease associated cells express WT1 in association with MHC class I complex. In one embodiment, the disease to be treated or prevented is a cancer. In one embodiment, the cancer to be treated or prevented is ANIL or myeloma. In some embodiments, the activity of CAR-T cells may be controlled using Dasatinib. Ponatinib and/or A-770041, concurrently or sequentially with the administration of immune effector cells described herein.

[0526] In one aspect, the present invention provides methods of treating or preventing a disease by providing to the subject in need thereof immune effector cells (e.g., T cells, NK cells) or stem cells that can give rise to immune effector cells that are engineered to express a NY-ESO-1/MHC 1 complex-specific conventional CAR or backbones 1-62 (for example, backbone-1, backbone-2, backbone-32 or backbone-33), wherein the disease causing or disease associated cells express NY-ESO-1 in association with MHC class I complex. In one embodiment, the disease to be treated or prevented is a cancer. In one embodiment, the cancer to be treated or prevented is myeloma. In some embodiments, the activity of CAR-T cells may be controlled using Dasatinib Ponatinib and/or A-770041, concurrently or sequentially with the administration of immune effector cells described herein.

[0527] In one aspect, the present invention provides methods of treating or preventing a disease by providing to the subject in need thereof immune effector cells (e.g., T cells, NK cells) or stem cells that can give rise to immune effector cells that are engineered to express PTK7-specific conventional CAR or backbones 1-62 (for example, backbone-1, backbone-2, backbone-32 or backbone-33), wherein the disease causing or disease associated cells express PTK7. In one embodiment, the disease to be treated or prevented is a cancer. In one embodiment, the cancer to be treated or prevented is melanoma, lung cancer or ovarian cancer. In some embodiments, the activity of CAR-T cells may be controlled using Dasatinib, Ponatinib and/or A-770041, concurrently or sequentially with the administration of immune effector cells described herein,

[0528] In one aspect, the present invention provides methods of treating or preventing a disease by providing to the subject in need thereof immune effector cells (e.g., T cells, NK cells) or stem cells that can give rise to immune effector cells that are engineered to express DLL3-specific conventional CAR or backbones 1-62 (for example, backbone-1, backbone-2, backbone-32 or backbone-33), wherein the disease causing or disease associated cells express DLL3. In one embodiment, the disease to be treated or prevented is a cancer. In one embodiment, the cancer to be treated or prevented is melanoma, lung cancer or ovarian cancer. In some embodiments, the activity of CAR-T cells may be controlled using Dasatinib, Ponatinib and/or A-770041, concurrently or sequentially with the administration of immune effector cells described herein,

[0529] In one aspect, the present invention provides methods of treating or preventing a disease by providing to the subject in need thereof immune effector cells (e.g., T cells, NK cells) or stem cells that can give rise to immune effector cells that are engineered to express GCC-specific conventional CAR or backbones 1-62 (for example, backbone-1, backbone-2, backbone-32 or backbone-33), wherein the disease causing or disease associated cells express GCC. In one embodiment, the disease to be treated or prevented is a cancer. In one embodiment, the cancer to be treated or prevented is gastrointestinal cancer. In some embodiments, the activity of CAR-T cells may be controlled using Dasatinib, Ponatinib and/or A-770041, concurrently or sequentially with the administration of immune effector cells described herein.

[0530] In one aspect, the present invention provides methods of treating or preventing a disease by providing to the subject in need thereof immune effector cells (e.g., T cells, NK cells) or stem cells that can give rise to immune effector cells that are engineered to express CCR4-specific conventional CAR or backbones 1-62 (for example, backbone-1, backbone-2, backbone-32 or backbone-33), wherein the disease causing or disease associated cells express CCR4. In one embodiment, the disease to be treated or prevented is a cancer. In one embodiment, the cancer to be treated or prevented is T cell leukemia or lymphoma. In some embodiments, the activity of CAR-T cells may be controlled using Dasatinib, Ponatinib and/or A-770041, concurrently or sequentially with the administration of immune effector cells described herein.

[0531] In one aspect, the present invention provides methods of treating or preventing a disease by providing to the subject in need thereof immune effector cells (e.g., T cells, NK cells) or stem cells that can give rise to immune effector cells that are engineered to express CDH1/CD324-specific conventional CAR or backbones 1-62 (for example, backbone-1, backbone-2, backbone-32 or backbone-33), wherein the disease causing or disease associated cells express CDH1/CD324. In one embodiment, the disease to be treated or prevented is a cancer. In some embodiments, the activity of CAR-T cells may be controlled using Dasatinib, Ponatinib and/or A-770041, concurrently or sequentially with the administration of immune effector cells described herein.

[0532] In one aspect, the present invention provides methods of treating or preventing a disease by providing to the subject in need thereof immune effector cells (e.g., T cells, NK cells) or stem cells that can give rise to immune effector cells that are engineered to express CD200R-specific conventional CAR or backbones 1-62 (for example, backbone-1, backbone-2, backbone-32 or backbone-33), wherein the disease causing or disease associated cells express CD200R. In one embodiment, the disease to be treated or prevented is a cancer. In some embodiments, the activity of CAR-T cells may be controlled using Dasatinib, Ponatinib and/or A-770041, concurrently or sequentially with the administration of immune effector cells described herein.

[0533] In one aspect, the present invention provides methods of treating or preventing a disease by providing to the subject in need thereof immune effector cells (e.g., T cells, NK cells) that are engineered to express a CDH19-specific conventional CAR or backbones 1-62 (for example, backbone-1, backbone-2, backbone-32 or backbone-33), wherein the disease causing or disease associated cells express CDH19. In one embodiment, the disease to be treated or prevented is a cancer. In one embodiment, the cancer to be treated or prevented is a solid tumor. In some embodiments, the activity of CAR-T cells may be controlled using Dasatinib, Ponatinib and/or A-770041, concurrently or sequentially with the administration of immune effector cells described herein.

[0534] In one aspect, the present invention provides methods of treating or preventing a disease by providing to the subject in need thereof immune effector cells (e.g., T cells, NK cells) that are engineered to express a CDH17-specific conventional CAR or backbones 1-62 (for example, backbone-1, backbone-2, backbone-32 or backbone-33), wherein the disease causing or disease associated cells express CDH17. In one embodiment, the disease to be treated or prevented is a cancer. In one embodiment, the cancer to be treated or prevented is a solid tumor. In some embodiments, the activity of CAR-T cells may be controlled using Dasatinib, Ponatinib and/or A-770041, concurrently or sequentially with the administration of immune effector cells described herein.

[0535] In one aspect, the present invention provides methods of treating or preventing a disease by providing to the subject in need thereof immune effector cells (e.g., T cells, NK cells) that are engineered to express a CDH6-specific conventional CAR or backbones 1-62 (for example, backbone-1, backbone-2, backbone-32 or backbone-33), wherein the disease causing or disease associated cells express CDH6. In one embodiment, the disease to be treated or prevented is a cancer. In one embodiment, the cancer to be treated or prevented is a solid tumor. In some embodiments, the activity of CAR-T cells may be controlled using Dasatinib, Ponatinib and/or A-770041, concurrently or sequentially with the administration of immune effector cells described herein.

[0536] In one aspect, the present invention provides methods of treating or preventing a disease by providing to the subject in need thereof immune effector cells (e.g., T cells, NK cells) that are engineered to express a GFRa4-specific conventional CAR or backbones 1-62 (for example, backbone-1, backbone-2, backbone-32 or backbone-33), wherein the disease causing or disease associated cells express GFRa4. In one embodiment, the disease to be treated or prevented is a cancer. In one embodiment, the cancer to be treated or prevented is a thyroid medullary cancer. In some embodiments, the activity of CAR-T cells may be controlled using Dasatinib, Ponatinib and/or A-770041, concurrently or sequentially with the administration of immune effector cells described herein.

[0537] In one aspect, the present invention provides methods of treating or preventing a disease by providing to the subject in need thereof immune effector cells (e.g., T cells, NK cells) or stem cells that can give rise to immune effector cells that are engineered to express LHR-specific conventional CAR or backbones 1-62 (for example, backbone-1, backbone-2, backbone-32 or backbone-33), wherein the disease causing or disease associated cells express LHR (Leutanizing Hormone Receptor). In one embodiment, the disease to be treated or prevented is a cancer. In one embodiment, the cancer to be treated or prevented is prostate cancer, ovarian cancer or breast cancer.

[0538] In one aspect, the present invention provides methods of treating or preventing a disease by providing to the subject in need thereof immune effector cells (e.g., T cells, NK cells) or stem cells that can give rise to immune effector cells that are engineered to express FHR-specific conventional CAR or backbones 1-62 (for example, backbone-1, backbone-2, backbone-32 or backbone-33), wherein the disease causing or disease associated cells express FHR (Follicular Hormone Receptor). In one embodiment, the disease to be treated or prevented is a cancer. In one embodiment, the cancer to be treated or prevented is prostate cancer, ovarian cancer or breast cancer.

[0539] In one aspect, the present invention provides methods of treating or preventing a disease by providing to the subject in need thereof immune effector cells (e.g., T cells, NK cells) or stem cells that can give rise to immune effector cells that are engineered to express GR-specific conventional CAR or backbones 1-62 (for example, backbone-1, backbone-2, backbone-32 or backbone-33), wherein the disease causing or disease associated cells express GR (Gonadotropin Receptor). In one embodiment, the disease to be treated or prevented is a cancer. In one embodiment, the cancer to be treated or prevented is prostate cancer, ovarian cancer or breast cancer.

[0540] In one aspect, the present invention provides methods of treating or preventing a disease by providing to the subject in need thereof immune effector cells (e.g., T cells, NK cells) or stem cells that can give rise to immune effector cells that are engineered to express CD45-specific conventional CAR or backbones 1-62 (for example, backbone-1, backbone-2, backbone-32 or backbone-33), wherein the disease causing or disease associated cells express CD45. In one embodiment, the disease to be treated or prevented is a cancer. In one embodiment, the cancer to be treated or prevented is a blood cancer.

[0541] In one aspect, the present invention provides methods of treating or preventing a disease by providing to the subject in need thereof immune effector cells (e.g., T cells, NK cells) or stem cells that can give rise to immune effector cells that are engineered to express CD32-specific conventional CAR or backbones 1-62 (for example, backbone-1, backbone-2, backbone-32 or backbone-33), wherein the disease causing or disease associated cells express CD32. In one embodiment, the disease to be treated or prevented is a cancer. In one embodiment, the cancer to be treated or prevented is a blood cancer.

[0542] In one aspect, the present invention provides methods of treating or preventing a disease by providing to the subject in need thereof immune effector cells (e.g., T cells, NK cells) or stem cells that can give rise to immune effector cells that are engineered to express TROP2-specific conventional CAR or backbones 1-62 (for example, backbone-1, backbone-2, backbone-32 or backbone-33), wherein the disease causing or disease associated cells express TROP2. In one embodiment, the disease to be treated or prevented is a cancer. In one embodiment, the cancer to be treated or prevented is breast or prostate cancer.

[0543] In one aspect, the present invention provides methods of treating or preventing a disease by providing to the subject in need thereof immune effector cells (e.g., T cells, NK cells) or stem cells that can give rise to immune effector cells that are engineered to express LAMP-specific conventional CAR or backbones 1-62 (for example, backbone-1, backbone-2, backbone-32 or backbone-33), wherein the disease causing or disease associated cells express LAMP1. In one embodiment, the disease to be treated or prevented is a cancer. In one embodiment, the cancer to be treated or prevented is a leukemia, lymphoma or myeloma.

[0544] In one aspect, the present invention provides methods of treating or preventing a disease by providing to the subject in need thereof immune effector cells (e.g., T cells, NK cells) or stem cells that can give rise to immune effector cells that are engineered to express CD32-specific conventional CAR or backbones 1-62 (for example, backbone-1, backbone-2, backbone-32 or backbone-33), wherein the disease causing or disease associated cells express CD32. In one embodiment, the disease to be treated or prevented is a cancer.

[0545] In one aspect, the present invention provides methods of treating or preventing a disease by providing to the subject in need thereof immune effector cells (e.g., T cells, NK cells) or stem cells that can give rise to immune effector cells that are engineered to express TCRB1-specific conventional CAR or backbones 1-62 (for example, backbone-1, backbone-2, backbone-32 or backbone-33), wherein the disease causing or disease associated cells express TCRB1 (T cell receptor Beta1 constant chain). In one embodiment, the disease to be treated or prevented is a cancer or immune disease. In one embodiment, the cancer to be treated or prevented is T cell leukemia or T cell lymphoma. In one embodiment, the immune disorder to be treated or prevented is multiple sclerosis, rheumatoid arthritis, ankylosing spondylitis, inflammatory Bowel Disease, Diabetes Mellitus, Graft vs host disease or autoimmune Thyroiditis.

[0546] In one aspect, the present invention provides methods of treating or preventing a disease by providing to the subject in need thereof immune effector cells (e.g., T cells, NK cells) or stem cells that can give rise to immune effector cells that are engineered to express TCRB2-specific conventional CAR or backbones 1-62 (for example, backbone-1, backbone-2, backbone-32 or backbone-33), wherein the disease causing or disease associated cells express TCRB2 (T cell receptor Beta2 constant chain). In one embodiment, the disease to be treated or prevented is a cancer or immune disorder. In one embodiment, the cancer to be treated or prevented is T cell leukemia or T cell lymphoma. In one embodiment, the immune disorder to be treated or prevented is multiple sclerosis, rheumatoid arthritis, ankylosing spondylitis, inflammatory Bowel Disease, Diabetes Mellitus, Graft vs host disease or autoimmune Thyroiditis.

[0547] In one aspect, the present invention provides methods of treating or preventing a disease by providing to the subject in need thereof immune effector cells (e.g., T cells, NK cells) or stem cells that can give rise to immune effector cells that are engineered to express T cell receptor gamma-delta-specific conventional CAR or backbones 1-62 (for example, backbone-1, backbone-2, backbone-32 or backbone-33), wherein the disease causing or disease associated cells express T cell receptor gamma-delta. In one embodiment, the disease to be treated or prevented is a cancer or immune disorder. In one embodiment, the cancer to be treated or prevented is T cell leukemia or T cell lymphoma. In one embodiment, the immune disorder to be treated or prevented is multiple sclerosis, rheumatoid arthritis, ankylosing spondylitis, inflammatory bowel disease, diabetes mellitus, Graft vs host disease or autoimmune Thyroiditis.

[0548] In one aspect, the present invention provides methods of treating or preventing a disease by providing to the subject in need thereof immune effector cells (e.g., T cells, NK cells) or stem cells that can give rise to immune effector cells that are engineered to express HLA-A2-specific conventional CAR or backbones 1-62 (for example, backbone-1, backbone-2, backbone-32 or backbone-33). In one embodiment, the disease to be treated or prevented is Graft vs Host disease.

[0549] In one aspect, the present invention provides methods of treating or preventing a disease by providing to the subject in need thereof immune effector cells (e.g., T cells, NK cells) or stem cells that can give rise to immune effector cells that are engineered to express HIV1-CAR on backbones 1-62 (for example, backbone-1, backbone-2, backbone-32 or backbone-33) directed against the HIV envelop glycoprotein gp120, wherein the disease causing or disease associated cells express the HIV1 envelop glycoprotein gp120. In one embodiment, the disease to be treated or prevented is HIV1/AIDS.

[0550] In one aspect, the present invention provides methods of treating or preventing CMV (Cytomegalovirus) infection or associated disease by providing to the subject in need thereof immune effector cells (e.g., T cells, NK cells) or stem cells that can give rise to immune effector cells that are engineered to express CMV-specific CAR or backbones 1-62 (for example, backbone-1, backbone-2, backbone-32 or backbone-33), wherein the disease causing or disease associated cells are infected with CMV. In one aspect the CMV CAR and backbones are directed against the CMV pp65 protein. In one aspect, the CMV-associated disease is pneumonia, colitis or meningoencephalitis.

[0551] In one aspect, the present invention provides methods of treating or preventing EBB infection or diseases associated with EBB infection by providing to the subject in need thereof immune effector cells (e.g., T cells, NK cells) or stem cells that can give rise to immune effector cells that are engineered to express an EBB-specific conventional CAR or backbones 1-62 (for example, backbone-1, backbone-2, backbone-32 or backbone-33), wherein the disease causing or disease associated cells are infected with EBB. In one aspect the EBB-specific CARs and backbones are directed against the EBB EBNA3c protein. In one aspect, the EBB-specific CARs and backbones comprise a broadly neutralizing antibody against EBB. In one aspect, the EBB-associated disease is lymphoma.

[0552] In one aspect, the present invention provides methods of treating or preventing KSHV infection or diseases associated with KSHV infection by providing to the subject in need thereof immune effector cells (e.g., T cells, NK cells) or stem cells that can give rise to immune effector cells that are engineered to express an KSHV-specific conventional CAR or backbones 1-62 (for example, backbone-1, backbone-2, backbone-32 or backbone-33), wherein the disease causing or disease associated cells are infected with KSHV. In one aspect, the KSHV associated disease is Kaposi's sarcoma or primary effusion lymphoma or multicentric castleman's disease.

[0553] In one aspect, the present invention provides methods of treating or preventing HTLV1 infection or diseases associated with HTLV1 infection by providing to the subject in need thereof immune effector cells (e.g., T cells, NK cells) or stem cells that can give rise to immune effector cells that are engineered to express HTLV1-specific conventional CAR or backbones 1-62 (for example, backbone-1, backbone-2, backbone-32 or backbone-33), wherein the disease causing or disease associated cells are infected with HTLV1. In one aspect, the HTLV1-specific conventional CAR or backbones target HTLV1 Tax protein/MHC class I complex. In one aspect, the HTLV1 disease is human T cell leukemia or lymphoma.

[0554] In one aspect, the present invention provides methods of treating or preventing Influenza A infection or diseases associated with Influenza A infection by providing to the subject in need thereof immune effector cells (e.g., T cells, NK cells) or stem cells that can give rise to immune effector cells that are engineered to express InfluenzaA-specific conventional CAR or backbones 1-62 (for example, backbone-1, backbone-2, backbone-32 or backbone-33), wherein the disease causing or disease associated cells are infected with Influenza A. In one aspect, the InfluenzaA-specific conventional CAR or backbones comprise antigen binding domains derived from a broadly neutralizing antibody against Influenza A hemagglutinin (HA), such as MEDI8852.

[0555] In one aspect, the present invention provides methods of treating or preventing a cancer, infection, autoimmune or allergic diseases by providing to the subject in need thereof immune effector cells (e.g., T cells, NK cells) or stem cells that can give rise to immune effector cells that are engineered to express a universal conventional CAR or backbones 1-62 (for example, backbone-1, backbone-2, backbone-32 or backbone-33) encoding CD16V158 or a deletion- or point-mutant fragment thereof along with an antibody or an antibody fragment that binds to the CD16 domain of the CAR through its Fc region and on an antigen expressed on the disease associated cells through its variable (vL and/or vH) regions. In one aspect the disease associated cell is a cancer cell, an infected cell, or a plasma cell or a B cell or a T cell.

[0556] In one aspect, the present invention provides methods of treating or preventing a cancer, infection, autoimmune or allergic diseases by providing to the subject in need thereof immune effector cells (e.g., T cells, NK cells) or stem cells that can give rise to immune effector cells that are engineered to express a FITC-specific conventional CAR or backbones 1-62 (for example, backbone-1, backbone-2, backbone-32 or backbone-33) along with a FITC-labeled antibody or an antibody fragment that binds to an antigen expressed on the disease associated cells. In one aspect the disease associated cell is a cancer cell, an infected cell, or a plasma cell or a B cell or a T cell.

[0557] Exemplary cancers whose growth can be inhibited include cancers typically responsive to immunotherapy. Non-limiting examples of cancers for treatment include melanoma (e.g., metastatic malignant melanoma), renal cancer (e.g. clear cell carcinoma), prostate cancer (e.g. hormone refractory prostate adenocarcinoma), breast cancer, colon cancer and lung cancer (e.g. non-small cell lung cancer). Additionally, refractory or recurrent malignancies can be treated using the molecules described herein.

[0558] In exemplary embodiments, cancers treated by the methods described herein include solid tumors such as sarcomas, adenocarcinomas, and carcinomas, of the various organ systems, such as those affecting liver, lung, breast, lymphoid, gastrointestinal (e.g., colon), genitourinary tract (e.g., renal, urothelial cells), prostate and pharynx. Adenocarcinomas include malignancies such as most colon cancers, rectal cancer, renal-cell carcinoma, liver cancer, non-small cell carcinoma of the lung, cancer of the small intestine and cancer of the esophagus. In one embodiment, the cancer is a melanoma, e.g., an advanced stage melanoma. Metastatic lesions of the aforementioned cancers can also be treated or prevented using the methods and compositions of the invention.

[0559] Examples of other cancers that can be treated include bone cancer, pancreatic cancer, skin cancer, cancer of the head or neck, cutaneous or intraocular malignant melanoma, uterine cancer, ovarian cancer, rectal cancer, cancer of the anal region, stomach cancer, testicular cancer, uterine cancer, carcinoma of the fallopian tubes, carcinoma of the endometrium, carcinoma of the cervix, carcinoma of the vagina, carcinoma of the vulva, Hodgkin Disease, non-Hodgkin lymphoma, cancer of the esophagus, cancer of the small intestine, cancer of the endocrine system, cancer of the thyroid gland, cancer of the parathyroid gland, cancer of the adrenal gland, sarcoma of soft tissue, cancer of the urethra, cancer of the penis, chronic or acute leukemias including acute myeloid leukemia, chronic myeloid leukemia, acute lymphoblastic leukemia, chronic lymphocytic leukemia, solid tumors of childhood, lymphocytic lymphoma, cancer of the bladder, cancer of the kidney or ureter, carcinoma of the renal pelvis, neoplasm of the central nervous system (CNS), primary CNS lymphoma, tumor angiogenesis, spinal axis tumor, brain stem glioma, pituitary adenoma., Kaposi's sarcoma, epidermoid cancer, squamous cell cancer, T-cell lymphoma., environmentally induced cancers including those induced by asbestos, and combinations of said cancers. Treatment of metastatic cancers, e.g., metastatic cancers that express PD-L1 (Iwai et al. (2005) Int. Immunol. 17:133-144) can be effected using the antibody molecules described herein. Further a disease associated with a cancer associate antigen as described herein expression include, but not limited to, e.g., atypical and/or non-classical cancers, malignancies, precancerous conditions or proliferative diseases associated with expression of a cancer associate antigen as described herein. In some embodiments, a CAR-expressing T cell or NK cell as described herein reduces the quantity, number, amount or percentage of cells and/or cancer cells by at least 25%, at least 30%, at least 40%, at least 50%, at least 65%, at least 75%, at least 85%, at least 95%, or at least 99% in a subject with hematological cancer or another cancer associated with a cancer associated antigen as described herein, expressing cells relative to a negative control. In one embodiment, the subject is a human.

[0560] In one embodiment, the present invention provides methods of treating hematological cancer by providing to the subject in need thereof genetically modified cells (e.g., T cells, NK cells) that are engineered to express the conventional CARs or backbones comprising antigen specific CARs specific to thrombopoietin receptor (MPL). In some embodiments, the hematological cancers include chronic myelogenous leukemia (CML), Acute Myeloid Leukemia and Myelodysplastic syndrome. In some embodiments, a cancer that can be treated using the compositions and methods of the present invention is multiple myeloma. Multiple myeloma is a cancer of the blood, characterized by accumulation of a plasma cell clone in the bone marrow. Current therapies for multiple myeloma include, but are not limited to, treatment with lenalidomide, which is an analog of thalidomide. Lenalidomide has activities which include anti-tumor activity, angiogenesis inhibition, and immunomodulation. Generally, myeloma cells are thought to be negative for a cancer associate antigen as described herein expression by flow cytometry. Thus, in some embodiments, a 13CMA CAR (SEQ ID Nos: 951-957), may be used to target myeloma cells. In some embodiments, the CARs of the present invention therapy can be used in combination with one or more additional therapies, e.g., lenalidomide treatment.

[0561] In one aspect, the invention pertains to a method of inhibiting growth of a disease (e.g., cancer, autoimmune disease, infectious disease or allergic disease or a degenerative disease), comprising contacting the disease causing or disease associated cell with a genetically modified cell of the present invention expressing a conventional CAR or a CAR with accessory modules (i.e., backbones 1-62) such that the CAR-T is activated in response to the antigen and targets the disease causing or disease associated cell, wherein the growth of the disease causing or disease associated cell is inhibited. In one aspect, the invention pertains to a method of preventing a disease, comprising administering to a patient at risk of disease a CAR-expressing cell or a cell that is capable of generating a CAR-expressing cell of the present invention such that the CAR-T is activated in response to the antigen and targets the disease causing or disease associated cell, wherein the growth of the disease causing or disease associated cell is prevented. In one aspect the disease is a cancer, an infectious disease, an immune disease, an allergic disease, or a degenerative disease.

[0562] Embodiments of the instant invention includes a type of cellular therapy where effector cells (such as T cells and NK cells) or stem cells that can give rise to effector cells are genetically modified to express a CAR as described herein and the CAR-expressing T cell or NK cell is infused to a recipient in need thereof. The infused cell is able to kill tumor cells in the recipient. In various aspects, the immune effector cells (e.g., T cells, NK cells) administered to the patient, or their progeny, persist in the patient for at least four months, five months, six months, seven months, eight months, nine months, ten months, eleven months, twelve months, thirteen months, fourteen month, fifteen months, sixteen months, seventeen months, eighteen months, nineteen months, twenty months, twenty-one months, twenty-two months, twenty-three months, two years, three years, four years, or five years after administration of the T cell or NK cell to the patient.

[0563] The invention also includes a type of cellular therapy where immune effector cells (e.g., cells, NK cells) are modified, e.g., by in vitro transcribed RNA, to transiently express a conventional CAR or a conventional CAR with accessory modules (e.g., backbones 1-62). T cells or NK cells are infused to a recipient in need thereof. The infused cells are able to kill disease associated cells (e.g., tumor cells or virally infected cells) in the recipient. Thus, in various aspects, the CAR-expressing immune effector cells (e.g., T cells, NK cells) persist for less than one month, e.g., three weeks, two weeks, one week, after administration of the cell or NK cell to the patient,

[0564] The invention also includes a type of cellular therapy where stem cells (e.g., hematopoietic stem cell or lymphoid stem cells or embryonic stem cells, or induced pluripotent stem cells) that are capable of giving rise to immune effector cells (e.g., T cells or NK cells) are modified to express a conventional CAR or a conventional CAR with accessory modules (e.g., backbones 1-62) and are administered to a recipient in need thereof. The administered stem cells give rise to immune effector cells (e.g., T cells or NK cells) after transplantation into the recipient, which (i.e. the immune effector cells) are able to kill disease associated cells in the recipient. Thus, in various aspects, the immune effector cells (e.g., T cells, NK cells) that are produced in the patient after administration of CAR-expressing stem cells persist in the patient for at least one week, 2 weeks, 3 weeks, one month, two months, three months, four months, five months, six months, seven months, eight months, nine months, ten months, eleven months, twelve months, thirteen months, fourteen month, fifteen months, sixteen months, seventeen months, eighteen months, nineteen months, twenty months, twenty-one months, twenty-two months, twenty three months, two years, three years, four years, five years, ten years or twenty years after administration of the genetically modified stem cells to the patient. The invention also includes a type of cellular therapy where stem cells that are capable of giving rise to immune effector cells (e.g., T cells or NK cells) are modified to express a conventional CAR or a conventional CAR with accessory modules (e.g. backbones 1-62) and are differentiated in vitro to generate immune effector cells that are infused to a recipient in need thereof. The infused immune effector cells (e.g., T cells or NK cells) after infusion into the recipient are able to kill disease associated cells in the recipient. Thus, in various aspects, the immune effector cells (e.g., T cells, NK cells) that are administered to the patient persist in the patient for at least I day, 2 days, 3 days, 4 days, 5 days, 6 days, one week, 2 weeks, 3 weeks, one month, two months, three months, four months, five months, six months, seven months, eight months, nine months, ten months, eleven months, twelve months, thirteen months, fourteen month, fifteen months, sixteen months, seventeen months, eighteen months, nineteen months, twenty months, twenty-one months, twenty-two months, twenty three months, two years, three years, four years, five years, ten years or twenty years.

[0565] The invention also includes a type of cellular therapy where regulatory immune effector cells (e.g., TREG, or CD25+ T Cells) are modified to express a conventional CAR or a conventional CAR with accessory modules (e.g., backbones 1-62) targeting a specific antigen. Such CAR-TREG are administered to a patient to suppress immune response against the specific antigen. The CAR-TREG can be used to prevent and treat autoimmune diseases and to enhance immune tolerance.

[0566] The anti-tumor immunity response elicited by the CAR-modified immune effector cells (e.g., T cells, NK cells) may be an active or a passive immune response, or alternatively may be due to a direct vs indirect immune response. In one aspect, the CAR-transduced immune effector cells (e.g., T cells, NK cells) exhibit specific pro-inflammatory cytokine secretion and potent cytolytic activity in response to human diseased cells (e.g., cancer or infected cells) expressing the disease associate antigen as described herein, resist soluble disease associate antigen as described herein, mediate bystander killing and mediate regression of an established human disease, including cancer.

[0567] The invention also includes a type of cellular therapy where immune effector cells (e.g., T cells and NK cells) or stem cells that are capable of giving rise to immune effector cells (e.g., cells or NK cells) are modified to express a conventional CAR or a conventional CAR with accessory modules (e.g., backbones 1-62) and are used ex vivo to purge the bone marrow or peripheral blood hematopoietic stem cells of disease-associated cells (e.g. cancer cells). As an example, T cells expressing a CD19-specific CAR are cocultured with bone marrow or peripheral blood stem cell sample taken from a patient with acute lymphocytic leukemia or non-Hodgkin lymphoma so as to kill off any leukemia or lymphoma cells present in the bone marrow or peripheral blood stem cell preparation. After a suitable duration of culture in vitro (ex vivo), which may range from a 6 hours to several days, the purged bone marrow and peripheral blood sample is used for autologous transplant in the patient.

[0568] Ex vivo expansion of hematopoietic stem and progenitor cells has been described in U.S. Pat. No. 5,199,942., and is incorporated herein by reference, and can be applied to the cells of the present invention. However, the present invention is not limited to any particular method of ex vivo expansion of the cells and other suitable methods known in the art can be utilized. Briefly, ex vivo culture and expansion of hematopoietic stem cells comprises: (1) collecting CD34+ hematopoietic stem and progenitor cells from a mammal from peripheral blood harvest or bone marrow explants; and (2) expanding such cells ex vivo. In addition to the cellular growth factors described in U.S. Pat. No. 5,199,942, other factors such as flt3-L, IL-1, IL-3 and c-kit ligand, can be used for culturing and expansion of the cells.

[0569] In addition to using a cell-based vaccine in terms of ex vivo immunization, the present invention also provides compositions and methods for in vivo immunization to elicit an immune response directed against an antigen in a patient.

[0570] in some embodiments, the fully-human CAR-modified genetically modified cells (such as T cells, NK cells) of the invention may be a type of vaccine for ex vivo immunization and/or in vivo therapy in a mammal (for example, human). With respect to ex vivo immunization, at least one of the following occurs in vitro prior to administering the cell into a mammal: i) expansion of the cells, ii) introducing a nucleic acid encoding a CAR to the cells or iii) cryopreservation of the cells. Ex vivo procedures are well known in the art for example, as described in U.S. Pat. No. 5,199,942, incorporated herein by reference.

[0571] In addition to using a cell-based vaccine in terms of ex vivo immunization, the present invention also provides compositions and methods for in vivo immunization to elicit an immune response directed against an antigen in a patient.

[0572] Further described herein are methods for controlling the activity of CAR-T cells and Bispecific T cell Engager (BiTE) (such as Blincyto or Blinatumomab) when administered to the patients. In some embodiment these methods can be used to control the side effects of CAR-T cells and BiTE, such as cytokine release syndrome, capillary leak syndrome and neurological complications. In majority of patients who respond to engineered CAR T cells and Blinatumomab, excessive release of proinflammatory cytokines causes symptoms that include fevers, hypotension, hypoxemia, cardiac dysfunction, kidney failure and electrolyte abnormalities, collectively termed as “Cytokine release syndrome' (CRS). A number of these patients require admission to intensive care units for pressure support and artificial ventilation. In significant number of cases, CAR T cells and Blinatumomab therapy can lead to neurologic symptoms including tremor, seizures and can be fatal. Although a number of treatment approaches, including steroids and an IL6 receptor antibody, are used for the treatment of these disorders, a number of patients are refractory to such therapies. The instant invention provides a novel method for the treatment and prevention of complications, such as cytokine release syndrome and neurological complications, of adoptive cellular therapies, including but not limited to CAR-T cell and Bispecific T cell engagers (BiTE). In some embodiment the method involves administration of inhibitors of tyrosine kinases, particularly Scr family kinase, and in particular Lck kinase. In one embodiment, the method involves administration of Dasatinib, an oral small molecule inhibitor of Abl and Src family tyrosine kinases (SFK), including p56Lck (Lck) (Lee K C et al, Leukemia (2010) 24, 896-900). Dasatinib has been previously shown to block antigen-specific effector T cell functions (Weichsel R et al, Clin Cancer Res 2008; 14(8), 2484). However, it has never been tested for the ability to block functions of CAR-T cells and Bispecific T cell engagers. CAR-expressing T cells have been detected in the cerebrospinal fluid (CSF) of patients suffering from neurological complications (Hu, Y et al, Journal of Hematology & Oncology20169:70). A particularly important advantage of Dasatinib for the treatment and prevention of cytokine release syndrome and neurological complications caused by CAR-T cells and BiTE is its ability to cross the blood-brain barrier and achieve effective concentration in the brain when administered at clinically acceptable doses (Porkka K et al., Blood. 2008 Aug. 15; 112(4):1005-12). Therefore, Dasatinib is expected to block the effector functions, including cytokine release, of CAR-T cells that have crossed the blood brain barrier.

[0573] In one embodiment, the Src kinase inhibitor is administered to the patient after the administration of CAR-expressing cells to control or terminate the activity of CAR-expressing cells. In one embodiment, an Lck inhibitor is administered to the patient after the administration of CAR-expressing cells to control or terminate the activity of CAR-expressing cells. In one embodiment, Lck inhibitor is A-770041.

[0574] In one embodiment, Dasatinib is administered to the patient after the administration of CAR-expressing cells to control or terminate the activity of CAR-expressing cells. In one embodiment, dasatinib is administered orally at a dose of at least 10 mg/day, 20 mg/day, 40 mg/day, 60 mg/day, 70 mg/day, 90 mg/day, 100 mg/day, 140 mg/day, 180 mg/day, 210 mg/day, 250 mg/day or 280 mg/day.

[0575] In one embodiment, Ponatinib is administered to the patient after the administration of CAR-expressing cells to control or terminate the activity of CAR-expressing cells. In one embodiment, ponatinib is administered orally at a dose of at least 15 mg/day, 30 mg/day, 45 mg/day, 60 mg/day.

[0576] T lymphocytes have a limited replicative life span until they reach the terminally differentiated state and then enter into a replicative senescence phase due to progressive loss of telomeres with age. Human T lymphocytes display a limited life-span of about 30-50 population doublings when cultured in vitro.

[0577] Further contemplated herein are methods for promoting the survival and proliferation of peripheral blood mononuclear cells and T cells and preventing their replicative senescence to extend the life span of immune cells (e.g., lymphocytes and NK cells) for the purpose of adoptive cell therapy. The method entails ectopic expression of viral and cellular proteins that promote survival and proliferation and block activation induced cell death. The exemplary viral proteins suitable for this purpose include viral FLICE Inhibitory Protein (vFLIP) K13 encoded by the Kaposi's sarcoma associated herpesvirus (also known as human herpesvirus 8), MC159-vFLIP and MC160 vFLIP from the molluscum contagiosum virus (MCV), E8-vFLIP from the equine herpesvirus 2 (EHV2), bovine herpesvirus 4 encoded vFLIP (BHV-vFLIP), vFLIP encoded by herpesvirus mecaca, vFLIP encoded by herpesvirus saimiri and HTLV1-encoded Tax, HTLV2-encoded Tax and HTLV2-encoded Tax-RS mutant. Exemplary cellular proteins suitable for this purpose include cFLIP-L isoform or MRIT-a, cFLIP-p22 deletion mutant or MRIT-p22 (Bertin et al., Proc Natl Acad Sci USA 94:1172-6, 1997; Hu et al., J Biol Chem 272:9621-4, 1997; Thome et al., Nature 386:517-21, 1997). In some embodiments, the above viral and cellular proteins are expressed in the immune cells (e.g., T cells and NK cells) in their native state or carrying small epitope tags and are functionally active in a constitutive manner. In other embodiments, the above viral and cellular proteins are expressed in the immune cells (e.g., T cells and NK cells) in fusion with one or more copies of a switch domain (or a dimerization domain), such as FKBP (SEQ ID NOs: 2620 and 2621) and FKBPx2 (SEQ ID NO: 2622). In other embodiment, the FKBP or the FKBP-×2 domain may additionally carry an N-terminal myrisotylation (Myr) sequence to anchor the fusion proteins to the cell membrane. The sequence of an exemplary FKBPx2-K13 fusion protein carrying a Myr sequence is presented in SEQ ID NO: 2623. The fusion proteins carrying the switch domains are functionally inactive in their basal state but are activated upon addition of a dimerizer agent, such as AP20187.

[0578] In an embodiment, an immune effector cell, e.g., a T cell, ectopically expresses a viral or cellular signaling protein selected from the group of K13-vFLIP (SEQ ID NO: 2629), MC159-vFLIP (SEQ ID NO: 2630), MC160-vFLIP (SEQ ID NO: 2631), E8-vFLIP (SEQ ID NO: 2632), BHV-vFLIP (SEQ ID NO: 2635), mecaca vFLIP (SEQ ID NO: 2634), herpesvirus saimiri vFLIP (SEQ ID NO: 2633), cFLIP-L/MRITα (SEQ ID NO: 2636), cFLIP-p22 (SEQ ID NO: 2637), HTLV1-Tax (SEQ ID NO: 2638), HTLV2-Tax (SEQ ID NO: 2639), HTLV2-Tax-RS mutants (SEQ ID NO: 2640) or proteins with 70-99% identity to amino acid sequences of the above proteins (SEQ ID NOs: 2629 to 2640).

[0579] In an embodiment, an immune effector cell, e.g., a T cell, ectopically expresses a fusion protein containing one or more switch domains, e.g., FKBP (SEQ ID NO: 2620-2621), FKBPx2 (SEQ ID NO: 2622) or Myr-FKBP, and one or more viral or cellular signaling protein selected from the group of K13-vFLIP (SEQ ID NO: 2629), MC159-vFLIP (SEQ ID NO: 2630), MC160-vFLIP (SEQ ID NO: 2631), E8-vFLIP (SEQ ID NO: 2632), BHV-vFLIP (SEQ ID NO: 2635), mecaca vFLIP (SEQ ID NO: 2634), herpesvirus saimiri vFLIP (SEQ ID NO: 2633), cFLIP-L/MRITα (SEQ ID NO: 2636), cFLIP-p22 (SEQ ID NO: 2637), HTLV1-Tax (SEQ ID NO: 2638), HTLV2-Tax (SEQ ID NO: 2639), HTLV2-Tax-RS mutants (SEQ ID NO: 2640) or proteins with 70-99% identity to amino acid sequences of SEQ ID NOs: 2629 to 2640. Exemplary fusion proteins containing one or more switch domains and viral signaling proteins are represented by SEQ ID NOs: 2641-2645.

[0580] In some aspects, this disclosure provides a method of producing an immune effector cell suitable for adoptive cellular therapy, comprising contacting the cell with a nucleic acid encoding one or more of a viral or cellular signaling protein selected from the group of K13-vFLIP (SEQ ID NO: 2629), MC159-vFLIP (SEQ ID NO: 2630), MC160-vFLIP (SEQ ID NO: 2631), E8-vFLIP (SEQ ID NO: 2632), BHV-vFLIP (SEQ ID NO: 2635), mecaca vFLIP (SEQ ID NO: 2634), herpesvirus saimiri vFLIP (SEQ ID NO: 2633), cFLIP-L/MRITα (SEQ ID NO: 2636), cFLIP-p22 (SEQ ID NO: 2637), HTLV1-Tax (SEQ ID NO: 2638), HTLV2-Tax (SEQ ID NO: 2639), HTLV2-Tax-RS mutants (SEQ ID NO: 2640) or proteins with 70-99% identity to amino acid sequences of SEQ ID NOs: 2629 to 2640.

[0581] In some aspects, this disclosure provides a method of producing an immune effector cell suitable for adoptive cellular therapy, comprising contacting the cell with a nucleic acid encoding expresses a fusion protein containing one or more switch domains, e.g., FKBP (SEQ ID NO: 2620-2621), FKBPx2 (SEQ ID NO: 2622) or Myr-FKBP, and one or more viral or cellular signaling protein selected from the group of K13-vFLIP (SEQ ID NO: 2629), MC159-vFLIP (SEQ ID NO: 2630), MC160-vFLIP (SEQ ID NO: 2631), E8-vFLIP (SEQ ID NO: 2632), BHV-vFLIP (SEQ ID NO: 2635), mecaca vFLIP (SEQ ID NO: 2634), herpesvirus saimiri vFLIP (SEQ ID NO: 2633), cFLIP-L/MRITα (SEQ ID NO: 2636), cFLIP-p22 (SEQ ID NO: 2637), HTLV1-Tax (SEQ ID NO: 2638), HTLV2-Tax (SEQ ID NO: 2639), HTLV2-Tax-RS mutants (SEQ ID NO: 2640) or proteins with 70-99% identity to amino acid sequences of SEQ ID NOs: 2629 to 2640.

[0582] In an embodiment, the cell suitable for adoptive cell therapy expresses a natural or synthetic immune receptor. Exemplary such immune receptors include a chimeric antigen receptor (CAR), a T cell receptor (TCR), a chimeric T cell receptor (cTCR), a synthetic T cell receptor and a synthetic notch receptor. In an embodiment, the cell may be contacted with the nucleic acid encoding the viral and cellular signaling proteins before, simultaneous with, or after being contacted with a construct encoding a natural or synthetic immune receptor. In an embodiment, the cell may be contacted with the nucleic acid encoding the viral and cellular signaling proteins containing a switch or dimerization domain before, simultaneous with, or after being contacted with a construct encoding a natural or synthetic immune receptor.

[0583] In one aspect, the disclosure features a method of making a population of immune effector cells (e.g., T cells, NK cells). In an embodiment, the method comprises: providing a population of immune effector cells (e.g., T cells or NK cells), contacting the population of immune effector cells with a nucleic acid encoding an immune receptor (e.g., CAR, TCR, synthetic TCR) and contacting the population of immune effector cells with a nucleic acid encoding a viral or cellular signaling protein of SEQ ID NOs: 2629-2645, under conditions that allow for immune receptor and viral or cellular signaling protein co-expression.

[0584] In an embodiment, the nucleic acid encoding the viral or cellular signaling protein of SEQ ID NOs: 2629-2645 is DNA. In an embodiment, the nucleic acid encoding the viral or cellular signaling protein of SEQ ID NOs: 2629-2645 contains promoter capable of driving expression of the viral and cellular signaling proteins. In an embodiment, the nucleic acid encoding the viral or cellular signaling protein of SEQ ID NOs: 2629-2645 and the nucleic acid encoding the immune receptor is expressed from the same vector. In an embodiment, the nucleic acid encoding the viral or cellular signaling protein of SEQ ID NOs: 2629-2645 and the nucleic acid encoding the immune receptor is expressed from separate vectors. In an embodiment, the nucleic acid encoding the viral or cellular signaling protein of SEQ ID NOs: 2629-2645 (subunit 1) and the nucleic acid encoding the immune receptor (subunit 2) is expressed from the same polynucleotide fragment containing an internal ribosomal entry site (IRES) that allows the translation of the second subunit. In an embodiment, the nucleic acid encoding the viral or cellular signaling protein of SEQ ID NOs: 2629-2645 (subunit 1) and the nucleic acid encoding the immune receptor (subunit 2) is expressed from a single polynucleotide fragment that encodes and the different subunits are separated by a cleavable linker (e.g., SEQ ID NOs: 831-836).

[0585] In an embodiment, the nucleic acid encoding the viral or cellular signaling protein of SEQ ID NOs: 2629-2645 is an in vitro transcribed RNA. In an embodiment, the viral or cellular signaling protein of SEQ ID NOs: 2629-2645 (subunit 1) and the immune receptor (subunit 2) is expressed from the same RNA containing an internal ribosomal entry site (IRES) that allows the translation of the second subunit. In an embodiment, the viral or cellular signaling protein of SEQ ID NOs: 2629-2645 (subunit 1) and the immune receptor (subunit 2) is expressed from a single RNA and the different subunits are separated by cleavable linkers (e.g., SEQ ID NOs: 831-836).

### Combination Therapies

[0586] Therapeutic methods described herein comprise using compositions comprising genetically modified cells comprising nucleic acids encoding CARs described herein. In various embodiments, the therapeutic methods described herein may be combined with existing therapies and agents. The therapeutic compositions described herein, comprising genetically modified cells comprising nucleic acids encoding the CARs described herein, are administered to the subject with at least one additional known therapy or therapeutic agent. In some embodiments, the compositions described herein and the additional therapy or therapeutic agents are administered sequentially. In some embodiments, the compositions described herein and the additional therapy or therapeutic agents are administered simultaneously. The optimum order of administering the compositions described herein and the existing therapies will be apparent to a person of skill in the art, such as a physician.

[0587] A CAR-expressing cell described herein and the at least one additional therapeutic agent can be administered simultaneously, in the same or in separate compositions, or sequentially. For sequential administration, the CAR-expressing cell described herein can be administered first, and the additional agent can be administered second, or the order of administration can be reversed.

[0588] Combinations therapies may be administered to the subject over the duration of the disease. Duration of the disease includes from diagnosis until conclusion of treatment, wherein the treatment results in reduction of symptoms and/or elimination of symptoms. In various embodiments, the effect of the two treatments can be partially additive, wholly additive, or greater than additive. The delivery can be such that an effect of the first treatment delivered is still detectable when the second is delivered.

[0589] The CAR therapy and/or other therapeutic agents, procedures or modalities can be administered during periods of active disorder, or during a period of remission or less active disease. The CAR therapy can be administered before the other treatment, concurrently with the treatment, post-treatment, or during remission of the disorder.

[0590] When administered in combination, the CAR therapy and the additional agent (e.g., second or third agent), or all, can be administered in an amount or dose that is higher, lower or the same than the amount or dosage of each agent used individually, e.g., as a monotherapy. In certain embodiments, the administered amount or dosage of the CAR therapy, the additional agent (e.g., second or third agent), or all, is lower (e.g., at least 20%, at least 30%, at least 40%, or at least 50%) than the amount or dosage of each agent used individually, e.g., as a monotherapy. In other embodiments, the amount or dosage of the CAR therapy, the additional agent (e.g., second or third agent), or all, that results in a desired effect (e.g., treatment of cancer) is lower (e.g., at least 20%, at least 30%, at least 40%, or at least 50% lower) than the amount or dosage of each agent used individually, e.g., as a monotherapy, required to achieve the same therapeutic effect.

[0591] Further method aspects relate administering to the subject an effective amount of a cell, e.g., an immune effector cell, or a population thereof, each cell comprising a CAR molecule, optionally in combination with an agent that increases the efficacy and/or safety of the immune cell. In further aspects, the agent that increases the efficacy and/or safety of the immune cell is one or more of: (i) a protein phosphatase inhibitor; (ii) a kinase inhibitor; (iii) a cytokine; (iv) an inhibitor of an immune inhibitory molecule; or (v) an agent that decreases the level or activity of a TREG cell; vi) an agent that increase the proliferation and/or persistence of CAR-modified cells vii) a chemokine viii) an agent that increases the expression of CAR ix) an agent that allows regulation of the expression or activity of CAR x) an agent that allows control over the survival and/or persistence of CAR-modified cells xi) an agent that controls the side effects of CAR-modified cells xii) a Brd4 inhibitor xiii) an agent that delivers a therapeutic (e.g. sHVEM) or prophylactic agent to the site of the disease xiv) an agent that increases the expression of the target antigen against which CAR is directed; xv) an adenosine Ata receptor antagonist

[0592] In some embodiments, a the genetically modified cells described herein may be used in a treatment regimen in combination with surgery, chemotherapy, radiation, immunosuppressive agents, such as cyclosporin, azathioprine, methotrexate, mycophenolate, and FK506, antibodies, or other immunoablative agents such as CAMPATH, anti-CD3 antibodies or other antibody therapies, cytoxin, fludarabine, cyclosporin, FK506, rapamycin, mycophenolic acid, steroids. FR901228, cytokines, and irradiation, peptide vaccine, such as that described in Izumoto et al. 2008 J Neurosurg 108:963-971. In one embodiment, a CAR-expressing cell described herein can be used in combination with a chemotherapeutic agent Exemplary chemotherapeutic agents include an anthracycline (e.g., doxorubicin (e.g., liposomal doxorubicin)), a vinca alkaloid (e.g., vinblastine, vincristine, vindesine, vinorelbine), an alkylating agent (e.g, cyclophosphamide, decarbazine, melphalan, ifosfamide, temozolomide), an immune cell antibody (e.g., alemtuzamab, gemtuzumab, rituximab, ofatumumab, tositumomab, brentuximab), an antimetabolite (including, e.g, folic acid antagonists, pyrimidine analogs, purine analogs and adenosine deaminase inhibitors (e.g., fludarabine)), an mTOR inhibitor, a TNFR glucocorticoid induced TNFR related protein (GITR) agonist, a proteasome inhibitor (e.g., aclacinomycin A, gliotoxin or bortezomib), an immunomodulator such as thalidomide or a thalidomide derivative (e.g., lenalidomide).

[0593] In embodiments, a CAR-expressing cell described herein is administered to a subject in combination with cyclophosphamide and fludarabine.

[0594] In embodiments, a CAR-expressing cell described herein is administered to a subject in combination with bendamustine and rituximab. In embodiments, the subject has CLL.

[0595] In embodiments, a CAR-expressing cell described herein is administered to a subject in combination with rituximab, cyclophosphamide, doxorubicin, vincristine, and/or a corticosteroid (e.g., prednisone). In embodiments, a CAR-expressing cell described herein is administered to a subject in combination with rituximab, cyclophosphamide, doxorubicin, vincristine, and prednisone (R-CHOP). In embodiments, the subject has diffuse large B-celllymphoma (DLBCL).

[0596] In embodiments, a CAR-expressing cell described herein is administered to a subject in combination with etoposide, prednisone, vincristine, cyclophosphamide, doxorubicin, and/or rituximab. In embodiments, a CAR-expressing cell described herein is administered to a subject in combination with etoposide, prednisone, vincristine, cyclophosphamide, doxorubicin, and rituximab (EPOCH-R). In embodiments, a CAR-expressing cell described herein is administered to a subject in combination with dose adjusted EPOCH-R (DA-EPOCH-R). In embodiments, the subject has a B cell lymphoma, e.g., a Myc-rearranged aggressive B cell lymphoma.

[0597] In embodiments, a CAR-expressing cell described herein is administered to a subject in combination with brentuximab. Brentuximab is an antibody-drug conjugate of anti-CD30 antibody and monomethyl auristatin E. In embodiments, the subject has Hodgkin's lymphoma (HL), e.g., relapsed or refractory HL. In embodiments, the subject comprises CD30+HL. In embodiments, the subject has undergone an autologous stem cell transplant (ASCT).

[0598] In some embodiments, a CAR-expressing cell described herein is administered to a subject in combination with a CD20 inhibitor, e.g., an anti-CD20 antibody (e.g., an anti-CD20 mono- or bispecific antibody) or a fragment thereof.

[0599] In one embodiment, a CAR expressing cell described herein is administered to a subject in combination with an mTOR inhibitor, e.g., an mTOR inhibitor described herein, e.g., a rapalog such as everolimus. In one embodiment, the mTOR inhibitor is administered prior to the CAR-expressing cell. For example, in one embodiment, the mTOR inhibitor can be administered prior to apheresis of the cells. In one embodiment, the subject has CLL.

[0600] In one embodiment, a CAR-expressing cell described herein can be used in combination with a kinase inhibitor. In one embodiment, the kinase inhibitor is a CDK4 inhibitor, e.g., a CDK4 inhibitor described herein, e.g., a CD4/6 inhibitor, such as, e.g., 6-Acetyl-8-cyclopentyl-5-methyl-2-(5-piperazin-1-yl-pyridin-2-ylamino)-8H-pyrido[2,3-d]pyrimidin-7-one, hydrochloride (also referred to as palbociclib or PD0332991). In one embodiment, the kinase inhibitor is a BTK inhibitor, e.g., a BTK inhibitor described herein, such as, e.g., ibrutinib. In some embodiments, ibrutinib is administered at a dosage of about 300-600 mg/day (e.g., about 300-350, 350-400, 400-450, 450-500, 500-550, or 550-600 mg/day, e.g., about 420 mg/day or about 560 mg/day), e.g., orally. In embodiments, the ibrutinib is administered at a dose of about 250 mg, 300 mg, 350 mg, 400 mg, 420 mg, 440 mg, 460 mg, 480 mg, 500 mg, 520 mg, 540 mg, 560 mg, 580 mg, 600 mg (e.g., 250 mg, 420 mg or 560 mg) daily for a period of time, e.g., daily for 21 day cycle, or daily for 28 day cycle. In one embodiment, 1, 2, 3, 4, 5, 6, 7, 8, 9, 10, 11, 12 or more cycles of ibrutinib are administered. Without being bound by theory, it is thought that the addition of ibrutinib enhances the T cell proliferative response and may shift T cells from a T-helper-2 (Th2) to T-helper-1 (Th1) phenotype. Th1 and Th2 are phenotypes of helper T cells, with Th1 versus Th2 directing different immune response pathways. A Th1 phenotype is associated with proinflammatory responses, e.g., for killing cells, such as intracellular pathogens/viruses or cancerous cells, or perpetuating autoimmune responses. A Th2 phenotype is associated with eosinophil accumulation and anti-inflammatory responses. In one embodiment, the kinase inhibitor is an mTOR inhibitor, e.g., an mTOR inhibitor described herein, such as, e.g., rapamycin, a rapamycin analog, OSI-027. The mTOR inhibitor can be, e.g., an mTORC1 inhibitor and/or an mTORC2 inhibitor, e.g., an mTORC1 inhibitor and/or mTORC2 inhibitor described herein. In one embodiment, the kinase inhibitor is a MNK inhibitor, e.g., a MNK inhibitor described herein, such as, e.g., 4-amino-5-(4-fluoroanilino)-pyrazolo [3,4-d] pyrimidine. The MNK inhibitor can be, e.g., a MNK1a, MNK1b, MNK2a and/or MNK2b inhibitor. In one embodiment, the kinase inhibitor is a dual PI3K/mTOR inhibitor described herein, such as, e.g., PF-04695102. In one embodiment, the kinase inhibitor is a Src kinase inhibitor. In one embodiment, the kinase inhibitor is Dasatinib. In one embodiment, the Src kinase inhibitor is administered to the patient after the administration of CAR expressing cells to control or terminate the activity of CAR-expressing cells. In one embodiment, Dasatinib is administered to the patient after the administration of CAR expressing cells to control or terminate the activity of CAR-expressing cells. In one embodiment, dasatinib is administered orally at a dose of at least 10 mg/day, 20 mg/day, 40 mg/day, 60 mg/day, 70 mg/day, 90 mg/day, 100 mg/day, 140 mg/day, 180 mg/day or 210 mg/day.

[0601] In embodiments, a CAR-expressing cell described herein is administered to a subject in combination with an anaplastic lymphoma kinase (ALK) inhibitor. Exemplary ALK kinases include but are not limited to crizotinib (Pfizer), ceritinib (Novartis), alectinib (Chugai), brigatinib (also called AP26113; Ariad), entrectinib (Ignyta), PF-06463922 (Pfizer), TSR-011 (Tesaro) (see, e.g., Clinical Trial Identifier No. NCT02048488), CEP-37440 (Teva), and X-396 (Xcovery). In some embodiments, the subject has a solid cancer, e.g., a solid cancer described herein, e.g., lung cancer.

[0602] Drugs that inhibit either the calcium dependent phosphatase calcineurin (cyclosporine and FK506) or inhibit the p70S6 kinase that is important for growth factor induced signaling (rapamycin). (Liu et al., Ce1166:807-815, 1991; Henderson et al., Immun. 73:316-321, 1991; Bierer et al., Curr. Opin. Immun. 5:763-773, 1993) can also be used. In a further aspect, the cell compositions of the present invention may be administered to a patient in conjunction with (e.g., before, simultaneously or following) bone marrow transplantation, T cell ablative therapy using chemotherapy agents such as, fludarabine, external-beam radiation therapy (XRT), cyclophosphamide, and/or antibodies such as OKT3 or CAMP ATH. In one aspect, the cell compositions of the present invention are administered following B-cell ablative therapy such as agents that react with CD20, e.g., Rituxan. For example, in one embodiment, subjects may undergo standard treatment with high dose chemotherapy followed by peripheral blood stem cell transplantation. In certain embodiments, following the transplant, subjects receive an infusion of the expanded immune cells of the present invention. In an additional embodiment, expanded cells are administered before or following surgery.

[0603] In embodiments, a CAR-expressing cell described herein is administered to a subject in combination with an autologous stem cell transplant, an allogeneic stem cell transplant, an autologous bone marrow transplant or an allogeneic bone marrow transplant.

[0604] In embodiments, a CAR-expressing cell described herein is administered to a subject in combination with microtransplant or HLA mismatched allogeneic cellular therapy (Guo M et al, J Clin Oncol. 2012 Nov. 20; 30(33):4084-90).

[0605] In embodiments, a CAR-expressing cell described herein is administered to a subject in combination with an indoleamine 2,3-dioxygenase (IDO) inhibitor.

[0606] In embodiments, a CAR-expressing cell described herein is administered to a subject in combination with a modulator of myeloid-derived suppressor cells (MDSCs). MDSCs accumulate in the periphery and at the tumor site of many solid tumors. These cells suppress T cell responses, thereby hindering the efficacy of CAR-expressing cell therapy. Without being bound by theory, it is thought that administration of a MDSC modulator enhances the efficacy of a CAR-expressing cell described herein. In an embodiment, the subject has a solid tumor, e.g., a solid tumor described herein, e.g., glioblastoma. Exemplary modulators of MDSCs include but are not limited to MCSllO and BLZ945. MCSllO is a monoclonal antibody (mAb) against macrophage colony-stimulating factor (M-CSF). See, e.g., Clinical Trial Identifier No. NCT00757757. BLZ945 is a small molecule inhibitor of colony stimulating factor 1 receptor (CSF1R). See, e.g., Pyonteck et al. Nat. Med. 19(2013): 1264-72.

[0607] In embodiments, a CAR-expressing cell described herein is administered to a subject in combination with a Brd4 or BET (bromodomain and extra-terminal motif) inhibitor. BET protein BRD4 directly regulated expression of the transcription factor BATF in CD8+ T cells, which was associated with differentiation of T cells into an effector memory phenotype. JQ1, an inhibitor of bromodomain and extra-terminal motif (BET) proteins, maintained CD8+ T cells with functional properties of stem cell-like and central memory T cells. Exemplary Brd4 inhibitors that can be administered in combination with CAR-expressing cells include but are not limited to JQ1, MS417, OTXO15, LY 303511 and Brd4 inhibitor as described in US 20140256706 Al and any analogs thereof.

[0608] In some embodiments, a CAR-expressing cell described herein is administered to a subject in combination with a interleukin-15 (IL-15) polypeptide, a interleukin-15 receptor alpha (IL-15Ra) polypeptide, or a combination of both a IL-15 polypeptide and a IL-15Ra polypeptide e.g., hetiL-15 (Admune Therapeutics, LLC). hetiL-15 is a heterodimeric non-covalent complex of IL-15 and IL-15Ra. hetiL-15 is described in, e.g., U.S. Pat. No. 8,124,084, U.S. 2012/0177598, U.S. 2009/0082299, U.S. 2012/0141413, and U.S. 201110081311, incorporated herein by reference. In embodiments, het-IL-15 is administered subcutaneously. In embodiments, the subject has a cancer, e.g., solid cancer, e.g., melanoma or colon cancer. In embodiments, the subject has a metastatic cancer.

[0609] In one embodiment, the subject can be administered an agent which reduces or ameliorates a side effect associated with the administration of a CAR-expressing cell. Side effects associated with the administration of a CAR-expressing cell include, but are not limited to CRS, and hemophagocytic lymphohistiocytosis (HLH), also termed Macrophage Activation Syndrome (MAS). Symptoms of CRS include high fevers, nausea, transient hypotension, hypoxia, and the like. CRS may include clinical constitutional signs and symptoms such as fever, fatigue, anorexia, myalgias, arthalgias, nausea, vomiting, and headache. CRS may include clinical skin signs and symptoms such as rash. CRS may include clinical gastrointestinal signs and symptoms such as nausea, vomiting and diarrhea. CRS may include clinical respiratory signs and symptoms such as tachypnea and hypoxemia. CRS may include clinical cardiovascular signs and symptoms such as tachycardia, widened pulse pressure, hypotension, increased cardiac output (early) and potentially diminished cardiac output (late). CRS may include clinical coagulation signs and symptoms such as elevated d-dimer, hypofibrinogenemia with or without bleeding. CRS may include clinical renal signs and symptoms such as azotemia. CRS may include clinical hepatic signs and symptoms such as transaminitis and hyperbilirubinemia. CRS may include clinical neurologic signs and symptoms such as headache, mental status changes, confusion, delirium, word finding difficulty or frank aphasia, hallucinations, tremor, dymetria, altered gait, and seizures.

[0610] Accordingly, the methods described herein can comprise administering a CAR-expressing cell described herein to a subject and further administering one or more agents to manage elevated levels of a soluble factor resulting from treatment with a CAR-expressing cell. In one embodiment, the soluble factor elevated in the subject is one or more of IFN-γ, TNFa, IL-2 and IL-6. In an embodiment, the factor elevated in the subject is one or more of IL-1, GM-CSF, IL-10, IL-8, IL-5 and fraktalkine. Therefore, an agent administered to treat this side effect can be an agent that neutralizes one or more of these soluble factors. In one embodiment, the agent that neutralizes one or more of these soluble forms is an antibody or antigen binding fragment thereof. Examples of such agents include, but are not limited to a steroid (e.g., corticosteroid), Src inhibitors (e.g., Dasatinib) an inhibitor of TNFa, and an inhibitor of IL-6. An example of a TNFα inhibitor is an anti-TNFα antibody molecule such as, infliximab, adalimumab, certolizumab pegol, and golimumab. Another example of a TNFα inhibitor is a fusion protein such as entanercept. An example of an IL-6 inhibitor is an anti-IL-6 antibody molecule or an anti-IL-6 receptor antibody molecule such as tocilizumab (toe), sarilumab, elsilimomab, CNTO 328, ALD518/BMS-945429, CNTO 136, CPSI-2364, CDP6038, VX30, ARGX-109, FE301, and FM101. In one embodiment, the anti-IL-6 receptor antibody molecule is tocilizumab. In one embodiment, the IL-6 inhibitor is a camelid bispecific antibody that binds to IL6R and human serum albumin (e.g., IL6R-304-A1b8) (SEQ ID NO: 2649). An example of an IL-1R based inhibitor is anakinra. In one embodiment, an agent administered to treat the side effects of CAR-expressing cells is a Src inhibitor (e.g., Dasatinib). In one embodiment, an agent administered to treat the side effects of CAR-expressing cells is the Src inhibitor Dasatinib. In embodiments, Dasatinib is administered at a dose of about 10 mg/day to 240 mg/day (e.g., 10 mg/day, 20 mg/day, 40 mg/day, 50 mg/day, 70 mg/day, 80 mg/day, 100 mg/day, 110 mg/day, 120 mg/day, 140 mg/day, 180 mg/day, 210 mg/day, 240 mg/day or 300 mg/day).

[0611] In one embodiment, the subject can be administered an agent which enhances the activity of a CAR-expressing cell. For example, in one embodiment, the agent can be an agent which inhibits an inhibitory molecule. Inhibitory molecules, e.g., Programmed Death 1 (PD-1), can, in some embodiments, decrease the ability of a CAR-expressing cell to mount an immune effector response. Examples of inhibitory molecules include PD-1, PDL1, CTLA-4, TIM-3, CEACAM (e.g., CEACAM-1, CEACAM-3 and/or CEACAM-5), LAG-3, VISTA, BTLA, TIGIT, LAIR1, CD160, 2B4 and TGFR beta. Inhibition of an inhibitory molecule, e.g., by inhibition at the DNA, RNA or protein level, can optimize a CAR-expressing cell performance. In embodiments, an inhibitory nucleic acid, e.g., an inhibitory nucleic acid, e.g., a dsRNA, e.g., an siRNA or shRNA, a clustered regularly interspaced short palindromic repeats (CRISPR), a transcription-activator like effector nuclease (TALEN), or a zinc finger endonuclease (ZFN), e.g., as described herein, can be used to inhibit expression of an inhibitory molecule in the CAR-expressing cell. In an embodiment the inhibitor is an shRNA. In an embodiment, the inhibitory molecule is inhibited within a CAR-expressing cell. In these embodiments, a dsRNA molecule that inhibits expression of the inhibitory molecule is linked to the nucleic acid that encodes a component, e.g., all of the components, of the CAR. In one embodiment, the inhibitor of an inhibitory signal can be, e.g., an antibody or antibody fragment that binds to an inhibitory molecule. For example, the agent can be an antibody or antibody fragment that binds to PD-1, PD-L1, PD-L2 or CTLA4 (e.g., ipilimumab (also referred to as MDX-010 and MDX-101, and marketed as Yervoy®; Bristol-Myers Squibb; Tremelimumab (IgG2 monoclonal antibody available from Pfizer, formerly known as ticilimumab, CP-675, 206).). In an embodiment, the agent is an antibody or antibody fragment that binds to TIM3. In an embodiment, the agent is an antibody or antibody fragment that binds to CEACAM (CEACAM-1, CEACAM-3, and/or CEACAM-5). In an embodiment, the agent is an antibody or antibody fragment that binds to LAG3.

[0612] PD-1 is an inhibitory member of the CD28 family of receptors that also includes CD28, CTLA-4, ICOS, and BTLA. PD-1 is expressed on activated B cells, T cells and myeloid cells. Two ligands for PD-1, PD-L1 and PD-L2 have been shown to down regulate T cell activation upon binding to PD-1. PD-L1 is abundant in human cancers. Immune suppression can be reversed by inhibiting the local interaction of PD-1 with PD-L1. Antibodies, antibody fragments, and other inhibitors of PD-1, PD-L1 and PD-L2 are available in the art and may be used combination with a CAR of the present invention described herein. For example, nivolumab (also referred to as BMS-936558 or MDX1106; Bristol-Myers Squibb) is a fully human IgG4 monoclonal antibody which specifically blocks PD-1. Nivolumab (clone 5C4) and other human monoclonal antibodies that specifically bind to PD-1 are disclosed in U.S. Pat. No. 8,008,449 and WO2006/121168. Pidilizumab (CT-011; Cure Tech) is a humanized IgGlk monoclonal antibody that binds to PD-1. Pidilizumab and other humanized anti-PD-1 monoclonal antibodies are disclosed in WO2009/101611. Pembrolizumab (formerly known as lambrolizumab, and also referred to as MK03475; Merck) is a humanized IgG4 monoclonal antibody that binds to PD-1. Pembrolizumab and other humanized anti-PD-1 antibodies are disclosed in U.S. Pat. No. 8,354,509 and WO2009/114335. MEDI4736 (Medimmune) is a human monoclonal antibody that binds to PDL1, and inhibits interaction of the ligand with PD1. MDPL3280A (Genentech I Roche) is a human Fe optimized IgG1 monoclonal antibody that binds to PD-L1. MDPL3280A and other human monoclonal antibodies to PD-L1 are disclosed in U.S. Pat. No. 7,943,743 and U.S Publication No.: 20120039906. In other embodiments, the agent that enhances the activity of a CAR-expressing cell is a CEACAM inhibitor (e.g., CEACAM-1, CEACAM-3, and/or CEACAM-5 inhibitor).

[0613] In one embodiment, the agent which enhances activity of a CAR-described herein is another agent that increases the expression of the target antigen against which the CAR is directed. The agents that can be administered to the subject receiving a CAR-expressing cell described herein include: Arsenic trioxide, ATRA (all-trans-retinoic acid), compounds 27, 40, 49 of (Du et al, Blood; Prepublished online Oct. 12, 2016), IDH2 inhibitors (e.g., AG-221) or a combination thereof. In an embodiment, the agents are administered prior to, concurrently or after administration of CAR-expressing cells. In preferred embodiments these agents are administered prior to administration of CAR-expressing cells. In preferred embodiment, the CAR expressing cells that are administered with the above agents target a B cell antigen (e.g., CD19, CD20, or CD22 etc.).

[0614] In one embodiment, the agent which enhances activity of a CAR described herein is a soluble receptor. Soluble receptor that can be administered to the subject receiving a CAR-expressing cell described herein include: sHVEM (SEQ ID NO: 2664), sHVEM-Alb8-vHH fusion protein (SEQ ID NO: 2665), or a combination thereof. The soluble receptor can be administered once a day or more than once a day, e.g., twice a day, three times a day, or four times a day. The soluble receptor can be administered for more than one day, e.g. the soluble receptor is administered for 2 days, 3 days, 4 days, 5 days, 6 days, 1 week, 2 weeks, 3 weeks, or 4 weeks. For example, the soluble receptor is administered once a day for 7 days.

[0615] In one embodiment, the subject can be administered an agent which protects against the toxicity of a CAR-expressing cell on normal tissues. One of the limitations of CAR-T cell therapy could be toxicity on normal tissue. For example, CAR targeting CD19 could lead to long-term depletion of normal B cells, which also express CD19 antigen. In one embodiment, CD19 CAR-T cell therapy can be combined with knock-out or mutation of endogenous CD19 in normal hematopoietic stem cells. In one embodiment, the knock out or mutation of the endogenous CD19 is achieved using CRIPS/Cas9, Talons or other suitable gene editing methods which are known in the art. The epitope of CD19 bound by the CD19 CAR-T cells in current clinical use has been mapped to exon2-4. In one embodiment, missense or nonsense mutations are generated in exon 2 (or other suitable exons/regions that are recognized by CD19 targeted CAR T-cells) of autologous or allogeneic hematopoietic stem cells using CRISP/Cas9, Zn finger nucleases, Talons or other methods known in the art. In one embodiment, the subject is given CD19 CART cells infusion to control his/her disease and an autologous or allogeneic stem cell transplant using CD19 deleted/mutated hematopoietic stem cells. As the B cells that will originate from the modified stem cells will not be targeted by CD19-CAR-T cells, the patient will escape B cell aplasia which is a common side effect of CD19 CAR-T cells. In another embodiment, MPL CAR-T cell therapy is combined with knock-out or mutation of endogenous MPL in normal hematopoietic stem cells. In another embodiment, CD123 CAR-T cell therapy is combined with knock-out or mutation of endogenous CD123 in normal hematopoietic stem cells. In another embodiment, CD33 CAR-T cell therapy is combined with knock-out or mutation of endogenous CD33 in normal hematopoietic stem cells. In another embodiment, CD20 CAR-T cell therapy is combined with knock-out or mutation of endogenous CD20 in normal hematopoietic stem cells. In another embodiment, CD22 CAR-T cell therapy is combined with knock-out or mutation of endogenous CD22 in normal hematopoietic stem cells. In another embodiment, CS1 CAR-T cell therapy is combined with knock-out or mutation of endogenous CS1 in normal hematopoietic stem cells. In another embodiment, BCMA CAR-T cell therapy is combined with knock-out or mutation of endogenous BCMA in normal hematopoietic stem cells. In another embodiment, CD45 CAR-T cell therapy is combined with knock-out or mutation of endogenous CD45 in normal hematopoietic stem cells or immune effector cells (e.g., T cells or NK cells). Essentially, a similar approach could be used to mitigate the toxicity of CAR-T cells against normal tissue where the antigen targeted by the CAR is also expressed on normal hematopoietic stem cells or one of its progenies.

[0616] In another embodiment, CAR-T cell therapy is combined with knock-out or mutation of endogenous gene or protein targeted by the CAR in the immune effector cell (e.g., T cells or NK cells) or stem cells that give rise to immune effector cells. For example, since CD45 is expressed on all hematopoietic cells, CAR-T cells targeting CD45 would be difficult to generate as they would be killed off by neighboring CD45-CART cells. However, such cells can be generated if expression of CD45 CAR in T cells is combined with knock-down or deletion of endogenous CD45 in the T cells in which CD45 CAR is being expressed. Essentially a similar approach can be used to generate CAR targeting other antigens that are expressed on immune effector cells. Exemplary such antigens include, but are not limited to, CD5, TCRα, TCRβ1, TCRβ2, TCRγ, TCRδ, preTCRα and various receptors expressed on NK cells.

[0617] Cytokines that can be administered to the subject receiving a CAR-expressing cell described herein include: IL-2, IL-4, IL-7, IL-9, IL-15, IL-18, LIGHT, and IL-21, or a combination thereof. In preferred embodiments, the cytokine administered is IL-7, IL-15, or IL-21, IL12F, or a combination thereof. The cytokine can be administered once a day or more than once a day, e.g., twice a day, three times a day, or four times a day. The cytokine can be administered for more than one day, e.g. the cytokine is administered for 2 days, 3 days, 4 days, 5 days, 6 days, 1 week, 2 weeks, 3 weeks, or 4 weeks. For example, the cytokine is administered once a day for 7 days. Administration of the cytokine to the subject that has sub-optimal response to the CAR-expressing cell therapy improves CAR-expressing cell efficacy or anti-cancer activity. In a preferred embodiment, the cytokine administered after administration of CAR-expressing cells is IL-7.

[0618] In one embodiment, the agent which enhances activity of a CAR-expressing cell described herein is a Brd4 inhibitor or an siRNA or an shRNA targeting BRD4 as described in (Tolani, B et al., Oncogene, 29; 33(22):2928-37. PMID: 23792448)(Tolani, Gopalakrishnan, Punj, Matta, & Chaudhary, 2014).

### Pharmaceutical Compositions

[0619] Also provided herein are pharmaceutical compositions comprising any one or more of the chimeric antigen receptors, the polynucleotides, the polypeptides, the vectors, the viruses, and/or the genetically engineered cells and/or chemical compounds described herein and a pharmaceutically acceptable carrier. Such compositions may comprise buffers such as neutral buffered saline, phosphate buffered saline and the like; carbohydrates such as glucose, mannose, sucrose or dextrans, mannitol; proteins; polypeptides or amino acids such as glycine; antioxidants; chelating agents such as EDTA or glutathione; adjuvants (e.g., aluminum hydroxide); and preservatives. Compositions of the present invention are in one aspect formulated for intravenous administration.

[0620] Pharmaceutical compositions of the present invention may be administered in a manner appropriate to the disease to be treated. The quantity and frequency of administration will be determined by such factors as the condition of the patient, and the type and severity of the patient's disease, although appropriate dosages may be determined by clinical trials.

[0621] When a “therapeutically effective amount” is indicated, the precise amount of the compositions of the present invention to be administered can be determined by a physician with consideration of individual differences in age, weight, tumor size, extent of infection or metastasis, and condition of the patient (subject). It can generally be stated that a pharmaceutical composition comprising the genetically modified cells (T cells, NK cells) described herein may be administered at a dosage of 10⁴ to 10⁹ cells/kg body weight, in some instances 10⁵ to 10⁶ cells/kg body weight, including all integer values within those ranges. T cell compositions may also be administered multiple times at these dosages. The cells can be administered by using infusion techniques that are commonly known in immunotherapy (see, e.g., Rosenberg et at, New Eng, J. of Med, 319:1676, 1988).

[0622] In some embodiments, it may be desired to administer activated genetically modified cells (T cells, NK cells) to a subject and then subsequently redraw blood (or have an apheresis performed), activate the genetically modified cells therefrom and reinfuse the patient with these activated and expanded genetically modified cells. This process can be carried out multiple times every few weeks. In certain aspects, immune effector cells (e.g., T cells, NK cells) can be activated from blood draws of from 10 cc to 400 cc. In certain aspects, immune effector cells (e.g., I cells, NK cells) are activated from blood draws of 20 cc, 30 cc, 40 cc, 50 cc, 60 cc, 70 cc, 80 cc, 90 cc, or 100 cc.

[0623] “Pharmaceutically acceptable excipient” means an excipient that is useful in preparing a pharmaceutical composition that is generally safe, non-toxic, and desirable, and includes excipients that are acceptable for veterinary use as well as for human pharmaceutical use. Such excipients may be solid, liquid, semisolid, or, in the case of an aerosol composition, gaseous.

[0624] In various embodiments, the pharmaceutical compositions according to the invention may be formulated for delivery via any route of administration. “Route of administration” may refer to any administration pathway known in the art, including but not limited to aerosol, nasal, oral, intravenous, intramuscular, intraperitoneal, inhalation, transmucosal, transdermal, parenteral, implantable pump, continuous infusion, topical application, capsules and/or injections.

[0625] The pharmaceutical compositions according to the invention can also contain any pharmaceutically acceptable carrier. “Pharmaceutically acceptable carrier” as used herein refers to a pharmaceutically acceptable material, composition, or vehicle that is involved in carrying or transporting a compound of interest from one tissue, organ, or portion of the body to another tissue, organ, or portion of the body. For example, the carrier may be a liquid or solid filler, diluent, excipient, solvent, or encapsulating material, or a combination thereof. Each component of the carrier must be “pharmaceutically acceptable” in that it must be compatible with the other ingredients of the formulation. It must also be suitable for use in contact with any tissues or organs with which it may come in contact, meaning that it must not carry a risk of toxicity, irritation, allergic response, immunogenicity, or any other complication that excessively outweighs its therapeutic benefits.

[0626] The pharmaceutical compositions according to the invention can also be encapsulated, tableted or prepared in an emulsion or syrup for oral administration. Pharmaceutically acceptable solid or liquid carriers may be added to enhance or stabilize the composition, or to facilitate preparation of the composition. Liquid carriers include syrup, peanut oil, olive oil, glycerin, saline, alcohols and water. Solid carriers include starch, lactose, calcium sulfate, dihydrate, terra alba, magnesium stearate or stearic acid, talc, pectin, acacia, agar or gelatin. The carrier may also include a sustained release material such as glyceryl monostearate or glyceryl distearate, alone or with a wax

[0627] The pharmaceutical preparations are made following the conventional techniques of pharmacy involving milling, mixing, granulation, and compressing, when necessary, for tablet forms; or milling, mixing and filling for hard gelatin capsule forms. When a liquid carrier is used, the preparation will be in the form of syrup, elixir, emulsion or an aqueous or non-aqueous suspension. Such a liquid formulation may be administered directly p.o. or filled into a soft gelatin capsule.

[0628] The pharmaceutical compositions according to the invention may be delivered in a therapeutically effective amount. The precise therapeutically effective amount is that amount of the composition that will yield the most effective results in terms of efficacy of treatment in a given subject. This amount will vary depending upon a variety of factors, including but not limited to the characteristics of the therapeutic compound (including activity, pharmacokinetics, pharmacodynamics, and bioavailability), the physiological condition of the subject (including age, sex, disease type and stage, general physical condition, responsiveness to a given dosage, and type of medication), the nature of the pharmaceutically acceptable carrier or carriers in the formulation, and the route of administration. One skilled in the clinical and pharmacological arts will be able to determine a therapeutically effective amount through routine experimentation, for instance, by monitoring a subject's response to administration of a compound and adjusting the dosage accordingly. For additional guidance, see Remington: The Science and Practice of Pharmacy (Gennaro ed. 20th edition, Williams & Wilkins P A, USA) (2000).

[0629] The administration of the subject compositions may be carried out in any convenient manner, including by aerosol inhalation, injection, transfusion, implantation or transplantation. The compositions described herein may be administered to a patient trans-arterially, subcutaneously, intradermally, intratumorally, intranodally, intramedullary, intramuscularly, by intravenous (i.v.) injection, or intraperitoneally. In one aspect, the T cell compositions of the present invention are administered to a patient by intradermal or subcutaneous injection. In one aspect, the T cell compositions of the present invention are administered by i. v. injection. The compositions of immune effector cells (e.g., T cells, NK cells) may be injected directly into a tumor, lymph node, or site of infection.

[0630] In a particular exemplary aspect, subjects may undergo leukapheresis, wherein leukocytes are collected, enriched, or depleted ex vivo to select and/or isolate the cells of interest, e.g., T cells. These T cell isolates may be expanded by methods known in the art and treated such that one or more CAR constructs of the invention may be introduced, thereby creating a CAR T cell of the invention. Subjects in need thereof may subsequently undergo standard treatment with high dose chemotherapy followed by peripheral blood stem cell transplantation. In certain aspects, following or concurrent with the transplant, subjects receive an infusion of the expanded CAR T cells of the present invention. In an additional aspect, expanded cells are administered before or following surgery.

[0631] In one embodiment, the CAR is introduced into immune effector cells (e.g., T cells, NK cells), e.g., using in vitro transcription, and the subject (e.g., human) receives an initial administration of CAR immune effector cells (e.g., T cells, NK cells) of the invention, and one or more subsequent administrations of the CAR immune effector cells (e.g., T cells, NK cells) of the invention, wherein the one or more subsequent administrations are administered less than 15 days, e.g., 14, 13, 12, 11, 10, 9, 8, 7, 6, 5, 4, 3, or 2 days after the previous administration. In one embodiment, more than one administration of the CAR immune effector cells (e.g., T cells, NK cells) of the invention are administered to the subject (e.g., human) per week, e.g., 2, 3, or 4 administrations of the CAR immune effector cells (e.g., T cells, NK cells) of the invention are administered per week. In one embodiment, the subject (e.g., human subject) receives more than one administration of the CAR immune effector cells (e.g., T cells, NK cells) per week (e.g., 2, 3 or 4 administrations per week) (also referred to herein as a cycle), followed by a week of no CAR immune effector cells (e.g., T cells, NK cells) administrations, and then one or more additional administration of the CAR immune effector cells (e.g., T cells, NK cells) (e.g., more than one administration of the CAR immune effector cells (e.g., T cells, NK cells) per week) is administered to the subject. In another embodiment, the subject (e.g., human subject) receives more than one cycle of CAR immune effector cells (e.g., T cells, NK cells), and the time between each cycle is less than 10, 9, 8, 7, 6, 5, 4, or 3 days. In one embodiment, the CAR immune effector cells (e.g., T cells, NK cells) are administered every other day for 3 administrations per week. In one embodiment, the CAR immune effector cells (e.g., T cells, NK cells) of the invention are administered for at least two, three, four, five, six, seven, eight or more weeks.

[0632] A potential issue that can arise in patients being treated using transiently expressing CAR immune effector cells (e.g., T cells, NK cells) (particularly with murine scFv bearing CAR-Ts) is anaphylaxis after multiple treatments.

[0633] Without being bound by this theory, it is believed that such an anaphylactic response might be caused by a patient developing humoral anti-CAR response, i.e., anti-CAR antibodies having an anti-IgE isotype. It is thought that a patient's antibody producing cells undergo a class switch from IgG isotype (that does not cause anaphylaxis) to IgE isotype when there is a ten to fourteen day break in exposure to antigen.

[0634] If a patient is at high risk of developing an anaphylactic response to CAR therapy or generating an IgE type CAR antibody response during the course of CAR therapy, then omalizumab (Xolair) can be administered before or during the CAR therapy.

[0635] If a patient is at high risk of generating an anti-CAR antibody response during the course of transient CAR therapy (such as those generated by RNA transductions), CART infusion breaks should not last more than ten to fourteen days.

### Kits

[0636] Kits to practice the invention are also provided. For example, kits for treating a cancer in a subject, or making a CAR T cell that expresses one or more of the CARs disclosed herein. The kits may include a nucleic acid molecule or a polypeptide molecule encoding a CAR or a vector encoding a CAR along with a method to introduce the nucleic acid into the immune effector cells. The kit may include a virus comprising a nucleic acid encoding a CAR and chemicals, such as polybrene, to enhance the virus transduction. The kit may contain components for isolation of T cells for expressing a CAR. Alternatively, the kit may contain immune effector cells (e.g., T cells or NK cells) or stem cells expressing a CAR. More than one of the disclosed CAR can be included in the kit. The kit can include a container and a label or package insert on or associated with the container.

[0637] Suitable containers include, for example, bottles, vials, syringes, etc. The containers may be formed from a variety of materials such as glass or plastic. The container typically holds a composition including one or more of the nucleic acid molecules, viruses, vectors, T cells expressing a CAR. In several embodiments the container may have a sterile access port (for example the container may be an intravenous solution bag or a vial having a stopper pierceable by a hypodermic injection needle). A label or package insert indicates that the composition is used for treating the particular condition. The label or package insert typically will further include instructions for use of a disclosed nucleic acid molecules, CARs or T cells expressing a CAR, for example, in a method of treating or preventing a tumor or of making a CAR T cell. The package insert typically includes instructions customarily included in commercial packages of therapeutic products that contain information about the indications, usage, dosage, administration, contraindications and/or warnings concerning the use of such therapeutic products. The instructional materials may be written, in an electronic form (such as a computer diskette or compact disk) or may be visual (such as video files). The kits may also include additional components to facilitate the particular application for which the kit is designed. Thus, for example, the kit may additionally contain means for measuring the expression of CAR on T cells or of determining the number or percentage of T cells that express the CAR or of determining the functionality of CART cells. The kits may additionally include buffers and other reagents routinely used for the practice of a particular method. Such kits and appropriate contents are well known to those of skill in the art.

TABLE 3
Exemplary signal peptides

| NAME | SEQ ID (DNA) | SEQ ID (PRT) |
|---|---|---|
| CD8_Signal_Peptide | 1 | 1781 |
| CD8_Signal_Peptide | 2 | 1781 |
| CD8_Signal_Peptide | 3 | 1781 |
| CD8-SIGNAL-PEPTIDE | 4 | 1781 |
| IgH_Signal_Peptide | 5 | 1782 |
| IgH_Signal_Peptide | 6 | 1782 |
| IgH-Signal-Peptide | 7 | 1782 |
| IgH_Signal Peptide | 8 | 1782 |
| Amyloid-158-158- | 9 | 1783 |
| Signal-peptide | | |
| hCD19 Signal Peptide | 10 | 1784 |

TABLE 4
Exemplary VL fragments

| | SEQ ID | SEQ ID | |
|---|---|---|---|
| Target | (DNA) | (PRT) | NAME |
| AFP/MHC | 11 | 1785 | AFP-61-vL |
| class I complex | | | |
| AFP/MHC | 12 | 1786 | AFP-76-vL |
| class I complex | | | |
| AFP/MHC | 13 | 1787 | AFP-79-vL |
| class I complex | | | |
| ALK | 14 | 1788 | Alk-48-vL |
| ALK | 15 | 1789 | Alk-58-vL |
| Amyloid | 16 | 1790 | Amyloid-158-vL |
| BCMA | 17 | 1791 | BCMA-ET-40-vL |
| BCMA | 18 | 1792 | BCMA-ET-54-vL |
| BCMA | 19 | 1793 | BCMA-huC12A3-vL |
| BCMA | 20 | 1794 | BCMA-J6M0-vL |
| BCMA | 21 | 1795 | BCMA-ET-03-vL |
| BCMA | 22 | 1796 | BCMA-huC11.D5.3L1H3-vL |
| BCMA | 23 | 1797 | BCMA-huC13-F12-vL |
| CCR4 | 24 | 1798 | CCR4-humAb1567-vL |
| CD123 | 25 | 1799 | CD123-CSL362-vL |
| CD123 | 26 | 1800 | CD123-1172-vL |
| CD123 | 27 | 1801 | CD123-DART-1-vL |
| CD123 | 28 | 1802 | CD123-DART-2-vL |
| CD123 | 29 | 1803 | CD123-I3RB18-vL |
| CD123 | 30 | 1804 | CD123-hu3E3-vL |
| CD123 | 31 | 1805 | CD123-9F6-vL |
| CD123 | 32 | 1806 | CD123-I3RB2-vL |
| CD123 | 33 | 1807 | CD123-1176-vL |
| CD123 | 34 | 1808 | CD123-8B11-vL |
| CD123 | 35 | 1809 | CD123-2B8-vL |
| CD123 | 36 | 1810 | CD123-9D7-vL |
| CD123 | 37 | 1811 | CD123-3B10-vL |
| CD138 | 38 | 1812 | CD138-vL |
| CD179b | 39 | 1813 | CD179b-vL |
| CD19 | 40 | 1814 | CD19-4G7-vL |
| CD19 | 41 | 1815 | CD19Bu12-vL |
| CD19 | 42 | 1816 | CD19MM-vL |
| CD19 | 43 | 1817 | FMC63-vL |
| CD19 | 44 | 1818 | FMC63-[2]-vL |
| CD19 | 45 | 1819 | FMC63-[3]-vL |
| CD19 | 46 | 1820 | huFMC63-11-vL |
| CD19 | 47 | 1821 | CD19-MEDI-3649-vL |
| CD19 | 48 | 1822 | CD19-Medrex-24D1-vL |
| CD19 | 49 | 1823 | CD19-MOR0028-vL |
| CD19 | 50 | 1824 | CD19-HD37-H2L1-vL |
| CD19 | 51 | 1825 | CD19-huBly3-vL |
| CD19 | 52 | 1826 | CD19-huSJ25C1-vL |
| CD19 | 53 | 1827 | CD19-hB4-vL |
| CD19 | 54 | 1828 | CD19-hu-mROO5-1-vL |
| CD19 | 55 | 1829 | CD19-hA19-vL |
| CD20 | 56 | 1830 | CD20-2F2-vL |
| CD20 | 57 | 1831 | CD20-GA101-vL |
| CD20 | 58 | 1832 | CD20-Leu16-vL |
| CD20 | 59 | 1833 | CD20-11B8-vL |
| CD20 | 60 | 1834 | CD20-2C6-vL |
| CD20 | 61 | 1835 | CD20-2H7-vL |
| CD20 | 62 | 1836 | CD20-hA20-vL |
| CD20 | 63 | 1837 | CD20-BM-CA-1925-v4-vL |
| CD20 | 64 | 1838 | CD20-Ubli-v4-vL |
| CD20 | 65 | 1839 | CD20-2H7-vL |
| CD20 | 66 | 1840 | CD20-h1F5-vL |
| CD20 | 67 | 1841 | CD20-7D8-vL |
| CD20 | 68 | 1842 | CD20-AME-33-vL |
| CD22 | 69 | 1843 | CD22-h10F4-vL |
| CD22 | 70 | 1844 | CD22-H22Rhov2ACDRKA-vL |
| CD22 | 71 | 1845 | CD22m971-vL |
| CD276 | 72 | 1846 | CD276-17-vL |
| CD30 | 73 | 1847 | CD30-5F11-vL |
| CD30 | 74 | 1848 | CD30-Ac10-vL |
| CD32 | 75 | 1849 | CD32-Med9-vL |
| CD324 | 76 | 1850 | CD324-hSC10-17-vL |
| CD324 | 77 | 1851 | CD324-SC10-6-vL |
| CD33 | 78 | 1852 | CD33-huMyc9-vL |
| CD33 | 79 | 1853 | CD33-AF5-vL |
| CD33 | 80 | 1854 | CD33-Boehr2800308-vL |
| CD33 | 81 | 1855 | CD33-Him3-4-vL |
| CD33 | 82 | 1856 | CD33-SGNh2H12-vL |
| CD33 | 83 | 1857 | CD33-15G15-33-vL |
| CD33 | 84 | 1858 | CD33-33H4-vL |
| CD33 | 85 | 1859 | CD33-9C3-2-vL |
| CD34 | 86 | 1860 | CD34-hu4C7-[2]-vL |
| CD34 | 87 | 1861 | CD34-hu4C7-vL |
| CD44v6 | 88 | 1862 | CD44v6-Biwa8-vL |
| CD5 | 89 | 1863 | CD5-18-vL |
| CD5 | 90 | 1864 | CD5-9-vL |
| CD70 | 91 | 1865 | CD70-h1F6-vL |
| CD79b | 92 | 1866 | CD79b-2F2-vL |
| CD79b | 93 | 1867 | huMA79bv28-vL |
| CD99 | 94 | 1868 | CD99-hu12E7-vL |
| CDH17 | 95 | 1869 | CDH17-PTA001A4-vL |
| CDH19 | 96 | 1870 | CDH19-16A4-vL |
| CDH6 | 97 | 1871 | CDH6-NOV710-vL |
| CDH6 | 98 | 1872 | CDH6-NOV712-vL |
| CLEC5A | 99 | 1873 | CLEC5A-3E12A2-vL |
| CLEC5A | 100 | 1874 | CLEC5A-8H8F5-vL |
| CLL1 | 101 | 1875 | CLL1-M26-vL |
| CLL1 | 102 | 1876 | CLL1-M32-vL |
| CLL1 | 103 | 1877 | CLL1-21C9-L2H3-vL |
| CLL1 | 104 | 1878 | CLL1-6E7L4H1e-vL |
| CLL1 | 105 | 1879 | CLL1-hu1075-v1-vL |
| CLL1 | 106 | 1880 | CLL1-hu1075-v2-vL |
| CMVpp65/ | 107 | 1881 | CMVpp65-F5-vL |
| MHC class | | | |
| I complex | | | |
| CS1 | 108 | 1882 | huLuc63-vL |
| CS1 | 109 | 1883 | HuLuc64-[2]vL |
| CS1 | 110 | 1884 | HuLuc64-vL |
| CS1 | 111 | 1885 | Luc90-vL |
| CS1 | 112 | 1886 | CS1-PDL241-vL |
| CS1 | 113 | 1887 | CS1-Hu27A-vL |
| CS1 | 114 | 1888 | CS1-ScHu34C3-vL |
| CS1 | 115 | 1889 | CS1-Hu31-D2-vL |
| CS1 | 116 | 1890 | CS1-Luc34-vL |
| CS1 | 117 | 1891 | CS1-LucX2-vL |
| CSF2RA | 118 | 1892 | CSF2RA-Ab1-vL |
| CSF2RA | 119 | 1893 | CSF2RA-Ab6-vL |
| DLL3 | 120 | 1894 | DLL3-hSC16-13-vL |
| DLL3 | 121 | 1895 | DLL3-hSC16-56-vL |
| EBNA3c// | 122 | 1896 | EBNA3c-315-vL |
| MHC class | | | |
| I complex | | | |
| EGFR | 123 | 1897 | Cetuximab-vL |
| EGFR | 124 | 1898 | Nimotuzumab-vL |
| EGFRviii | 125 | 1899 | EGFRviii-139-vL |
| EGFRviii | 126 | 1900 | EGFRviii-2173-vL |
| EpCam1 | 127 | 1901 | EpCam1-D5K5-vL |
| EpCam1 | 128 | 1902 | Epcam1-MM1-vL |
| FITC | 129 | 1903 | FITC-vL |
| FITC | 130 | 1904 | FITC-4M-53-vL |
| FITC | 131 | 1905 | FITC-E2-vL |
| FLT3 | 132 | 1906 | FLT3-NC7-vL |
| HIV1-envelop | 133 | 1907 | HIV1-N6-vL |
| glycoprotein | | | |
| FR1 (Folate | 134 | 1908 | FR1-huMov19-vL |
| Receptor alpha) | | | |
| GAD65/MHC | 135 | 1909 | GAD-G3H8-vL |
| class I complex | | | |
| GD2 | 136 | 1910 | GD2-hu14-18-vL |
| GD2 | 137 | 1911 | GD2-hu3F8-vL |
| GD3 | 138 | 1912 | GD3-KM-641-vL |
| GFRa4 | 139 | 1913 | GFRa4-P4-10-2-vL |
| GFRa4 | 140 | 1914 | GFRa4-P4-10-vL |
| GFRa4 | 141 | 1915 | GFRAlpha4-P4-6-vL |
| GM1 | 142 | 1916 | GM1-5B2-vL |
| GM1 | 143 | 1917 | GM1-7E5-vL |
| gp100// | 144 | 1918 | gp100-G2D12-vL |
| MHC class | | | |
| I complex | | | |
| gp100// | 145 | 1919 | gp100-vL |
| MHC class | | | |
| I complex | | | |
| GPC3 | 146 | 1920 | GPC3-4E5-vL |
| gpNMB | 147 | 1921 | gpNMB-115-vL |
| GPRC5D | 148 | 1922 | GPRC5D-ET150-18-vL |
| GPRC5D | 149 | 1923 | GPRC5D-ET150-5-vL |
| GPRC5D | 150 | 1924 | GPRC5D-ET150-1-vL |
| GPRC5D | 151 | 1925 | GPRC5D-ET150-2-vL |
| Her2 | 152 | 1926 | Her2-Hu4D5-vL |
| HIV1-envelop | 153 | 1927 | HIV1-3BNC117-vL |
| glycoprotein | | | |
| HIV1-gag (77-85)/ | 154 | 1928 | HIV1-E5-vL |
| MHC class | | | |
| I complex | | | |
| HIV1-envelop | 155 | 1929 | HIV1-PGT-128-vL |
| glycoprotein | | | |
| HIV1-envelop | 156 | 1930 | HIV1-VR-C01-vL |
| glycoprotein | | | |
| HIV1-envelop | 157 | 1931 | HIV1-X5-vL |
| glycoprotein | | | |
| HLA-A2 | 158 | 1932 | HLA-A2-3PB2-vL |
| HMW-MAA | 159 | 1933 | HMW-MAA-hIND-vL |
| HPV16-E7/ | 160 | 1934 | HPV16-7-8-vL |
| MHC class | | | |
| I complex | | | |
| HPV16-E7/ | 161 | 1935 | HPV16-2-vL |
| MHC class | | | |
| I complex | | | |
| HTLV1-TAX/ | 162 | 1936 | TAX-T3E3-vL |
| MHC class | | | |
| I complex | | | |
| HTLV1-TAX/ | 163 | 1937 | TAX-T3F2-vL |
| MHC class | | | |
| I complex | | | |
| IL11Ra | 164 | 1938 | IL11Ra-8E2-vL |
| IL13Ra2 | 165 | 1939 | IL13Ra2-hu107-vL |
| IL13Ra2 | 166 | 1940 | IL13Ra2-Hu108-vL |
| IL6R | 167 | 1941 | IL6R-M83-vL |
| Influenza A HA | 168 | 1942 | FLU-MEDI-8852-vL |
| KSHV-gH | 169 | 1943 | YC15-vL |
| KSHV-K8.1 | 170 | 1944 | 4C3-vL |
| L1CAM | 171 | 1945 | L1CAM-9-3-HU3-vL |
| LAMP1 | 172 | 1946 | LAMP1-humab1-2-vL |
| LAMP1 | 173 | 1947 | LAMP1-Mb4-vL |
| LewisY | 174 | 1948 | LewisY-huS193-vL |
| Lym1 | 175 | 1949 | Lym1-vL |
| Lym2 | 176 | 1950 | Lym2-vL |
| MART1/ | 177 | 1951 | MART1-CAG10-vL |
| MHC class | | | |
| I complex | | | |
| MART1/ | 178 | 1952 | MART1-CLA12-vL |
| MHC class | | | |
| I complex | | | |
| Mesothelin | 179 | 1953 | Mesothelin-m912-vL |
| MPL | 180 | 1954 | MPL-111-vL |
| MPL | 181 | 1955 | MPL-161-HL-vL |
| MPL | 182 | 1956 | MPL-161-vL |
| MPL | 183 | 1957 | MPL-175-vL |
| MPL | 184 | 1958 | MPL-178-vL |
| MPL | 185 | 1959 | MPL-huVB22Bw5-vL |
| MPL | 186 | 1960 | MPL-12E10-vL |
| MPL | 187 | 1961 | MPL-AB317-vL |
| Muc1/MHC | 188 | 1962 | MUC1-D6-M3A1-vL |
| class I complex | | | |
| Muc1/MHC | 189 | 1963 | Muc1-D6-M3B8-vL |
| class I complex | | | |
| Muc16 | 190 | 1964 | Muc16-4H11-vL |
| NKG2D | 191 | 1965 | NKG2D-MS-vL |
| NYBR1 | 192 | 1966 | NYBR1-vL |
| NY-ESO/MHC | 193 | 1967 | NY-ESO-T1-vL |
| class I complex | | | |
| PD1 | 194 | 1968 | PD1-4H1-vL |
| PD1 | 195 | 1969 | PD1-5C4-vL |
| PDL1 | 196 | 1970 | PDL1-10A5-vL |
| PDL1 | 197 | 1971 | PDL1-Atezoli-vL |
| PDL1 | 198 | 1972 | PDL1-SP142-vL |
| PR1/MHC | 199 | 1973 | PR1-vL |
| class I complex | | | |
| PSCA | 200 | 1974 | PSCA-Ha14-117-vL |
| PSCA | 201 | 1975 | PSCA-Ha14-121-vL |
| PSMA | 202 | 1976 | PSMA-006-vL |
| PSMA | 203 | 1977 | PSMA-J591-vL |
| PTK7 | 204 | 1978 | PTK7-hSC6-23-vL |
| PTK7 | 205 | 1979 | PTK7-SC6-10-2-vL |
| ROR1 | 206 | 1980 | ROR1-4A5-vL |
| ROR1 | 207 | 1981 | ROR1-4C10-vL |
| SLea | 208 | 1982 | SLea-5B1-vL |
| SLea | 209 | 1983 | SLea-7E3-vL |
| SSEA4 | 210 | 1984 | SSEA4-vL |
| TCRB1 | 211 | 1985 | TCRB1-E09-vL |
| TCRB1 | 212 | 1986 | TCRB1-Jovi1-vL |
| TCRB2 | 213 | 1987 | TCRB2-CP01-D05-vL |
| TCRB2 | 214 | 1988 | TCRB2-CP01-E05-vL |
| TCR gamma- | 215 | 1989 | TCRgd-G5-4-vL |
| delta (TCRgd) | | | |
| TERT/MHC | 216 | 1990 | TERT-3G3-T865-vL |
| class I complex | | | |
| TERT/MHC | 217 | 1991 | TERT-4A9-T540-vL |
| class I complex | | | |
| TF1 | 218 | 1992 | TF1-98-vL |
| TGFBR2 | 219 | 1993 | TGFBR2-Ab1-vL |
| TIM1 | 220 | 1994 | TIM1-HVCR1-270-2-vL |
| TIM1 | 221 | 1995 | Tim1HVCR1-ARD5-vL |
| TnAg | 222 | 1996 | TnAg-vL |
| Tn-Muc1 | 223 | 1997 | Tn-Muc1-hu5E5-vL |
| TROP2 | 224 | 1998 | TROP2-ARA47-HV3KV3-vL |
| TROP2 | 225 | 1999 | TROP2-h7E6-SVG-vL |
| TSHR | 226 | 2000 | TSHR-5C9-vL |
| TSHR | 227 | 2001 | TSHR-K1-70-vL |
| TSHR | 228 | 2002 | TSHR-KB1-vL |
| TSLPR | 229 | 2003 | TSLPR-vL |
| Tyrosinase/MHC | 230 | 2004 | Tyro-B2-vL |
| class I complex | | | |
| Tyrosinase/MHC | 231 | 2005 | Tyro-Mc1-vL |
| class I complex | | | |
| Tyrosinase/MHC | 232 | 2006 | TA2-vL |
| class I complex | | | |
| VEGFR3 | 233 | 2007 | VEGFR3-Ab1-vL |
| WT1/MHC | 234 | 2008 | WT1-Ab13-vL |
| class I complex | | | |
| WT1/MHC | 235 | 2009 | WT1-Ab15-vL |
| class I complex | | | |
| WT1/MHC | 236 | 2010 | WT1-Ab1-vL |
| class I complex | | | |
| WT1/MHC | 237 | 2011 | WT1-Ab5-vL |
| class I complex | | | |
| EBV-gp350 | 238 | 2012 | EBV-gp350-vL |
| CDH19 | 239 | 2013 | CDH19-4B10-vL |
| Folate Receptor | 240 | 2014 | FRbeta-m923-vL |
| beta (FRbeta) | | | |
| LHR | 241 | 2015 | LHR-8B7-vL |
| LHR | 242 | 2016 | LHR-5F4-21-vL |
| B7H4 | 243 | 2017 | B7H4-hu22Cl0-vL |
| B7H4 | 244 | 2018 | B7H4-hu1D11-vL |
| IgE | 245 | 2019 | IgE-omalizumab-vL |
| CD23 | 246 | 2020 | CD23-p5E8-vL |
| GCC | 247 | 2021 | GCC-5F9-vL |
| GCC | 248 | 2022 | GCC-Ab229-vL |
| CD200R | 249 | 2023 | CD200R-huDx182-vL |

TABLE 5
ExemplaryLinkers

| | SEQ ID | SEQ ID |
|---|---|---|
| NAME | (DNA) | (PRT) |
| (GGGGS)x3_LINKER | 250 | 2024 |
| (GGGGS)x3_Linker | 251 | 2024 |
| (Gly4Ser)x3_Linker | 252 | 2024 |
| (Gly4Ser)x3_Linker | 253 | 2024 |
| (GGGGS)x3-Linker | 254 | 2024 |
| (GGGGS)x3-Linker | 255 | 2024 |
| (GGSG)7_Linker | 256 | 2025 |
| (GGSG)7_Linker_2 | 257 | 2026 |
| DDAKK_linker | 258 | 2027 |

TABLE 6
Exemplary V_{H} fragments

| | SEQ ID | SEQ ID | |
|---|---|---|---|
| Target | (DNA) | (PRT) | CONSTRUCT NAME |
| AFP/MHC class I complex | 259 | 2028 | AFP-61-vH |
| AFP/MHC class I complex | 260 | 2029 | AFP-76-vH |
| AFP/MHC class I complex | 261 | 2030 | AFP-79-vH |
| ALK | 262 | 2031 | Alk-48-vH |
| ALK | 263 | 2032 | Alk-58-vH |
| Amyloid | 264 | 2033 | Amyloid-158-vH |
| BCMA | 265 | 2034 | BCMA-ET-40-vH |
| BCMA | 266 | 2035 | BCMA-ET-54-vH |
| BCMA | 267 | 2036 | BCMA-huC12A3-vH |
| BCMA | 268 | 2037 | BCMA-J6M0-vH |
| BCMA | 269 | 2038 | BCMA-ET-03-vH |
| BCMA | 270 | 2039 | BCMA-huC11.D5.3L1H3-vH |
| BCMA | 271 | 2040 | BCMA-huC13-F12-vH |
| CCR4 | 272 | 2041 | CCR4-humAb1567-vH |
| CD123 | 273 | 2042 | CD123-CSL362-vH |
| CD123 | 274 | 2043 | CD123-1172-vH |
| CD123 | 275 | 2044 | CD123-DART-1-vH |
| CD123 | 276 | 2045 | CD123-DART-2-vH |
| CD123 | 277 | 2046 | CD123-13RB18-vH |
| CD123 | 278 | 2047 | CD123-hu3E3-vH |
| CD123 | 279 | 2048 | CD123-9F6-vH |
| CD123 | 280 | 2049 | CD123-I3RB2-vH |
| CD123 | 281 | 2050 | CD123-1176-vH |
| CD123 | 282 | 2051 | CD123-8B11-vH |
| CD123 | 283 | 2052 | CD123-2B8-vH |
| CD123 | 284 | 2053 | CD123-9D7-vH |
| CD123 | 285 | 2054 | CD123-3B10-vH |
| CD138 | 286 | 2055 | CD138-vH |
| CD179b | 287 | 2056 | CD179b-vH |
| CD19 | 288 | 2057 | CD19-4G7-vH |
| CD19 | 289 | 2058 | CD19Bu12-vH |
| CD19 | 290 | 2059 | CD19Bu12-[2]-vH |
| CD19 | 291 | 2060 | CD19MM-vH |
| CD19 | 292 | 2061 | FMC63-vH |
| CD19 | 293 | 2062 | FMC-63-vH |
| CD19 | 294 | 2063 | huFMC63-11-vH |
| CD19 | 295 | 2064 | CD19-MEDI-3649-vH |
| CD19 | 296 | 2065 | CD19-Medrex-24D1-vH |
| CD19 | 297 | 2066 | CD19-MOR0028-vH |
| CD19 | 298 | 2067 | CD19-HD37-H2L1-vH |
| CD19 | 299 | 2068 | CD19-huBly3-vH |
| CD19 | 300 | 2069 | CD19-huSJ25C1-vH |
| CD19 | 301 | 2070 | CD19-hB4-vH |
| CD19 | 302 | 2071 | CD19-hu-mROO5-1-vH |
| CD19 | 303 | 2072 | CD19-hA19-vH |
| CD20 | 304 | 2073 | CD20-2F2-vH |
| CD20 | 305 | 2074 | CD20-GA101-vH |
| CD20 | 306 | 2075 | CD20-Leu16-vH |
| CD20 | 307 | 2076 | CD20-11B8-vH |
| CD20 | 308 | 2077 | CD20-2C6-vH |
| CD20 | 309 | 2078 | CD20-2H7-vH |
| CD20 | 310 | 2079 | CD20-hA20-vH |
| CD20 | 311 | 2080 | CD20-BM-CA-1925-v4-vH |
| CD20 | 312 | 2081 | CD20-Ubli-v4-vH |
| CD20 | 313 | 2082 | CD20-2H7-vH |
| CD20 | 314 | 2083 | CD20-h1F5-vH |
| CD20 | 315 | 2084 | CD20-7D8-vH |
| CD20 | 316 | 2085 | CD20-AME-33-vH |
| CD22 | 317 | 2086 | CD22-h10F4-vH |
| CD22 | 318 | 2087 | CD22-H22Rhov2ACDRKA-vH |
| CD22 | 319 | 2088 | CD22m971-vH |
| CD276 | 320 | 2089 | CD276-17-vH |
| CD30 | 321 | 2090 | CD30-5F11-vH |
| CD30 | 322 | 2091 | CD30-Ac10-vH |
| CD32 | 323 | 2092 | CD32-Med9-vH |
| CD324 | 324 | 2093 | CD324-hSC10-17-vH |
| CD324 | 325 | 2094 | CD324-SC10-6-vH |
| CD33 | 326 | 2095 | CD33-huMyc9-vH |
| CD33 | 327 | 2096 | CD33-AF5-vH |
| CD33 | 328 | 2097 | CD33-Boehr2800308-vH |
| CD33 | 329 | 2098 | CD33-Him3-4-vH |
| CD33 | 330 | 2099 | CD33-SGNh2H12-vH |
| CD33 | 331 | 2100 | CD33-15G15-33-vH |
| CD33 | 332 | 2101 | CD33-33H4-vH |
| CD33 | 333 | 2102 | CD33-33H4-vH |
| CD33 | 334 | 2103 | CD33-9C3-2-vH |
| CD34 | 335 | 2104 | CD34-hu4C7-vH |
| CD44v6 | 336 | 2105 | CD44v6-Biwa8-vH |
| CD5 | 337 | 2106 | CD5-18-vH |
| CD5 | 338 | 2107 | CD5-9-vH |
| CD70 | 339 | 2108 | CD70-h1F6-vH |
| CD79b | 340 | 2109 | CD79b-2F2-vH |
| CD79b | 341 | 2110 | huMA79bv28-vH |
| CD99 | 342 | 2111 | CD99-hu12E7-vH |
| CDH17 | 343 | 2112 | CDH17-PTA001A4-vH |
| CDH19 | 344 | 2113 | CDH19-16A4-vH |
| CDH6 | 345 | 2114 | CDH6-NOV710-vH |
| CDH6 | 346 | 2115 | CDH6-NOV712-vH |
| CLEC5A | 347 | 2116 | CLEC5A-3E12A2-vH |
| CLEC5A | 348 | 2117 | CLEC5A-8H8F5-vH |
| CLL1 | 349 | 2118 | CLL1-M26-vH |
| CLL1 | 350 | 2119 | CLL1-M32-vH |
| CLL1 | 351 | 2120 | CLL1-21C9-L2H3-vH |
| CLL1 | 352 | 2121 | CLL1-6E7L4H1e-vH |
| CLL1 | 353 | 2122 | CLL1-hu1075-v1-vH |
| CLL1 | 354 | 2123 | CLL1-hu1075-v2-vH |
| CMVpp65/MHC class I | 355 | 2124 | CMVpp65-F5-vH |
| complex | | | |
| CS1 | 356 | 2125 | huLuc63-vH |
| CS1 | 357 | 2126 | HuLuc64-vH |
| CS1 | 358 | 2127 | Luc90-vH |
| CS1 | 359 | 2128 | CS1-PDL241-vH |
| CS1 | 360 | 2129 | CS1-Hu27A-vH |
| CS1 | 361 | 2130 | CS1-ScHu34C3-vH |
| CS1 | 362 | 2131 | CS1-Hu31-D2-vH |
| CS1 | 363 | 2132 | CS1-Luc34-vH |
| CS1 | 364 | 2133 | CS1-LucX2-vH |
| CSF2RA | 365 | 2134 | CSF2RA-Ab1-vH |
| CSF2RA | 366 | 2135 | CSF2RA-Ab6-vH |
| DLL3 | 367 | 2136 | DLL3-hSC16-13-vH |
| DLL3 | 368 | 2137 | DLL3-hSC16-56-vH |
| EBNA3c/MHC class I | 369 | 2138 | EBNA3c-315-vH |
| complex | | | |
| EGFR | 370 | 2139 | Cetuximab-vH |
| EGFR | 371 | 2140 | Nimotuzumab-vH |
| EGFRviii | 372 | 2141 | EGFRviii-139-vH |
| EGFRviii | 373 | 2142 | EGFRviii-2173-vH |
| EpCam1 | 374 | 2143 | EpCam1-D5K5-vH |
| EpCam1 | 375 | 2144 | Epcam1-MM1-vH |
| FITC | 376 | 2145 | FITC-vH |
| FITC | 377 | 2146 | FITC-4M-53-vH |
| FITC | 378 | 2147 | FITC-E2-vH |
| FLT3 | 379 | 2148 | FLT3-NC7-vH |
| HIV1-envelop glycoprotein | 380 | 2149 | HIV1-N6-vH |
| FR1 (Folate Receptor alpha) | 381 | 2150 | FR1-huMov19-vH |
| GAD65/MHC class I complex | 382 | 2151 | GAD-G3H8-vH |
| GD2 | 383 | 2152 | GD2-hu14-18-vH |
| GD2 | 384 | 2153 | GD2-hu3F8-vH |
| GD3 | 385 | 2154 | GD3-KM-641-vH |
| GFRa4 | 386 | 2155 | GFRa4-P4-10-vH |
| GFRa4 | 387 | 2156 | GFRAlpha4-P4-6-vH |
| GM1 | 388 | 2157 | GM1-5B2-vH |
| GM1 | 389 | 2158 | GM1-7E5-vH |
| gp100/MHC class I complex | 390 | 2159 | gp100-G2D12-vH |
| gp100/MHC class I complex | 391 | 2160 | gp100-vH |
| GPC3 | 392 | 2161 | GPC3-4E5-vH |
| gpNMB | 393 | 2162 | gpNMB-115-vH |
| GPRC5D | 394 | 2163 | GPRC5D-ET150-18-vH |
| GPRC5D | 395 | 2164 | GPRC5D-ET150-5-vH |
| GPRC5D | 396 | 2165 | GPRC5D-ET150-1-vH |
| GPRC5D | 397 | 2166 | GPRC5D-ET150-2-vH |
| Her2 | 398 | 2167 | Her2-Hu4D5-vH |
| HIV1-envelop glycoprotein | 399 | 2168 | HIV1-3BNC117-vH |
| HIV1-gag (77-85) MHC class I | 400 | 2169 | HIV1-E5-vH |
| complex HIV1-envelop | | | |
| glycoprotein | | | |
| HIV1-envelop glycoprotein | 401 | 2170 | HIV1-PGT-128-vH |
| HIV1-envelop glycoprotein | 402 | 2171 | HIV1-VR-C01-vH |
| HIV1-envelop glycoprotein | 403 | 2172 | HIV1-X5-vH |
| HLA-A2 | 404 | 2173 | HLA-A2-3PB2-vH |
| HMW-MAA | 405 | 2174 | HMW-MAA-hIND-vH |
| HPV16-E7/MHC class I | 406 | 2175 | HPV16-7-8-vH |
| complex | | | |
| HPV16-E7/MHC class I | 407 | 2176 | HPV16-2-vH |
| complex | | | |
| HTLV1-TAX/MHC class I | 408 | 2177 | TAX-T3E3-vH |
| HTLV1-TAX/MHC class I | 409 | 2178 | TAX-T3F2-vH |
| IL11Ra | 410 | 2179 | IL11Ra-8E2-vH |
| IL13Ra2 | 411 | 2180 | IL13Ra2-hu107-vH |
| IL13Ra2 | 412 | 2181 | IL13Ra2-Hu108-vH |
| IL6R | 413 | 2182 | IL6R-M83-vH |
| Influenza A HA | 414 | 2183 | FLU-MEDI-8852-vH |
| KSHV-gH | 415 | 2184 | YC15-vH |
| KSHV-K8.1 | 416 | 2185 | 4C3-vH |
| L1CAM | 417 | 2186 | L1CAM-9-3-HU3-vH |
| LAMP1 | 418 | 2187 | LAMP1-humab1-2-vH |
| LAMP1 | 419 | 2188 | LAMP1-Mb4-vH |
| LewisY | 420 | 2189 | LewisY-huS193-vH |
| Lym1 | 421 | 2190 | Lym1-vH |
| Lym2 | 422 | 2191 | Lym2-vH |
| MART1/MHC class I complex | 423 | 2192 | MART1-CAG10-vH |
| MART1/MHC class I complex | 424 | 2193 | MART1-CLA12-vH |
| Mesothelin | 425 | 2194 | Mesothelin-m912-[2]-vH |
| Mesothelin | 426 | 2195 | Mesothelin-m912-vH |
| MPL | 427 | 2196 | MPL-111-vH |
| MPL | 428 | 2197 | MPL-161-HL-vH |
| MPL | 429 | 2198 | MPL-161-vH |
| MPL | 430 | 2199 | MPL-175-vH |
| MPL | 431 | 2200 | MPL-178-vH |
| MPL | 432 | 2201 | MPL-huVB22Bw5-vH |
| MPL | 433 | 2202 | MPL-12E10-vH |
| MPL | 434 | 2203 | MPL-AB317-vH |
| Muc 1/MHC class I complex | 435 | 2204 | MUC1-D6-M3A1-vH |
| Muc 1/MHC class I complex | 436 | 2205 | Muc1-D6-M3B8-vH |
| Muc16 | 437 | 2206 | Muc16-4H11-vH |
| NKG2D | 438 | 2207 | NKG2D-MS-vH |
| NYBR1 | 439 | 2208 | NYBR1-vH |
| NY-ESO/MHC class I | 440 | 2209 | NY-ESO-T1-vH |
| complex | | | |
| NY-ESO/MHC class I | 441 | 2210 | NY-ESO-T2-vH |
| complex | | | |
| PD1 | 442 | 2211 | PD1-4H1-vH |
| PD1 | 443 | 2212 | PD1-5C4-vH |
| PDL1 | 444 | 2213 | PDL1-Atezoli-vH |
| PDL1 | 445 | 2214 | PDL1-SP142-vH |
| PR1 | 446 | 2215 | PR1-vH |
| PSCA | 447 | 2216 | PSCA-Ha14-117-vH |
| PSCA | 448 | 2217 | PSCA-Ha14-121-vH |
| PSMA | 449 | 2218 | PSMA-006-vH |
| PSMA | 450 | 2219 | PSMA-J591-vH |
| PTK7 | 451 | 2220 | PTK7-hSC6-23-vH |
| PTK7 | 452 | 2221 | PTK7-SC6-10-2-vH |
| ROR1 | 453 | 2222 | ROR1-4A5-vH |
| ROR1 | 454 | 2223 | ROR1-4C10-vH |
| SLea | 455 | 2224 | SLea-5B1-vH |
| SLea | 456 | 2225 | SLea-7E3-vH |
| SSEA4 | 457 | 2226 | SSEA4-vH |
| TCRB1 (TCR-beta1 constant | 458 | 2227 | TCRB1-E09-vH |
| chain) | | | |
| TCRB1 | 459 | 2228 | TCRB1-Jovi1-vH |
| TCRB2 (TCR-beta2 constant | 460 | 2229 | TCRB2-CP01-D05-vH |
| chain) | | | |
| TCRB2 | 461 | 2230 | TCRB2-CP01-E05-vH |
| TCR gamma-delta (TCRgd) | 462 | 2231 | TCRgd-G5-4-vH |
| TERT/MHC class I complex | 463 | 2232 | TERT-3G3-T865-vH |
| TERT/MHC class I complex | 464 | 2233 | TERT-4A9-T540-vH |
| TF1(Tissue Factor 1) | 465 | 2234 | TF1-98-vH |
| TGFBR2 | 466 | 2235 | TGFBR2-Ab1-vH |
| TIM1 | 467 | 2236 | TIM1-HVCR1-270-2-vH |
| TIM1 | 468 | 2237 | Tim1HVCR1-ARDS-vH |
| TnAg | 469 | 2238 | TnAg-vH |
| Tn-Muc1 | 470 | 2239 | Tn-Muc1-hu5E5-vH |
| TROP2 | 471 | 2240 | TROP2-ARA47-HV3KV3-vH |
| TROP2 | 472 | 2241 | TROP2-h7E6-SVG-vH |
| TSHR (Thyrotropin receptor) | 473 | 2242 | TSHR-5C9-vH |
| TSHR | 474 | 2243 | TSHR-K1-70-vH |
| TSHR | 475 | 2244 | TSHR-KB1-vH |
| TSLPR (Thymic stromal | 476 | 2245 | TSLPR-vH |
| lymphopoietin receptor) | | | |
| Tyrosinase/MHC class I | 477 | 2246 | Tyro-B2-vH |
| complex | | | |
| Tyrosinase/MHC class I | 478 | 2247 | Tyro-Mc1-vH |
| complex | | | |
| Tyrosinase/MHC class I | 479 | 2248 | TA2-vH |
| complex | | | |
| VEGFR3 | 480 | 2249 | VEGFR3-Ab1-vH |
| WT1/MHC class I complex | 481 | 2250 | WT1-Ab13-vH |
| WT1/MHC class I complex | 482 | 2251 | WT1-Ab15-vH |
| WT1/MHC class I complex | 483 | 2252 | WT1-Ab1-vH |
| WT1/MHC class I complex | 484 | 2253 | WT1-Ab5-[2]-vH |
| WT1/MHC class I complex | 485 | 2254 | WT1-Ab5-vH |
| EBV-gp350 | 486 | 2255 | EBV-gp350-vH |
| CDH19 | 487 | 2256 | CDH19-4B10-vH |
| Folate Receptor beta (FRbeta) | 488 | 2257 | FRbeta-m923-vH |
| LHR (Luteinizing hormone | 489 | 2258 | LHR-8B7-vH |
| Receptor) | | | |
| LHR | 490 | 2259 | LHR-5F4-21-vH |
| B7H4 | 491 | 2260 | B7H4-hu22Cl0-vH |
| B7H4 | 492 | 2261 | B7H4-hu1D11-vH |
| IgE | 493 | 2262 | IgE-omalizumab-vH |
| CD23 | 494 | 2263 | CD23-p5E8-vH |
| GCC (Guanylyl cyclase C) | 495 | 2264 | GCC-5F9-vH |
| GCC (Guanylyl cyclase C) | 496 | 2265 | GCC-Ab229-vH |
| CD200R | 497 | 2266 | CD200R-huDx182-vH |
| PDL1 | 498 | 2268 | PDL1-10A5-vH |

TABLE 7
Exemplary V_{HH} fragments (Nanobodies)

| | SEQ | ID | SEQ ID |
|---|---|---|---|
| Target | (DNA) | (PRT) | NAME |
| Her2 | 499 | 2269 | Her2-2D3-vHH |
| Her2 | 500 | 2270 | Her2-5F7-vHH |
| Her2 | 501 | 2271 | Her2-47D5-vHH |
| Her3 | 502 | 2272 | Her3-17B05So-vHH |
| Her3 | 503 | 2273 | Her3-21F06-vHH |
| CEA | 504 | 2274 | CEA1-vHH |
| CEA | 505 | 2275 | CEA5-vHH |
| EGFR | 506 | 2276 | EGFR1-vHH |
| EGFR | 507 | 2277 | EGFR33-vHH |
| cMet | 508 | 2278 | cMET-171-vHH |
| CXCR4 | 509 | 2279 | CXCR4-2-vHH |
| CXCR4 | 510 | 2280 | CXCR4-1-vHH |
| Mesothelin | 511 | 2281 | SD1-vHH |
| Mesothelin | 512 | 2282 | SD2-vHH |
| Albumin | 513 | 2283 | Alb8-vHH |
| CD123 | 514 | 2284 | CD123-1-vHH |
| CD123 | 515 | 2285 | CD123-2-vHH |
| IL6R | 516 | 2286 | IL6R-304-vHH |
| EGFR & | 517 | 2287 | EGFR1-vHH-Gly-Ser- |
| CEA | | | Linker-CEA1-vHH |
| EGFR & | 518 | 2288 | EGFR33-vHH-Gly-Ser- |
| CEA | | | Linker-CEA5-vHH |
| Her2 | 519 | 2289 | Her2-5F7-vHH-Gly-Ser- |
| | | | Linker-Her2-47D5-vHH |
| Her2 | 520 | 2290 | Her2-Hu4D5-vL-Gly-Ser- |
| | | | Linker-Her2-Hu4D5-vH |
| Her3 & Her2 | 521 | 2291 | Her3-17B05So-vHH-Gly- |
| | | | Ser-Linker-Her2-2D3-vHH |
| cMet & | 522 | 2292 | cMET-171-vHH-Gly-Ser- |
| Her3 | | | Linker-Her3-21F06-14-vHH |
| Mesothelin | 523 | 2293 | SD1-vHH-Gly-Ser-Linker- |
| | | | SD2-vHH |

TABLE 8
Exemplary non-immunoglobulin antigen
binding scaffolds (affibodies, darpins).

| | SEQ ID | SEQ ID | |
|---|---|---|---|
| Target | (DNA) | (PRT) | NAME |
| Her2 | 524 | 2294 | Her2-DARPIN-1 |
| Her2 | 525 | 2295 | Her2-DARPIN-2 |
| Her3 | 526 | 2296 | Her3-affi |
| Her2 | 527 | 2297 | Her2-affi |
| EGFR | 528 | 2298 | EGFR-affi |

TABLE 9
Exemplary receptor extracellular domain

| SEQ ID | SEQ ID | |
|---|---|---|
| (DNA) | (PRT) | NAME |
| 529 | 2299 | CD19-Extracellular-Domain-minus-signal- |
| | | peptide(61-867) |
| 530 | 2300 | MPL-Extracellular-Domain-with-signal-ptepide |
| 531 | 2301 | CD8-SP-PD1-opt-ECD |
| 532 | 2302 | PD1-opt-ECD-minus-signal-peptide |
| 533 | 2303 | PD1-ECD-with-native-Signal-Peptide |
| 534 | 2304 | CTLA4-opt-ECD with signal peptide |
| 535 | 2305 | CD138-SDC1-ECD |
| 536 | 2306 | Synth-CD123-ECD |
| 537 | 2307 | CDH1-ECD |
| 538 | 2308 | CD200R1L-ECD |
| 539 | 2309 | GPNMB-ECD |
| 540 | 2310 | PTK7-ECD |
| 541 | 2311 | CD33-ECD |
| 542 | 2312 | CD34-ECD |
| 543 | 2313 | EpCAM-ECD |
| 544 | 2314 | CLEC12A-ECD |
| 545 | 2315 | CD20-ECx2-ECD |
| 546 | 2316 | CD20-ECx1-ECD |
| 547 | 2317 | CD22-v5-ECD |
| 548 | 2318 | Thyroid Stimulating Hormone Receptor (TSHR)- |
| | | ECD |
| 549 | 2319 | EGFRviii-ECD |
| 550 | 2320 | BCMA-ECD |
| 551 | 2321 | SLAMF7-CS1-ECD |
| 552 | 2322 | NKG2D-ECD-minus-signal-peptide |

TABLE 10
Exemplary ligands

| SEQ ID | SEQ ID | |
|---|---|---|
| (DNA) | (PRT) | NAME |
| 553 | 2323 | hTPO (1-187) |
| 554 | 2324 | mTPO(1-187) |
| 555 | 2325 | CGH-alpha-minus-Signal-Peptide |
| 556 | 2326 | CGH-beta-with-Signal-Peptide |
| 557 | 2327 | FSH-beta-minus-Signal-Peptide |
| 558 | 2328 | LH-beta-with-Signal-Peptide |
| 559 | 2329 | TSH-beta-with-Signal-Peptide |
| 560 | 2330 | SP-CGHb-Gly-Ser-Linker-CGHa |
| 561 | 2331 | CD8SP-FSHb-Gly-Ser-Linker-CGHa |
| 562 | 2332 | SP-LHb-Gly-Ser-Linker-CGHa |
| 563 | 2333 | SP-TSHb-Gly-Ser-Linker-CGHa |

TABLE 11
Exemplary scFv fragments

| Target | SEQ ID | SEQ ID | CONSTRUCT NAME |
|---|---|---|---|
| CD19 | 564 | 2334 | FMC63-(vL-vH) |
| CD19 | 565 | 2335 | huFMC63-11-(vL-vH) |
| CD19 | 566 | 2336 | CD19Bu12-(vL-vH) |
| CD19 | 567 | 2337 | CD19MM-(vL-vH) |
| CD19 | 568 | 2338 | CD19-4G7-(vL-vH) |
| CD19 | 569 | 2339 | CD19-MEDI-3649-(vL-vH) |
| CD19 | 570 | 2340 | CD19-Medrex-24D1-(vL-vH) |
| CD19 | 571 | 2341 | CD8SP-Ritx-CD19-MOR0028-(vL-vH) |
| CD19 | 572 | 2342 | CD19-HD37-H2L1-(vL-vH) |
| CD19 | 573 | 2343 | CD19-huBly3-(vL-vH) |
| CD19 | 574 | 2344 | CD19-huSJ25C1-(vL-vH) |
| CD19 | 575 | 2345 | CD8SP-Ritx-CD19-hB4-(vL-vH) |
| CD19 | 576 | 2346 | CD19-hu-mROO5-1-(vL-vH) |
| CD19 | 577 | 2347 | CD19-hA19-(vL-vH) |
| AFP/MHC class I complex | 578 | 2348 | AFP-61-(vL-vH) |
| AFP/MHC class I complex | 579 | 2349 | AFP-76-(vL-vH) |
| AFP/MHC class I complex | 580 | 2350 | AFP-79-(vL-vH) |
| HIV1-env | 581 | 2351 | HIV1-N6-(vL-vH) |
| ALK | 582 | 2352 | Alk-48-(vL-vH) |
| ALK | 583 | 2353 | Alk-58-(vL-vH) |
| Amyloid | 584 | 2354 | Amyloid-158-(vL-vH) |
| CD45 | 585 | 2355 | BC8-CD45-(vL-vH) |
| BCMA | 586 | 2356 | BCMA-J6M0-(vL-vH) |
| BCMA | 587 | 2357 | BCMA-huC12A3-L3H3-(vL-vH) |
| BCMA | 588 | 2358 | BCMA-ET-40-(vL-vH) |
| BCMA | 589 | 2359 | BCMA-ET-54-(vL-vH) |
| BCMA | 590 | 2360 | BCMA-ET-03-(vL-vH) |
| BCMA | 591 | 2361 | BCMA-huC11.D5.3L1H3-(vL-vH) |
| BCMA | 592 | 2362 | BCMA-huC13-F12-(vL-vH) |
| CCR4 | 593 | 2363 | CCR4-humAb1567-(vL-vH) |
| CD5 | 594 | 2364 | CD5-9-(vL-vH) |
| CD5 | 595 | 2365 | CD5-18-(vL-vH) |
| CD20 | 596 | 2366 | CD20-2F2-(vL-vH) |
| CD20 | 597 | 2367 | CD20-GA101-(vL-vH) |
| CD22 | 598 | 2368 | CD22-h10F4v2-(vL-vH) |
| CD20 | 599 | 2369 | CD20-Leu16-(vL-vH) |
| CD20 | 600 | 2370 | CD20-11B8-(vL-vH) |
| CD20 | 601 | 2371 | CD20-2C6-(vL-vH) |
| CD20 | 602 | 2372 | CD20-2H7-(vL-vH) |
| CD20 | 603 | 2373 | CD20-hA20-(vL-vH) |
| CD20 | 604 | 2374 | CD20-BM-CA-1925-v4-(vL-vH) |
| CD20 | 605 | 2375 | CD20-Ubli-v4-(vL-vH) |
| CD20 | 606 | 2376 | CD20-2H7-(vL-vH) |
| CD20 | 607 | 2377 | CD20-h1F5-(vL-vH) |
| CD20 | 608 | 2378 | CD20-7D8-(vL-vH) |
| CD20 | 609 | 2379 | CD20-7D8-(vL-GA-tag-vH) |
| CD20 | 610 | 2380 | CD20-AME-33-(vL-vH) |
| CD22 | 611 | 2381 | CD22-H22Rhov2ACDRKA-(vL-vH) |
| CD22 | 612 | 2382 | CD22-m971-(vL-vH) |
| CD22 | 613 | 2383 | CD22-m971-HL-(vH-vL) |
| CD30 | 614 | 2384 | CD30-5F11-(vL-vH) |
| CD30 | 615 | 2385 | CD30-Ac10-(vL-vH) |
| CD32 | 616 | 2386 | CD32-Med9-(vL-vH) |
| CD33 | 617 | 2387 | CD33-AF5-(vL-vH) |
| CD33 | 618 | 2388 | CD33-huMyc9-(vL-vH) |
| CD33 | 619 | 2389 | CD8SP-Ritx2-BC33-Boehr2800308- |
| CD33 | 620 | 2390 | CD8SP-Ritx2-CD33-Him3-4-(vL-vH) |
| CD33 | 621 | 2391 | CD33-SGNh2H12-(vL-vH) |
| CD33 | 622 | 2392 | CD33-15G15-33-(vL-vH) |
| CD33 | 623 | 2393 | CD33-33H4-(vL-vH) |
| CD33 | 624 | 2394 | CD33-9C3-2-(vL-vH) |
| CD34 | 625 | 2395 | CD34-hu4C7-(vL-vH) |
| CD44v6 | 626 | 2396 | CD44v6-Biwa8-(vL-vH) |
| CD70 | 627 | 2397 | CD70-h1F6-(vL-vH) |
| CD79b | 628 | 2398 | CD79b-2F2-(vL-vH) |
| CD99 | 629 | 2399 | CD99-hu12E7-(vL-vH) |
| CD123 | 630 | 2400 | CD123-CSL362-(vL-vH) |
| CD123 | 631 | 2401 | CD123-1172-(vL-vH) |
| CD123 | 632 | 2402 | CD123-DART1-1-(vL-vH) |
| CD123 | 633 | 2403 | CD123-DART1-2-(vL-vH) |
| CD123 | 634 | 2404 | CD123-I3RB18-(vL-vH) |
| CD123 | 635 | 2405 | CD123-hu3E3-(vL-vH) |
| CD123 | 636 | 2406 | CD123-9F6-(vL-vH) |
| CD123 | 637 | 2407 | CD123-I3RB2-(vL-vH) |
| CD123 | 638 | 2408 | CD123-1176-(vL-vH) |
| CD123 | 639 | 2409 | CD8SP-Ritx2-CD123-8B11-(vL-vH) |
| CD123 | 640 | 2410 | CD123-2B8-(vL-vH) |
| CD123 | 641 | 2411 | CD123-9D7-(vL-vH) |
| CD123 | 642 | 2412 | CD123-3B10-(vL-vH) |
| CD138 | 643 | 2413 | CD138-(vL-vH) |
| CD179b | 644 | 2414 | CD179b-(vL-vH) |
| CD276 | 645 | 2415 | CD276-17-(vL-vH) |
| CD324 | 646 | 2416 | CD324-SC10-6-(vL-vH) |
| CD324 | 647 | 2417 | CD324-hSC10-17-(vL-vH) |
| CDH6 | 648 | 2418 | CDH6-NOV710-(vL-vH) |
| CDH6 | 649 | 2419 | CDH6-NOV712-(vL-vH) |
| CDH17 | 650 | 2420 | CDH17-PTA001A4-(vL-vH) |
| CDH19 | 651 | 2421 | CDH19-16A4-(vL-vH) |
| EGFR | 652 | 2422 | Cetuximab-(vL-vH) |
| CLEC5A | 653 | 2423 | CLEC5A-8H8F5-(vL-vH) |
| CLEC5A | 654 | 2424 | CLEC5A-3E12A2-(vL-vH) |
| CLL1 | 655 | 2425 | CLL1-M26-(vL-vH) |
| CLL1 | 656 | 2426 | CLL1-M32-(vL-vH) |
| CLL1 | 657 | 2427 | CLL1-21C9-L2H3-(vL-vH) |
| CLL1 | 658 | 2428 | CLL1-6E7L4H1e-(vL-vH) |
| CLL1 | 659 | 2429 | CLL1-hu1075-v1-(vL-vH) |
| CLL1 | 660 | 2430 | CLL1-hu1075-v2-(vL-vH) |
| CMVpp65/MHC class I | 661 | 2431 | CMVpp65-F5-(vL-vH) |
| CS1 | 662 | 2432 | CS1-huLuc63-(vL-vH) |
| CS1 | 663 | 2433 | CS1-HuLuc64-(vL-vH) |
| CS1 | 664 | 2434 | CS1-Luc90-(vL-vH) |
| CS1 | 665 | 2435 | CS1-PDL241-(vL-vH) |
| CS1 | 666 | 2436 | CS1-Hu27A-(vL-vH) |
| CS1 | 667 | 2437 | CS1-ScHu34C3-(vL-vH) |
| CS1 | 668 | 2438 | CS1-Hu31-D2-(vL-vH) |
| CS1 | 669 | 2439 | CS1-Luc34-(vL-vH) |
| CS1 | 670 | 2440 | CS1-LucX2-(vL-vH) |
| CSF2RA | 671 | 2441 | CSF2RA-Ab6-(vL-vH) |
| CSF2RA | 672 | 2442 | CSF2RA-Ab1-(vL-vH) |
| DLL3 | 673 | 2443 | DLL3-hSC16-13-(vL-vH) |
| DLL3 | 674 | 2444 | DLL3-hSC16-56-(vL-vH) |
| EBNA3c/MHC class I | 675 | 2445 | EBNA3c-315-(vL-vH) |
| EBV-gp350 | 676 | 2446 | EBV-gp350-(vL-vH) |
| EGFRvIII | 677 | 2447 | EGFRvIII-139-(vL-vH) |
| EGFRvIII | 678 | 2448 | EGFRvIII-2173-(vH-vL) |
| EpCam1 | 679 | 2449 | Epcam1-MM1-(vL-vH) |
| EpCam1 | 680 | 2450 | Epcam1-D5K5-(vL-vH) |
| FLT3 | 681 | 2451 | FLT3-NC7-(vL-vH) |
| FITC | 682 | 2452 | FITC-(vL-vH) |
| FITC | 683 | 2453 | FITC-4M-53-(vL-vH) |
| FITC | 684 | 2454 | FITC-E2-HL-(vH-vL) |
| Influenza A HA | 685 | 2455 | FLU-MEDI-8852-(vL-vH) |
| FR1 (Folate Receptor a) | 686 | 2456 | FR1-huMov19-(vL-vH) |
| GAD | 687 | 2457 | GAD-G3H8-(vL-vH) |
| GD2 | 688 | 2458 | GD2-hu14-18-(vL-vH) |
| GD2 | 689 | 2459 | GD2-hu3F8-(vL-vH) |
| GD3 | 690 | 2460 | GD3-KM-641-(vL-vH) |
| GFRa4 | 691 | 2461 | GFRAlpha4-P4-6-(vL-vH) |
| GFRa4 | 692 | 2462 | GFRa4-P4-10-(vL-vH) |
| GM1 | 693 | 2463 | GM1-5B2-(vL-vH) |
| GM1 | 694 | 2464 | GM1-7E5-(vL-vH) |
| GPRC5D | 695 | 2465 | GPRC5D-ET150-5-(vL-vH) |
| GPRC5D | 696 | 2466 | GPRC5D-ET150-18-(vL-vH) |
| GPRC5D | 697 | 2467 | GPRC5D-ET150-1-(vL-vH) |
| GPRC5D | 698 | 2468 | GPRC5D-ET150-2-(vL-vH) |
| gp100/MHC class I | 699 | 2469 | gp100-(vL-vH) |
| gp100/MHC class I | 700 | 2470 | gp100-G2D12-(vL-vH) |
| GPC3 | 701 | 2471 | GPC3-4E5-(vL-vH) |
| gpNMB | 702 | 2472 | gpNMB-115-(vL-vH) |
| GRP78 | 703 | 2473 | GRP78-GC18-(vL-vH) |
| HIV-gag/MHC class I | 704 | 2474 | HIV1-E5-(vL-vH) |
| HIV1-env | 705 | 2475 | HIV1-3BNC117-(vL-vH) |
| HIV1-env | 706 | 2476 | HIV1-PGT-128-(vL-vH) |
| HIV1-env | 707 | 2477 | HIV1-VR-C01-(vL-vH) |
| HIV1-env | 708 | 2478 | HIV1-X5-(vL-vH) |
| HLA-A2 | 709 | 2479 | HLA-A2-3PB2-(vL-vH) |
| HMW-MAA | 710 | 2480 | HMW-MAA-hIND-(vL-vH) |
| HPV16 | 711 | 2481 | HPV16-7-8-(vL-vH) |
| HPV16 | 712 | 2482 | HPV16-2-(vL-vH) |
| HTLV1-TAX/MHC class I | 713 | 2483 | HTLV-TAX-T3F2-(vL-vH) |
| HTLV1-TAX/MHC class I | 714 | 2484 | HTLV-TAX-T3E3-(vL-vH) |
| IL11Ra | 715 | 2485 | IL11Ra-8E2-Ts107-(vL-vH) |
| IL13Ra2 | 716 | 2486 | IL13Ra2-hu107-(vL-vH) |
| IL13Ra2 | 717 | 2487 | IL13Ra2-Hu108-(vL-vH) |
| KSHV-K8.1 | 718 | 2488 | KSHV-4C3-(vL-vH) |
| LAMP1 | 719 | 2489 | LAMP1-humab1-2-(vL-vH) |
| LAMP1 | 720 | 2490 | LAMP1-Mb4-(vL-vH) |
| LewisY | 721 | 2491 | LewisY-huS193-(vL-vH) |
| L1CAM | 722 | 2492 | L1CAM-9-3-HU3-(vL-vH) |
| Lym1 | 723 | 2493 | Lym1-(vL-vH) |
| Lym2 | 724 | 2494 | Lym2-(vL-vH) |
| CD79b | 725 | 2495 | huMA79bv28-(vL-vH) |
| MART/MHC class I | 726 | 2496 | MART1-CAG10-(vL-vH) |
| MART/MHC class I | 727 | 2497 | MART1-CLA12-(vL-vH) |
| Mesothelin | 728 | 2498 | Mesothelin-m912-(vL-vH) |
| MPL | 729 | 2499 | MPL-175-(vL-vH) |
| MPL | 730 | 2500 | MPL-161-(vL-vH) |
| MPL | 731 | 2501 | MPL-161-HL-(vH-vL) |
| MPL | 732 | 2502 | MPL-111-(vL-vH) |
| MPL | 733 | 2503 | MPL-178-(vL-vH) |
| MPL | 734 | 2504 | MPL-AB317-(vL-vH) |
| MPL | 735 | 2505 | MPL-12E10-(vL-vH) |
| MPL | 736 | 2506 | MPL-huVB22Bw5-(vL-vH) |
| Muc 1/MHC class I complex | 737 | 2507 | Muc1-D6-M3B8-(vL-vH) |
| Muc 1/MHC class I complex | 738 | 2508 | MUC1-D6-M3A1-(vL-vH) |
| Muc16 | 739 | 2509 | Muc16-4H11-(vL-vH) |
| EGFR | 740 | 2510 | Nimotuzumab-(vL-vH) |
| NKG2D | 741 | 2511 | NKG2D-MS-(vL-vH) |
| NYBR1 | 742 | 2512 | NYBR1-(vL-vH) |
| NY-ESO/MHC class I | 743 | 2513 | NYESO-T1-(vL-vH) |
| NY-ESO/MHC class I | 744 | 2514 | NYESO-T2-(vL-vH) |
| PDL1 | 745 | 2515 | PDL1-Atezoli-(vL-vH) |
| PDL1 | 746 | 2516 | PDL1-SP142-(vL-vH) |
| PDL1 | 747 | 2517 | PDL1-10A5-(vL-vH) |
| PSCA | 748 | 2518 | PSCA-Ha14-121-(vL-vH) |
| PSCA | 749 | 2519 | PSCA-Ha14-117-(vL-vH) |
| PR1/MHC class I complex | 750 | 2520 | PR1-(vL-vH) |
| PSMA | 751 | 2521 | PSMA-006-(vL-vH) |
| PSMA | 752 | 2522 | PSMA-J591-(vL-vH) |
| PTK7 | 753 | 2523 | PTK7-hSC6-23-(vL-vH) |
| PTK7 | 754 | 2524 | PTK7-SC6-10-2-(vL-vH) |
| ROR1 | 755 | 2525 | ROR1-4A5-(vL-vH) |
| ROR1 | 756 | 2526 | ROR1-4C10-(vL-vH) |
| Mesothelin | 757 | 2527 | SD1-14-1H-Gly-Ser-Linker-SD2-vHH |
| SLea | 758 | 2528 | SLea-7E3-(vL-vH) |
| SLea | 759 | 2529 | SLea-5B1-(vL-vH) |
| SSEA4 | 760 | 2530 | SSEA4-(vL-vH) |
| TCRB 1 | 761 | 2531 | TCRB1-CP01-E09-(vL-vH) |
| TCRB 1 | 762 | 2532 | TCRB1-Jovi1-(vL-vH) |
| TCRB2 | 763 | 2533 | TCRB2-CP01-D05-(vL-vH) |
| TCRB2 | 764 | 2534 | TCRB2-CP01-E05-(vL-vH) |
| TCRgd | 765 | 2535 | TCRgd-G5-4-(vL-vH) |
| hTERT | 766 | 2536 | TERT-4A9-T540-(vL-vH) |
| hTERT | 767 | 2537 | TERT-3G3-T865-(vL-vH) |
| Tissue Factor-1 | 768 | 2538 | TF1-98-(vL-vH) |
| TGFBR2 | 769 | 2539 | TGFBR2-Ab1-(vL-vH) |
| TIM1 | 770 | 2540 | TIM1-HVCR1-270-2-(vL-vH) |
| TIM1 | 771 | 2541 | TIM1-HVCR1-ARD5-(vL-vH) |
| TnAg | 772 | 2542 | TnAg-(vL-vH) |
| Tn-Muc1 | 773 | 2543 | TnMuc1-hu5E5-RHA8-RKA-2-(vL-vH) |
| TROP2 | 774 | 2544 | TROP2-ARA47-HV3KV3-(vL-vH) |
| TROP2 | 775 | 2545 | TROP2-h7E6-SVG-(vL-vH) |
| TSHR | 776 | 2546 | TSHR-K1-70-(vL-vH) |
| TSHR | 777 | 2547 | TSHR-KB1-(vL-vH) |
| TSHR | 778 | 2548 | TSHR-5C9-(vL-vH) |
| TSLPR | 779 | 2549 | TSLPR-(vL-vH) |
| Tyrosinase/MHC class I | 780 | 2550 | Tyros-B2-(vL-vH) |
| Tyrosinase/MHC class I | 781 | 2551 | Tyros-MC1-(vL-vH) |
| Tyrosinase/MHC class I | 782 | 2552 | Tyros-TA2-(vL-vH) |
| VEGFR3 | 783 | 2553 | VEGFR3-Ab1-(vL-vH) |
| WT1/MHC class I complex | 784 | 2554 | WT1-Ab1-(vL-vH) |
| WT1/MHC class I complex | 785 | 2555 | WT1-Ab5-(vL-vH) |
| WT1/MHC class I complex | 786 | 2556 | WT1-Ab13-(vL-vH) |
| WT1/MHC class I complex | 787 | 2557 | WT1-Ab15-(vL-vH) |
| CDH19 | 788 | 2558 | CDH19-4B10-(vL-vH) |
| Folate Receptor beta | 789 | 2559 | FRbeta-m923-(vL-vH) |
| LHR | 790 | 2560 | LHR-8B7-(vL-vH) |
| LHR | 791 | 2561 | LHR-5F4-21-(vL-vH) |
| B7H4 | 792 | 2562 | B7H4-hu22C10-(vL-vH) |
| B7H4 | 793 | 2563 | B7H4-hu1D11-(vL-vH) |
| IgE | 794 | 2564 | IgE-omalizumab-(vL-vH) |
| CD23 | 795 | 2565 | CD23-p5E8-(vL-vH) |
| GCC | 796 | 2566 | GCC-5F9-(vL-vH) |
| GCC | 797 | 2567 | GCC-Ab229-(vL-vH) |
| CD200R | 798 | 2568 | CD200R-huDx182-(vL-vH) |

TABLE 12
Epitope Tags

| SEQ ID (DNA) | SEQ ID (PRT) | NAME |
|---|---|---|
| 553 | 2569 | Myc-TAG |
| 554 | 2570 | FLAG-TAG |
| 555 | 2571 | AcV5 |
| 556 | 2572 | V5-TAG |
| 557 | 2573 | HA-TAG |
| 558 | 2574 | HIS-TAG |
| 559 | 2575 | AVI-TAG-delta-GSG |
| 560 | 2576 | StrepTagII |
| 561 | 2577 | 4XFLAG-2xSTREP-8xHIS |
| 562 | 2578 | 3xFLAG |
| 563 | 2579 | 4xHA-Strep-8xHis |
| 3526 | 3530 | RITX-TAG |
| 3527 | 3531 | RITX2-TAG |
| 3528 | 3532 | RITX4-TAG |
| 3529 | 3533 | GA-TAG |

TABLE 13
Exemplary reporter fragments

| SEQ ID | SEQ ID | |
|---|---|---|
| (DNA) | (PRT) | REPORTER NAME |
| 813 | 2580 | GLuc (Gaussia princeps Luc) |
| | | Minus Secretory Signal |
| 814 | 2581 | NLuc (NanoLuc) |
| 815 | 2582 | TLuc (TurboLuc16) |
| | | Minus Secretory Signal |
| 816 | 2583 | MLuc7-(Metrida longa) Luc |
| | | M43L/M110L |
| | | Variant Minus Secretory Signal |
| 817 | 2584 | LoLuc (Lucicutia ovaliformis Luc) |
| | | Minus Secretory Signal |
| 818 | 2585 | HtLuc (H.tanneri Luc) |
| | | Minus Secretory Signal |
| 819 | 2586 | PaLuc1 (Pleuromamma |
| | | abdominalis Luc) |
| | | minus Secretory Signal |
| 820 | 2587 | PaLuc2 (Pleuromamma |
| | | abdominalis Luc2)-minus |
| | | Secretory Signal |
| 821 | 2588 | MpLuc1[Metridia pacifica] |
| | | minus secretory signal |
| 822 | 2589 | McLuc1 [Metridia curticauda] |
| | | minus secretory signal |
| 823 | 2590 | MaLuc1 [Metridia asymmetrical] |
| | | minus secretory signal |
| 824 | 2591 | MoLuc1 [Metridia okhotensis] |
| | | minus secretory signal |
| 825 | 2592 | MoLuc2 [Metridia okhotensis] |
| | | minus secretory signal |
| 826 | 2593 | MLuc39 [Metridia longa] |
| | | minus secretory signal |
| 827 | 2594 | PsLuc1 [Pleuromamma scutullata] |
| | | minus secretory signal |
| 828 | 2595 | LoLuc 1-3 [Lucicutia ovaliformis] |
| | | minus secretory signal |
| 829 | 2596 | HtLuc2 [Heterorhabdus tanneri] |
| | | minus secretory signal |
| 830 | 2597 | Renilla Luc |

TABLE 14
Exemplary cleavable linkers and furine cleavage site

| | SEQ ID | SEQ ID |
|---|---|---|
| NAME | (DNA) | (PRT) |
| F2A | 831 | 2598 |
| T2A | 832 | 2599 |
| T2A | 833 | 2599 |
| P2A | 834 | 2600 |
| P2a-variant | 835 | 2601 |
| E2A | 836 | 2602 |
| SGSG | 837 | 2603 |
| SGSG | 838 | 2603 |
| FURINE CLEAVAGE SITE | 839 | 2604 |
| FURINE CLEAVAGE SITE | 840 | 2604 |
| FURINE Cleavage Site | 841 | 2604 |

TABLE 15
Exemplary CAR components

| SEQ ID | SEQ ID | |
|---|---|---|
| (DNA) | (Prt) | NAME |
| 842 | 2605 | hCD8-Hinge-TM |
| 843 | 2606 | hCD8-Hinge-TM-BBz |
| 844 | 2607 | hCD8TM-Hinge-BB |
| 845 | 2608 | 4-1BB-cytosolic-domain |
| 846 | 2609 | CD3z-cytosolic-domain |
| 847 | 2610 | CD3z-cytosolic-domain |
| 848 | 2611 | CD28-Hinge-TM- |
| | | cytosolic-domain |
| 849 | 2612 | LAILR1-TM-CP |

TABLE 16
Exemplary Therapeutic Controls,
Accessory modules and their components

| SEQ ID | SEQ ID | |
|---|---|---|
| (DNA) | (PRT) | NAME |
| 850 | 2613 | PuroR_Variant-(PAC) |
| 851 | 2614 | BlastR |
| 852 | 2615 | CNB30 |
| 853 | 2616 | GMCSF-SP-tEGFR |
| 854 | 2617 | tEGFRviii |
| 855 | 2618 | tCD19 |
| 856 | 2619 | tBCMA |
| 857 | 2620 | FKBP |
| 858 | 2621 | FKBP |
| 859 | 2622 | FKBPx2 |
| 860 | 2623 | Myr-FKBPx2-K13 |
| 861 | 2624 | MYR |
| 862 | 2625 | Myr-MYD88-CD40-Fv′-Fv |
| 863 | 2626 | IL12F |
| 864 | 2627 | 41BB-L |
| 865 | 2628 | CD40L |
| 866 | 2629 | K13-vFLIP |
| 867 | 2630 | MC159-vFLIP |
| 868 | 2631 | MC160-vFLIP |
| 869 | 2632 | E8-vFLIP |
| 870 | 2633 | Herpesvirus-saimiri-vFLIP |
| 871 | 2634 | Mecaca-vFLIP |
| 872 | 2635 | BHV-vFLIP |
| 873 | 2636 | cFLIP-L/MRIT-alpha |
| 874 | 2637 | cFLIP-p22 |
| 875 | 2638 | HTLV1-TAX |
| 876 | 2639 | HTLV2-TAX |
| 877 | 2640 | HTLV2-TAX-RS |
| 878 | 2641 | FKBP-K13 |
| 879 | 2642 | FKBPX2-K13 |
| 880 | 2643 | Myr-FKBPx2-K13 |
| 881 | 2644 | FKBPx2-HTLV2-Tax-RS |
| 882 | 2645 | FKBPx2-Flag-HTLV2-Tax-RS |
| 883 | 2646 | icaspase-9 |
| 884 | 2647 | IL6R-304-vHH |
| 885 | 2648 | Alb8-vHH |
| 886 | 2649 | IGHSP2-IL6R-304-VHH-ALB 8-VHH |
| 887 | 2650 | IL6-19A-vL |
| 888 | 2651 | 1L6-19A-vH |
| 889 | 2652 | CD8SP2-PD1-4H1-scFv |
| 890 | 2653 | CD8SP2-PD1-5C4-scFv |
| 891 | 2654 | CD8SP2-CTLA4-Ipilimumab-scFv |
| 892 | 2655 | CD8SP2-PD1-4H1-Alb8-vHH |
| 893 | 2656 | CD8SP2-PD1-5C4-Alb8-vHH |
| 894 | 2657 | CD8SP2-CTLA4-Ipilimumab-Alb8-vHH |
| 895 | 2658 | IL6-19A-vL |
| 896 | 2659 | 1L6-19A-vH |
| 897 | 2660 | IL6R-M83-vL |
| 898 | 2661 | IL6R-M83-vH |
| 899 | 2662 | IgSP-IL6-19A-scFV |
| 900 | 2663 | IgSP-Fx06 |
| 901 | 2664 | CD8SP2-sHVEM |
| 902 | 2665 | CD8SP2-sHVEM-Alb8-vHH |
| 903 | 2666 | hTERT |
| 904 | 2667 | Heparinase |

TABLE 17
Exemplary vectors, components and polyA sequence

| SEQ ID | |
|---|---|
| (DNA) | NAME |
| 905 | pLenti-EF1a |
| 906 | pLenti-EF1a-DWPRE |
| 907 | MSCV-Bgl2-AvrII-Bam-EcoR1-Xho- |
| | BstB1-Mlu-Sal-ClaI.I03 |
| 908 | pSBbi-Pur |
| 909 | EF1alpha_(EF1a)_Promoter_Variant |
| 910 | T7 |
| 911 | T3 |
| 912 | MSCVhygro-GLuc-HA-G02 |
| 913 | MSCVpac-GLUC-R03 |
| 914 | pLENTI-NLuc-AcV5-Blasticidin-Pa08 |
| 915 | pLENTI-TurboLuc-16-X3Flag-C04 |
| 916 | pLenti-EF1a-Pac-T2A-Gluc-B07 |
| 917 | MSCV-hygro-NLuc-AcV5-D07 |
| 918 | pLENTI-Gluc-Flag-blast-B07 |
| 919 | H1-shRNA-BRD4-4 |
| 920 | pLenti-EF1a-shRNA-BRD4-DWPRE |
| 921 | pLenti-EF1a-CD8SP-FMC63-(vL-vH)-Myc-z-P2A-K13- |
| | Flag-T2A-PAC-H1-prom-shRNA-BRD4-DWPRE |
| 922 | PolyA |

TABLE 18
Exemplary GGS-Luc reporter proteins

| SEQ ID | SEQ ID | |
|---|---|---|
| (DNA) | (PRT) | NAME |
| 923 | 2668 | CD8SP-FMC63(vL-vH)-GGSG-NLuc-AcV5 |
| 924 | 2669 | CD8SP-161-(vL-vH)-GGSG-NLuc-AcV5 |
| 925 | 2670 | MPL-ECD-GGSG-Nluc-AcV5 |
| 926 | 2671 | FLAG-CD19-ECD-GGSG-NLuc-AcV5 |

TABLE 19
Exemplary CAR constructs containing CD3z activation domain and coexpressing K13.

| | | SEQ ID | SEQ ID | |
|---|---|---|---|---|
| Target | Clone ID | (DNA) | (PRT) | CONSTRUCT NAME |
| CD19 | 111614-B05 | 927 | 2672 | CD8SP-FMC63-(vL-vH)-Myc-z-P2A- |
| | | | | K13-Flag-T2A-PAC |
| CD19 | | 928 | 2673 | CD8SP-huFMC63-11-(vL-vH)-Myc-z- |
| | | | | P2A-K13-Flag-T2A-PAC |
| CD19 | | 929 | 2674 | CD8SP-huFMC63-11-N203Q-(vL-vH)- |
| | | | | Myc-z-P2A-K13-Flag-T2A-PAC |
| CD19 | | 930 | 2675 | CD8SP-CD19Bu12-(vL-vH)-Myc-z- |
| | | | | P2A-K13-Flag-T2A-PAC |
| CD19 | | 931 | 2676 | CD8SP-2-CD19MM-(vL-vH)-Myc-z- |
| | | | | P2A-K13-Flag-T2A-PAC |
| CD19 | | 932 | 2677 | CD8SP-CD19-4G7-(vL-vH)-Myc-z- |
| | | | | P2A-K13-Flag-T2A-PAC |
| CD19 | | 933 | 2678 | CD8SP-CD19-MEDI-3649-(vL-vH)- |
| | | | | Myc-z-P2A-K13-Flag-T2A-PAC |
| CD19 | | 934 | 2679 | CD8SP-CD19-Medrex-24D1-(vL-vH)- |
| | | | | Myc-z-P2A-K13-Flag-T2A-PAC |
| CD19 | | 935 | 2680 | CD8SP-Ritx-CD19-MOR0028-(vL- |
| | | | | vH)-Myc-z-P2A-K13-Flag-T2A-PAC |
| CD19 | | 936 | 2681 | CD8SP-CD19-HD37-H2L1-(vL-vH)- |
| | | | | Myc-z-P2A-K13-Flag-T2A-PAC |
| CD19 | | 937 | 2682 | CD8SP-CD19-huBly3-(vL-vH)-Myc-z- |
| | | | | P2A-K13-Flag-T2A-PAC |
| CD19 | | 938 | 2683 | CD8SP-CD19-huSJ25C1-(vL-vH)- |
| | | | | Myc-z-P2A-K13-Flag-T2A-PAC |
| CD19 | | 939 | 2684 | CD8SP-Ritx-CD19-hB4-(vL-vH)-Myc- |
| | | | | z-P2A-K13-Flag-T2A-PAC |
| CD19 | | 940 | 2685 | CD8SP-CD19-hu-mROO5-1-(vL-vH)- |
| | | | | Myc-z-P2A-K13-Flag-T2A-PAC |
| CD19 | | 941 | 2686 | CD8SP-CD19-hA19-(vL-vH)-Myc-z- |
| | | | | P2A-K13-Flag-T2A-PAC |
| AFP/MHC class I | | 942 | 2687 | CD8SP-AFP-61-(vL-vH)-Myc-z-P2A- |
| complex | | | | K13-Flag-T2A-PAC |
| AFP/MHC class I | | 943 | 2688 | CD8SP-AFP-76-(vL-vH)-Myc-z-P2A- |
| complex | | | | K13-Flag-T2A-PAC |
| AFP/MHC class I | | 944 | 2689 | CD8SP-AFP-79-(vL-vH)-Myc-z-P2A- |
| complex | | | | K13-Flag-T2A-PAC |
| HIV1-envelop | | 945 | 2690 | CD8SP-HIV1-N6-(vL-vH)-Myc-z- |
| glycoprotein | | | | P2A-K13-Flag-T2A-PAC |
| ALK (Anaplastic | 051916-D04 | 946 | 2691 | CD8SP-Alk-48-(vL-vH)-Myc-z-P2A- |
| Lymphoma Kinase) | | | | K13-Flag-T2A-PAC |
| ALK (Anaplastic | | 947 | 2692 | CD8SP-Alk-58-(vL-vH)-Myc-z-P2A- |
| Lymphoma Kinase) | | | | K13-Flag-T2A-PAC |
| Amyloid | | 948 | 2693 | SP-Amyloid-158-(vL-vH)-Myc-z-P2A- |
| | | | | K13-Flag-T2A-PAC |
| Biotin | | 949 | 2694 | CD8SP-dc-Avidin-Myc-z-P2A-K13- |
| | | | | Flag-T2A-PAC |
| CD45 | | 950 | 2695 | CD8SP-BC8-CD45-(vL-vH)-Myc-z- |
| | | | | P2A-K13-Flag-T2A-PAC |
| BCMA | | 951 | 2696 | CD8SP-BCMA-J6M0-(vL-vH)-Myc-z- |
| | | | | P2A-K13-Flag-T2A-PAC |
| BCMA | | 952 | 2697 | CD8SP-BCMA-huC12A3-L3H3-(vL- |
| | | | | vH)-Myc-z-P2A-K13-Flag-T2A-PAC |
| BCMA | | 953 | 2698 | CD8SP-BCMA-ET-40-(vL-vH)-Myc-z- |
| | | | | P2A-K13-Flag-T2A-PAC |
| BCMA | | 954 | 2699 | CD8SP-BCMA-ET-54-(vL-vH)-Myc-z- |
| | | | | P2A-K13-Flag-T2A-PAC |
| BCMA | | 955 | 2700 | CD8SP-BCMA-ET-03-(vL-vH)-Myc-z- |
| | | | | P2A-K13-Flag-T2A-PAC |
| BCMA | | 956 | 2701 | CD8SP-BCMA-huC11.D5.3L1H3-(vL- |
| | | | | vH)-Myc-z-P2A-K13-Flag-T2A-PAC |
| BCMA | | 957 | 2702 | CD8SP-BCMA-huC13-F12-(vL-vH)- |
| | | | | Myc-z-P2A-K13-Flag-T2A-PAC |
| CCR4 | | 958 | 2703 | CD8SP-CCR4-humAb1567-(vL-vH)- |
| | | | | Myc-z-P2A-K13-Flag-T2A-PAC |
| HIV1-envelop | 052615-G02 | 959 | 2704 | CD8SP-CD4-ECD-Gly-Ser-Linker-DC- |
| glycoprotein | | | | SIGN-Myc-z-P2A-K13-Flag-T2A-PAC |
| CD5 | | 960 | 2705 | CD8SP-CD5-9-(vL-vH)-Myc-z-P2A- |
| | | | | K13-Flag-T2A-PAC |
| CD5 | | 961 | 2706 | CD8SP-CD5-18-(vL-vH)-Myc-z-P2A- |
| | | | | K13-Flag-T2A-PAC |
| Ig Fc | | 962 | 2707 | CD8SP-CD16A-V158-ECD-v2-Myc-z- |
| | | | | P2A-K13-Flag-T2A-PAC |
| Ig Fc | 091015-Z07 | 963 | 2708 | CD8SP-CD16A-V158-ECD-v1-Myc-z- |
| | | | | P2A-K13-Flag-T2A-PAC |
| CD20 | | 964 | 2709 | CD8SP-CD20-2F2-(vL-vH)-Myc-z- |
| | | | | P2A-K13-Flag-T2A-PAC |
| CD20 | | 965 | 2710 | CD8SP-CD20-GA101-(vL-vH)-Myc-z- |
| | | | | P2A-K13-Flag-T2A-PAC |
| CD20 | | 966 | 2711 | CD8SP-CD20-Leu16-(vL-vH)-Myc-z- |
| | | | | P2A-K13-Flag-T2A-PAC |
| CD20 | | 967 | 2712 | CD8SP-CD20-11B8-(vL-vH)-Myc-z- |
| | | | | P2A-K13-Flag-T2A-PAC |
| CD20 | | 968 | 2713 | CD8SP-CD20-2C6-(vL-vH)-Myc-z- |
| | | | | P2A-K13-Flag-T2A-PAC |
| CD20 | | 969 | 2714 | CD8SP-CD20-2H7-(vL-vH)-Myc-z- |
| | | | | P2A-K13-Flag-T2A-PAC |
| CD20 | | 970 | 2715 | CD8SP-CD20-hA20-(vL-vH)-Myc-z- |
| | | | | P2A-K13-Flag-T2A-PAC |
| CD20 | | 971 | 2716 | CD8SP-CD20-BM-CA-1925-v4-(vL- |
| | | | | vH)-Myc-z-P2A-K13-Flag-T2A-PAC |
| CD20 | | 972 | 2717 | CD8SP-CD20-Ubli-v4-(vL-vH)-Myc-z- |
| | | | | P2A-K13-Flag-T2A-PAC |
| CD20 | | 973 | 2718 | CD8SP-CD20-2H7-(vL-vH)-Myc-z- |
| | | | | P2A-K13-Flag-T2A-PAC |
| CD20 | | 974 | 2719 | CD8SP-CD20-h1F5-(vL-vH)-Myc-z- |
| | | | | P2A-K13-Flag-T2A-PAC |
| CD20 | | 975 | 2720 | CD8SP-CD20-7D8-(vL-vH)-Myc-z- |
| | | | | P2A-K13-Flag-T2A-PAC |
| CD20 | | 976 | 2721 | CD8SP-CD20-AME-33-(vL-vH)-Myc- |
| | | | | z-P2A-K13-Flag-T2A-PAC |
| CD22 | | 977 | 2722 | CD8SP-CD22-h10F4v2-(vL-vH)-Myc- |
| | | | | z-P2A-K13-Flag-T2A-PAC |
| CD22 | 050516-H05 | 978 | 2723 | CD8SP-CD22-H22Rhov2ACDRKA- |
| | | | | (vL-vH)-Myc-z-P2A-K13-Flag-T2A- |
| | | | | PAC |
| CD22 | | 979 | 2724 | CD8SP-CD22-m971-(vL-vH)-Myc-z- |
| | | | | P2A-K13-Flag-T2A-PAC |
| CD22 | | 980 | 2725 | CD8SP-CD22-m971-HL-(vH-vL)-Myc- |
| | | | | z-P2A-K13-Flag-T2A-PAC |
| CD30 | 060616-H05 | 981 | 2726 | CD8SP-CD30-5F11-(vL-vH)-Myc-z- |
| | | | | P2A-K13-Flag-T2A-PAC |
| CD30 | | 982 | 2727 | CD8SP-CD30-Ac10-(vL-vH)-Myc-z- |
| | | | | P2A-K13-Flag-T2A-PAC |
| CD32 | 060916-A02 | 983 | 2728 | CD8SP-CD32-Med9-(vL-vH)-Myc-z- |
| | | | | P2A-K13-Flag-T2A-PAC |
| CD33 | | 984 | 2729 | CD8SP-CD33-AF5-(vL-vH)-Myc-z- |
| | | | | P2A-K13-Flag-T2A-PAC |
| CD33 | | 985 | 2730 | CD8SP-CD33-huMyc9-(vL-vH)-Myc- |
| | | | | z-P2A-K13-Flag-T2A-PAC |
| CD33 | | 986 | 2731 | CD8SP-CD33-Boehr2800308-(vL-vH)- |
| | | | | Myc-z-P2A-K13-Flag-T2A-PAC |
| CD33 | | 987 | 2732 | CD8SP-CD33-Him3-4-(vL-vH)-Myc-z- |
| | | | | P2A-K13-Flag-T2A-PAC |
| CD33 | | 988 | 2733 | CD8SP-CD33-SGNh2H12-(vL-vH)- |
| | | | | Myc-z-P2A-K13-Flag-T2A-PAC |
| CD33 | | 989 | 2734 | CD8SP-CD33-15G15-33-(vL-vH)- |
| | | | | Myc-z-P2A-K13-Flag-T2A-PAC |
| CD33 | | 990 | 2735 | CD8SP-CD33-33H4-(vL-vH)-Myc-z- |
| | | | | P2A-K13-Flag-T2A-PAC |
| CD33 | | 991 | 2736 | CD8SP-CD33-9C3-2-(vL-vH)-Myc-z- |
| | | | | P2A-K13-Flag-T2A-PAC |
| CD34 | 051616-I02 | 992 | 2737 | CD8SP-CD34-hu4C7-(vL-vH)-Myc-z- |
| | | | | P2A-K13-Flag-T2A-PAC |
| CD44v6 | | 993 | 2738 | CD8SP-CD44v6-Biwa8-(vL-vH)-Myc- |
| | | | | z-P2A-K13-Flag-T2A-PAC |
| CD70 | | 994 | 2739 | CD8SP-CD70-h1F6-(vL-vH)-Myc-z- |
| | | | | P2A-K13-Flag-T2A-PAC |
| CD79b | | 995 | 2740 | CD8SP-CD79b-2F2-(vL-vH)-Myc-z- |
| | | | | P2A-K13-Flag-T2A-PAC |
| CD79b | | 996 | 2741 | CD8SP-huMA79bv28-(vL-vH)-Myc-z- |
| | | | | P2A-K13-Flag-T2A-PAC |
| CD99 | | 997 | 2742 | CD8SP-CD99-hu12E7-(vL-vH)-Myc-z- |
| | | | | P2A-K13-Flag-T2A-PAC |
| CD123 | | 998 | 2743 | CD8SP-CD123-CSL362-(vL-vH)-Myc- |
| | | | | z-P2A-K13-Flag-T2A-PAC |
| CD123 | | 999 | 2744 | CD8SP-CD123-1172-(vL-vH)-Myc-z- |
| | | | | P2A-K13-Flag-T2A-PAC |
| CD123 | | 1000 | 2745 | CD8SP-CD123-DART-1-(vL-vH)- |
| | | | | Myc-z-P2A-K13-Flag-T2A-PAC |
| CD123 | | 1001 | 2746 | CD8SP-CD123-DART-2-(vL-vH)- |
| | | | | Myc-z-P2A-K13-Flag-T2A-PAC |
| CD123 | | 1002 | 2747 | CD8SP-CD123-I3RB18-(vL-vH)-Myc- |
| | | | | z-P2A-K13-Flag-T2A-PAC |
| CD123 | | 1003 | 2748 | CD8SP-CD123-hu3E3-(vL-vH)-Myc-z- |
| | | | | P2A-K13-Flag-T2A-PAC |
| CD123 | | 1004 | 2749 | CD8SP-CD123-9F6-(vL-vH)-Myc-z- |
| | | | | P2A-K13-Flag-T2A-PAC |
| CD123 | | 1005 | 2750 | CD8SP-CD123-I3RB2-(vL-vH)-Myc-z- |
| | | | | P2A-K13-Flag-T2A-PAC |
| CD123 | | 1006 | 2751 | CD8SP-CD123-1176-(vL-vH)-Myc-z- |
| | | | | P2A-K13-Flag-T2A-PAC |
| CD123 | | 1007 | 2752 | CD8SP-Ritx2-CD123-8B11-(vL-vH)- |
| | | | | Myc-z-P2A-K13-Flag-T2A-PAC |
| CD123 | | 1008 | 2753 | CD8SP-CD123-2B8-(vL-vH)-Myc-z- |
| | | | | P2A-K13-Flag-T2A-PAC |
| CD123 | | 1009 | 2754 | CD8SP-CD123-9D7-(vL-vH)-Myc-z- |
| | | | | P2A-K13-Flag-T2A-PAC |
| CD123 | | 1010 | 2755 | CD8SP-CD123-3B10-(vL-vH)-Myc-z- |
| | | | | P2A-K13-Flag-T2A-PAC |
| CD138 | | 1011 | 2756 | CD8SP-CD138-(vL-vH)-Myc-z-P2A- |
| | | | | K13-Flag-T2A-PAC |
| CD179b | 051716-N05 | 1012 | 2757 | CD8SP-CD179b-(vL-vH)-Myc-z-P2A- |
| | | | | K13-Flag-T2A-PAC |
| CD276 | | 1013 | 2758 | CD8SP-CD276-17-(vL-vH)-Myc-z- |
| | | | | P2A-K13-Flag-T2A-PAC |
| CD324 | | 1014 | 2759 | CD8SP-CD32410-6-(vL-vH)-Myc-z- |
| | | | | P2A-K13-Flag-T2A-PAC |
| CD324 | | 1015 | 2760 | CD8SP-CD324-hSC10-17-(vL-vH)- |
| | | | | Myc-z-P2A-K13-Flag-T2A-PAC |
| CDH6 | 051716-I05 | 1016 | 2761 | CD8SP-CDH6-NOV710-(vL-vH)-Myc- |
| | | | | z-P2A-K13-Flag-T2A-PAC |
| CDH6 | 051716-J05 | 1017 | 2762 | CD8SP-CDH6-NOV712-(vL-vH)-Myc- |
| | | | | z-P2A-K13-Flag-T2A-PAC |
| CDH17 | 051716- | 1018 | 2763 | CD8SP-CDH17-PTA001A4-(vL-vH)- |
| | M06 | | | Myc-z-P2A-K13-Flag-T2A-PAC |
| CDH19 | 051716-V04 | 1019 | 2764 | CD8SP-CDH19-16A4-(vL-vH)-Myc-z- |
| | | | | P2A-K13-Flag-T2A-PAC |
| EGFR | | 1020 | 2765 | CD8SP-Cetuximab-(vL-vH)-Myc-z- |
| | | | | P2A-K13-Flag-T2A-PAC |
| CLEC5A | 050516-E03 | 1021 | 2766 | CD8SP-CLEC5A-8H8F5-(vL-vH)- |
| | | | | Myc-z-P2A-K13-Flag-T2A-PAC |
| CLEC5A | 051016-F06 | 1022 | 2767 | CD8SP-CLEC5A-3E12A2-(vL-vH)- |
| | | | | Myc-z-P2A-K13-Flag-T2A-PAC |
| GR/LHR | | 1023 | 2768 | SP-CGHb-Gly-Ser-Linker-CGHa-Myc- |
| (Gonadotropin | | | | z-P2A-K13-Flag-T2A-PAC |
| Receptor) | | | | |
| CLL1 | | 1024 | 2769 | CD8SP-CLL1-M26-(vL-vH)-Myc-z- |
| | | | | P2A-K13-Flag-T2A-PAC |
| CLL1 | | 1025 | 2770 | CD8SP-CLL1-M32-(vL-vH)-Myc-z- |
| | | | | P2A-K13-Flag-T2A-PAC |
| CLL1 | | 1026 | 2771 | CD8SP-CLL1-21C9-L2H3-(vL-vH)- |
| | | | | Myc-z-P2A-K13-Flag-T2A-PAC |
| CLL1 | | 1027 | 2772 | CD8SP-CLL1-6E7L4H1e-(vL-vH)- |
| | | | | Myc-z-P2A-K13-Flag-T2A-PAC |
| CLL1 | | 1028 | 2773 | CD8SP-CLL1-hu1075-v1-(vL-vH)- |
| | | | | Myc-z-P2A-K13-Flag-T2A-PAC |
| CLL1 | | 1029 | 2774 | CD8SP-CLL1-hu1075-v2-(vL-vH)- |
| | | | | Myc-z-P2A-K13-Flag-T2A-PAC |
| CMVpp65/MHC | | 1030 | 2775 | CD8SP-CMVpp65-F5-(vL-vH)-Myc-z- |
| class I complex | | | | P2A-K13-Flag-T2A-PAC |
| CS1 (SLAMF7) | | 1031 | 2776 | CD8SP-CS1-huLuc63-(vL-vH)-Myc-z- |
| | | | | P2A-K13-Flag-T2A-PAC |
| CS1 (SLAMF7) | | 1032 | 2777 | CD8SP-CS1-HuLuc64-(vL-vH)-Myc-z- |
| | | | | P2A-K13-Flag-T2A-PAC |
| CS1 (SLAMF7) | | 1033 | 2778 | CD8SP-CS1-huLuc90-(vL-vH)-Myc-z- |
| | | | | P2A-K13-Flag-T2A-PAC |
| CS1 (SLAMF7) | | 1034 | 2779 | CD8SP-CS1-PDL241-(vL-vH)-Myc-z- |
| | | | | P2A-K13-Flag-T2A-PAC |
| CS1 (SLAMF7) | | 1035 | 2780 | CD8SP-CS1-Hu27A-(vL-vH)-Myc-z- |
| | | | | P2A-K13-Flag-T2A-PAC |
| CS1 (SLAMF7) | | 1036 | 2781 | CD8SP-CS1Hu34C3-(vL-vH)-Myc-z- |
| | | | | P2A-K13-Flag-T2A-PAC |
| CS1 (SLAMF7) | | 1037 | 2782 | CD8SP-CS1-Hu31-D2-(vL-vH)-Myc-z- |
| | | | | P2A-K13-Flag-T2A-PAC |
| CS1(SLAMF7) | | 1038 | 2783 | CD8SP-CS1-Luc34-(vL-vH)-Myc-z- |
| | | | | P2A-K13-Flag-T2A-PAC |
| CS1 (SLAMF7) | | 1039 | 2784 | CD8SP-CS1-LucX2-(vL-vH)-Myc-z- |
| | | | | P2A-K13-Flag-T2A-PAC |
| CSF2RA | 051616-H05 | 1040 | 2785 | CD8SP-CSF2RA-Ab6-(vL-vH)-Myc-z- |
| | | | | P2A-K13-Flag-T2A-PAC |
| CSF2RA | 051616-G01 | 1041 | 2786 | CD8SP-CSF2RA-Ab1-(vL-vH)-Myc-z- |
| | | | | P2A-K13-Flag-T2A-PAC |
| CXCR4 and CD123 | | 1042 | 2787 | CD8SP-CXCR4-1-vHH-Gly-Ser- |
| | | | | Linker-CD123-1-vHH-Myc-z-P2A- |
| | | | | K13-Flag-T2A-PAC |
| CXCR4 and CD123 | | 1043 | 2788 | CD8SP-CXCR4-2-VHH-Gly-Ser- |
| | | | | Linker-CD123-2-VHH-Myc-z-P2A- |
| | | | | K13-Flag-T2A-PAC |
| DLL3 (Delta Like | | 1044 | 2789 | CD8SP-DLL3-hSC16-13-(vL-vH)- |
| Ligand 3) | | | | Myc-z-P2A-K13-Flag-T2A-PAC |
| DLL3 (Delta Like | | 1045 | 2790 | CD8SP-DLL3-hSC16-56-(vL-vH)- |
| Ligand 3) | | | | Myc-z-P2A-K13-Flag-T2A-PAC |
| EBNA3c/MHC | | 1046 | 2791 | CD8SP-EBNA3c-315-(vL-vH)-Myc-z- |
| class I complex | | | | P2A-K13-Flag-T2A-PAC |
| EBV-gp350 | | 1047 | 2792 | CD8SP-EBV-gp350-(vL-vH)-Myc-z- |
| | | | | P2A-K13-Flag-T2A-PAC |
| EGFR | | 1048 | 2793 | CD8SP-EGFR1-vHH-Myc-z-P2A- |
| | | | | K13-Flag-T2A-PAC |
| EGFR & CEA | 040716-O08 | 1049 | 2794 | CD8SP-EGFR1-vHH-Gly-Ser-Linker- |
| | | | | CEA1-vHH-Myc-z-P2A-K13-Flag- |
| | | | | T2A-PAC |
| EGFR & CEA | 040716-P01 | 1050 | 2795 | CD8SP-EGFR33-vHH-Gly-Ser-Linker- |
| | | | | CEA5-vHH-Myc-z-P2A-K13-Flag- |
| | | | | T2A-PAC |
| EGFRvIII | | 1051 | 2796 | CD8SP-EGFRvIII-139-(vL-vH)-Myc-z- |
| | | | | P2A-K13-Flag-T2A-PAC |
| EGFRvIII | | 1052 | 2797 | CD8SP-EGFRvIII-2173-(vL-vH)-Myc- |
| | | | | z-P2A-K13-Flag-T2A-PAC |
| EpCam1 | | 1053 | 2798 | CD8SP-Epcam1-MM1-(vL-vH)-Myc-z- |
| | | | | P2A-K13-Flag-T2A-PAC |
| EpCam1 | | 1054 | 2799 | CD8SP-Epcam1-D5K5-(vL-vH)-Myc- |
| | | | | z-P2A-K13-Flag-T2A-PAC |
| FLT3 | | 1055 | 2800 | CD8SP-FLT3-NC7-(vL-vH)-Myc-z- |
| | | | | P2A-K13-Flag-T2A-PAC |
| FITC | 051016-E04 | 1056 | 2801 | CD8SP-FITC-(vL-vH)-Myc-z-P2A- |
| | | | | K13-Flag-T2A-PAC |
| FITC | | 1057 | 2802 | CD8SP-FITC-4M-53-(vL-vH)-Myc-z- |
| | | | | P2A-K13-Flag-T2A-PAC |
| FITC | | 1058 | 2803 | CD8SP-FITC-E2-HL-(vH-vL)-Myc-z- |
| | | | | P2A-K13-Flag-T2A-PAC |
| Influenza A HA | | 1059 | 2804 | CD8SP-FLU-MEDI-8852-(vL-vH)- |
| | | | | Myc-z-P2A-K13-Flag-T2A-PAC |
| FR1 (Folate | | 1060 | 2805 | CD8SP-FR1-huMov19-(vL-vH)-Myc- |
| Receptor alpha) | | | | z-P2A-K13-Flag-T2A-PAC |
| FSHR (Follicle | | 1061 | 2806 | CD8SP-FSHb-Gly-Ser-Linker-CGHa- |
| Stimulating | | | | Myc-z-P2A-K13-Flag-T2A-PAC |
| Hormone Receptor) | | | | |
| GAD (Glutamic | | 1062 | 2807 | CD8SP-GAD-G3H8-(vL-vH)-Myc-z- |
| Acid | | | | P2A-K13-Flag-T2A-PAC |
| Decarboxylase)/ | | | | |
| MHC class I | | | | |
| complex | | | | |
| GD2 | | 1063 | 2808 | CD8SP-GD2-hu14-18-(vL-vH)-Myc-z- |
| | | | | P2A-K13-Flag-T2A-PAC |
| GD2 | | 1064 | 2809 | CD8SP-GD2-hu3F8-(vL-vH)-Myc-z- |
| | | | | P2A-K13-Flag-T2A-PAC |
| GD3 | 051016-D04 | 1065 | 2810 | CD8SP-GD3-KM-641-(vL-vH)-Myc-z- |
| | | | | P2A-K13-Flag-T2A-PAC |
| GFRa4 (GDNF | 051716-K05 | 1066 | 2811 | CD8SP-GFRAlpha4-P4-6-(vL-vH)- |
| Family Receptor | | | | Myc-z-P2A-K13-Flag-T2A-PAC |
| Alpha 4) | | | | |
| GFRa4 (GDNF | 051316-L02 | 1067 | 2812 | CD8SP-GFRa4-P4-10-(vL-vH)-Myc-z- |
| Family Receptor | | | | P2A-K13-Flag-T2A-PAC |
| Alpha 4) | | | | |
| GM1 | | 1068 | 2813 | CD8SP-GM1-5B2-(vL-vH)-Myc-z- |
| | | | | P2A-K13-Flag-T2A-PAC |
| GM1 | | 1069 | 2814 | CD8SP-GM1-7E5-(vL-vH)-Myc-z- |
| | | | | P2A-K13-Flag-T2A-PAC |
| GPRC5D (G- | | 1070 | 2815 | CD8SP-GPRC5D-ET150-5-(vL-vH)- |
| protein coupled | | | | Myc-z-P2A-K13-Flag-T2A-PAC |
| receptor family C | | | | |
| group 5 member D) | | | | |
| GPRC5D | | 1071 | 2816 | CD8SP-GPRC5D-ET150-18-(vL-vH)- |
| | | | | Myc-z-P2A-K13-Flag-T2A-PAC |
| GPRC5D | | 1072 | 2817 | CD8SP-GPRC5D-ET150-1-(vL-vH)- |
| | | | | Myc-z-P2A-K13-Flag-T2A-PAC |
| GPRC5D | | 1073 | 2818 | CD8SP-GPRC5D-ET150-2-(vL-vH)- |
| | | | | Myc-z-P2A-K13-Flag-T2A-PAC |
| gp100/MHC class I | | 1074 | 2819 | CD8SP-gp100-(vL-vH)-Myc-z-P2A- |
| complex | | | | K13-Flag-T2A-PAC |
| gp100/MHC class I | | 1075 | 2820 | CD8SP-gp100-G2D12-(vL-vH)-Myc-z- |
| complex | | | | P2A-K13-Flag-T2A-PAC |
| GPC3 (Glypican 3) | | 1076 | 2821 | CD8SP-GPC3-4E5-(vL-vH)-Myc-z- |
| | | | | P2A-K13-Flag-T2A-PAC |
| gpNMB | 060616-I05 | 1077 | 2822 | CD8SP-gpNMB-115-(vL-vH)-Myc-z- |
| (Glycoprotein | | | | P2A-K13-Flag-T2A-PAC |
| Nmb) | | | | |
| GRP78 | | 1078 | 2823 | CD8SP-GRP78-GC18-(vL-vH)-Myc-z- |
| | | | | P2A-K13-Flag-T2A-PAC |
| Her2 | | 1079 | 2824 | CD8SP-Her2-5F7-vHH-Myc-z-P2A- |
| | | | | K13-Flag-T2A-PAC |
| Her2 | | 1080 | 2825 | IgHSP-Her2-Affi-Myc-z-P2A-K13- |
| | | | | Flag-T2A-PAC |
| Her2 | | 1081 | 2826 | CD8SP-Her2-1-Darpin-Myc-z-P2A- |
| | | | | K13-Flag-T2A-PAC |
| Her2 | | 1082 | 2827 | IgHSP-Her2-2-Darpin-Myc-z-P2A- |
| | | | | K13-Flag-T2A-PAC |
| Her2 | | 1083 | 2828 | CD8SP-Her2-5F7-vHH-Gly-Ser- |
| | | | | Linker-Her2-47D5-vHH-Myc-z-P2A- |
| | | | | K13-Flag-T2A-PAC |
| Her2 | 050516-I03 | 1084 | 2829 | CD8SP-Her2-Hu4D5-(vL-vH)-Myc-z- |
| | | | | P2A-K13-Flag-T2A-PAC |
| Her3 | | 1085 | 2830 | CD8SP-Her3-17B05So-vHH-Myc-z- |
| | | | | P2A-K13-Flag-T2A-PAC |
| Her3 | | 1086 | 2831 | CD8SP-Her3-Affi-Myc-z-P2A-K13- |
| | | | | Flag-T2A-PAC |
| Her2 and Her3 | | 1087 | 2832 | CD8SP-Her3-17B05So-vHH-Gly-Ser- |
| | | | | Linker-Her2-2D3-vHH-Myc-z-P2A- |
| | | | | K13-Flag-T2A-PAC |
| HIV1-gag/MHC | | 1088 | 2833 | CD8SP-HIV1-E5-(vL-vH)-Myc-z-P2A- |
| class I complex | | | | K13-Flag-T2A-PAC |
| HIV1-envelop | | 1089 | 2834 | CD8SP-HIV1-3BNC117-(vL-vH)-Myc- |
| glycoprotein | | | | z-P2A-K13-Flag-T2A-PAC |
| HIV1-envelop | | 1090 | 2835 | CD8SP-HIV1-PGT-128-(vL-vH)-Myc- |
| glycoprotein | | | | z-P2A-K13-Flag-T2A-PAC |
| HIV1-envelop | | 1091 | 2836 | CD8SP-HIV1-VR-C01-(vL-vH)-Myc- |
| glycoprotein | | | | z-P2A-K13-Flag-T2A-PAC |
| HIV1-envelop | | 1092 | 2837 | CD8SP-HIV1-X5-(vL-vH)-Myc-z- |
| glycoprotein | | | | P2A-K13-Flag-T2A-PAC |
| HLA-A2 | | 1093 | 2838 | CD8SP-HLA-A2-3PB2-(vL-vH)-Myc- |
| | | | | z-P2A-K13-Flag-T2A-PAC |
| HMW-MAA | 060116-C03 | 1094 | 2839 | CD8SP-HMW-MAA-hIND-(vL-vH)- |
| | | | | Myc-z-P2A-K13-Flag-T2A-PAC |
| HPV16-E7/MHC | | 1095 | 2840 | CD8SP-HPV16-7-8-(vL-vH)-Myc-z- |
| class I complex | | | | P2A-K13-Flag-T2A-PAC |
| HPV16-E7/MHC | | 1096 | 2841 | CD8SP-HPV16-2-(vL-vH)-Myc-z- |
| class I complex | | | | P2A-K13-Flag-T2A-PAC |
| HTLV1-TAX/MHC | | 1097 | 2842 | CD8SP-HTLV-TAX-T3F2-(vL-vH)- |
| class I complex | | | | Myc-z-P2A-K13-Flag-T2A-PAC |
| HTLV1-TAX/MHC | | 1098 | 2843 | CD8SP-HTLV-TAX-T3E3-(vL-vH)- |
| class I complex | | | | Myc-z-P2A-K13-Flag-T2A-PAC |
| IL11Ra | 050516-D01 | 1099 | 2844 | CD8SP-IL11Ra-8E2-Ts107-(vL-vH)- |
| | | | | Myc-z-P2A-K13-Flag-T2A-PAC |
| IL6Ra | | 1100 | 2845 | IgHSP-IL6R-304-vHH-Myc-z-P2A- |
| | | | | K13-Flag-T2A-PAC |
| IL13Ra2 | | 1101 | 2846 | CD8SP-IL13Ra2-hu107-(vL-vH)-Myc- |
| | | | | z-P2A-K13-Flag-T2A-PAC |
| IL13Ra2 | 050516-F04 | 1102 | 2847 | CD8SP-IL13Ra2-Hu108-(vL-vH)-Myc- |
| | | | | z-P2A-K13-Flag-T2A-PAC |
| KSHV-K8.1 | 070315-G04 | 1103 | 2848 | CD8SP-KSHV-4C3-(vL-vH)-Myc-z- |
| | | | | P2A-K13-Flag-T2A-PAC |
| LAMP1 | 051716-T05 | 1104 | 2849 | CD8SP-LAMP1-humab1-2-(vL-vH)- |
| (Lysosomal- | | | | Myc-z-P2A-K13-Flag-T2A-PAC |
| associated | | | | |
| membrane protein 1) | | | | |
| LAMP1 | 051916-B07 | 1105 | 2850 | CD8SP-LAMP1-Mb4-(vL-vH)-Myc-z- |
| (Lysosomal- | | | | P2A-K13-Flag-T2A-PAC |
| associated | | | | |
| membrane protein 1) | | | | |
| LewisY | | 1106 | 2851 | CD8SP-LewisY-huS193-(vL-vH)-Myc- |
| | | | | z-P2A-K13-Flag-T2A-PAC |
| L1CAM | | 1107 | 2852 | CD8SP-L1CAM-9-3-HU3-(vL-vH)- |
| | | | | Myc-z-P2A-K13-Flag-T2A-PAC |
| LHR | | 1108 | 2853 | SP-LHb-Gly-Ser-Linker-CGHa-Myc-z- |
| | | | | P2A-K13-Flag-T2A-PAC |
| Lym1 | | 1109 | 2854 | CD8SP-Lym1-(vL-vH)-Myc-z-P2A- |
| | | | | K13-Flag-T2A-PAC |
| Lym2 | | 1110 | 2855 | CD8SP-Lym2-(vL-vH)-Myc-z-P2A- |
| | | | | K13-Flag-T2A-PAC |
| CD79b | | 1111 | 2856 | CD8SP-huMA79bv28-(vL-vH)-Myc-z- |
| | | | | P2A-K13-Flag-T2A-PAC |
| MART1/MHC class | | 1112 | 2857 | CD8SP-MART1-CAG10-(vL-vH)- |
| I complex | | | | Myc-z-P2A-K13-Flag-T2A-PAC |
| MART1/MHC class | | 1113 | 2858 | CD8SP-MART1-CLA12-(vL-vH)- |
| I complex | | | | Myc-z-P2A-K13-Flag-T2A-PAC |
| Mesothelin | | 1114 | 2859 | CD8SP-Mesothelin-m912-(vL-vH)- |
| | | | | Myc-z-P2A-K13-Flag-T2A-PAC |
| cMet | | 1115 | 2860 | CD8SP-cMet-171-vHH-Myc-z-P2A- |
| | | | | K13-Flag-T2A-PAC |
| cMet and Her3 | 041116-B05 | 1116 | 2861 | CD8SP-cMET-171-vHH-Gly-Ser- |
| | | | | Linker-Her3-21F06-vHH-Myc-z-P2A- |
| | | | | K13-Flag-T2A-PAC |
| MPL | | 1117 | 2862 | CD8SP-MPL-175-(vL-vH)-Myc-z- |
| (Thrombopoietin | | | | P2A-K13-Flag-T2A-PAC |
| receptor) | | | | |
| MPL | 111516-N05 | 1118 | 2863 | CD8SP-MPL-161-(vL-vH)-Myc-z- |
| (Thrombopoietin | | | | P2A-K13-Flag-T2A-PAC |
| receptor) | | | | |
| MPL | | 1119 | 2864 | CD8SP-MPL-161-HL-(vH-vL)-Myc-z- |
| | | | | P2A-K13-Flag-T2A-PAC |
| MPL | 040716- | 1120 | 2865 | CD8SP-2-MPL-111-(vL-vH)-Myc-z- |
| | M02 | | | P2A-K13-Flag-T2A-PAC |
| MPL | | 1121 | 2866 | CD8SP-MPL-178-(vL-vH)-Myc-z- |
| | | | | P2A-K13-Flag-T2A-PAC |
| MPL | | 1122 | 2867 | CD8SP-MPL-AB317-(vL-vH)-Myc-z- |
| | | | | P2A-K13-Flag-T2A-PAC |
| MPL | | 1123 | 2868 | CD8SP-MPL-12E10-(vL-vH)-Myc-z- |
| | | | | P2A-K13-Flag-T2A-PAC |
| MPL | | 1124 | 2869 | CD8SP-MPL-huVB22Bw5-(vL-vH)- |
| | | | | Myc-z-P2A-K13-Flag-T2A-PAC |
| Muc1/MHC class I | | 1125 | 2870 | CD8SP-Muc1-D6-M3B8-(vL-vH)- |
| complex | | | | Myc-z-P2A-K13-Flag-T2A-PAC |
| Muc1/MHC class I | | 1126 | 2871 | CD8SP-MUC1-D6-M3A1-(vL-vH)- |
| complex | | | | Myc-z-P2A-K13-Flag-T2A-PAC |
| Muc16 | | 1127 | 2872 | CD8SP-Muc16-4H11-(vL-vH)-Myc-z- |
| | | | | P2A-K13-Flag-T2A-PAC |
| EGFR | | 1128 | 2873 | CD8SP-Nimotuzumab-(vL-vH)-Myc-z- |
| | | | | P2A-K13-Flag-T2A-PAC |
| NKG2D Ligand | 050516-J04 | 1129 | 2874 | CD8SP-NKG2D-(GGGGS-GGGGD)- |
| | | | | Myc-z-P2A-K13-Flag-T2A-PAC |
| NKG2D | | 1130 | 2875 | CD8SP-NKG2D-MS-(vL-vH)-Myc-z- |
| | | | | P2A-K13-Flag-T2A-PAC |
| NY-BR1 | 051716-Q05 | 1131 | 2876 | CD8SP-NYBR1-(vL-vH)-Myc-z-P2A- |
| | | | | K13-Flag-T2A-PAC |
| NY-ESO/MHC | | 1132 | 2877 | CD8SP-NYESO-T1-(vL-vH)-Myc-z- |
| class I complex | | | | P2A-K13-Flag-T2A-PAC |
| NY-ESO/MHC | | 1133 | 2878 | CD8SP-NYESO-T2-(vL-vH)-Myc-z- |
| class I complex | | | | P2A-K13-Flag-T2A-PAC |
| PD1 ligand (e.g., | | 1134 | 2879 | CD8SP-PD1-ECD-Myc-z-P2A-K13- |
| PDL1) | | | | Flag-T2A-PAC |
| PDL1 | | 1135 | 2880 | CD8SP-PDL1-Atezoli-(vL-vH)-Myc-z- |
| | | | | P2A-K13-Flag-T2A-PAC |
| PDL1 | | 1136 | 2881 | CD8SP-PDL1-SP142-(vL-vH)-Myc-z- |
| | | | | P2A-K13-Flag-T2A-PAC |
| PDL1 | | 1137 | 2882 | CD8SP-PDL1-10A5-(vL-vH)-Myc-z- |
| | | | | P2A-K13-Flag-T2A-PAC |
| PSCA (Prostate | | 1138 | 2883 | CD8SP-PSCA-Ha14-121-(vL-vH)- |
| stem cell antigen) | | | | Myc-z-P2A-K13-Flag-T2A-PAC |
| PSCA (Prostate | | 1139 | 2884 | CD8SP-PSCA-Ha14-117-(vL-vH)- |
| stem cell antigen) | | | | Myc-z-P2A-K13-Flag-T2A-PAC |
| PR1/MHC class I | | 1140 | 2885 | CD8SP-PR1-(vL-vH)-Myc-z-P2A-K13- |
| complex | | | | Flag-T2A-PAC |
| PSMA (Prostate | | 1141 | 2886 | CD8SP-PSMA-006-(vL-vH)-Myc-z- |
| Specific Membrane | | | | P2A-K13-Flag-T2A-PAC |
| Antigen) | | | | |
| PSMA (Prostate | | 1142 | 2887 | CD8SP-PSMA-J591-(vL-vH)-Myc-z- |
| Specific Membrane | | | | P2A-K13-Flag-T2A-PAC |
| Antigen) | | | | |
| PTK7 (Tyrosine- | | 1143 | 2888 | CD8SP-PTK7-hSC6-23-(vL-vH)-Myc- |
| protein kinase-like 7) | | | | z-P2A-K13-Flag-T2A-PAC |
| PTK7 (Tyrosine- | | 1144 | 2889 | CD8SP-PTK76-10-2-(vL-vH)-Myc-z- |
| protein kinase-like 7) | | | | P2A-K13-Flag-T2A-PAC |
| ROR1 | | 1145 | 2890 | CD8SP-ROR1-4A5-(vL-vH)-Myc-z- |
| | | | | P2A-K13-Flag-T2A-PAC |
| ROR1 | | 1146 | 2891 | CD8SP-ROR1-4C10-(vL-vH)-Myc-z- |
| | | | | P2A-K13-Flag-T2A-PAC |
| Mesothelin | | 1147 | 2892 | CD8SP-SD1-vHH-Gly-Ser-Linker- |
| | | | | 5D2-vHH-Myc-z-P2A-K13-Flag- |
| | | | | T2A-PAC |
| SLea | | 1148 | 2893 | CD8SP-SLea-7E3-(vL-vH)-Myc-z- |
| | | | | P2A-K13-Flag-T2A-PAC |
| SLea | 051716-X05 | 1149 | 2894 | CD8SP-SLea-5B1-(vL-vH)-Myc-z- |
| | | | | P2A-K13-Flag-T2A-PAC |
| SSEA4 (stage- | | 1150 | 2895 | CD8SP-SSEA4-(vL-vH)-Myc-z-P2A- |
| specific embryonic | | | | K13-Flag-T2A-PAC |
| antigen 4) | | | | |
| TCRB1 (TCR beta | | 1151 | 2896 | CD8SP-TCRB1-CP01-E09-(vL-vH)- |
| 1 constant chain) | | | | Myc-z-P2A-K13-Flag-T2A-PAC |
| TCRB1 (TCR beta | | 1152 | 2897 | CD8SP-TCRB1-Jovi1-(vL-vH)-Myc-z- |
| 1 constant chain) | | | | P2A-K13-Flag-T2A-PAC |
| TCRB2 (TCR beta | | 1153 | 2898 | CD8SP-TCRB2-CP01-D05-(vL-vH)- |
| 2 constant chain) | | | | Myc-z-P2A-K13-Flag-T2A-PAC |
| TCRB2 (TCR beta | | 1154 | 2899 | CD8SP-TCRB2-CP01-E05-(vL-vH)- |
| 2 constant chain) | | | | Myc-z-P2A-K13-Flag-T2A-PAC |
| TCRgd (TCR | 051716-H05 | 1155 | 2900 | CD8SP-TCRgd-G5-4-(vL-vH)-Myc-z- |
| gamma/delta) | | | | P2A-K13-Flag-T2A-PAC |
| hTERT/MHC class | | 1156 | 2901 | CD8SP-TERT-4A9-T540-(vL-vH)- |
| I complex | | | | Myc-z-P2A-K13-Flag-T2A-PAC |
| hTERT/MHC class | | 1157 | 2902 | CD8SP-TERT-3G3-T865-(vL-vH)- |
| I complex | | | | Myc-z-P2A-K13-Flag-T2A-PAC |
| Tissue Factor-1 | 051716-O05 | 1158 | 2903 | CD8SP-TGFBR2-Ab1-(vL-vH)-Myc-z- |
| | | | | P2A-K13-Flag-T2A-PAC |
| TGFBR2 | | 1159 | 2904 | CD8SP-TF1-98-(vL-vH)-Myc-z-P2A |
| | | | | K13-Flag-T2A-PAC |
| TIM1/HAVCR | 051716-S05 | 1160 | 2905 | CD8SP-TIM1-HVCR1-270-2-(vL-vH)- |
| | | | | Myc-z-P2A-K13-Flag-T2A-PAC |
| TIM1/HAVCR | 051716-P05 | 1161 | 2906 | CD8SP-TIM1-HVCR1-ARD5-(vL- |
| | | | | vH)-Myc-z-P2A-K13-Flag-T2A-PAC |
| TnAg | 051716-H05 | 1162 | 2907 | CD8SP-TnAg-(vL-vH)-Myc-z-P2A- |
| | | | | K13-Flag-T2A-PAC |
| Tn-Muc1 | | 1163 | 2908 | CD8SP-TnMuc1-hu5E5-RHA8-RKA- |
| | | | | 2-(vL-vH)-Myc-z-P2A-K13-Flag- |
| | | | | T2A-PAC |
| MPL | | 1164 | 2909 | CD8SP-hTPO-Myc-z-P2A-K13-Flag- |
| (Thrombopoietin | | | | T2A-PAC |
| receptor) | | | | |
| TROP2 | 051716-G05 | 1165 | 2910 | CD8SP-TROP2-ARA47-HV3KV3-(vL- |
| (Trophoblast cell- | | | | vH)-Myc-z-P2A-K13-Flag-T2A-PAC |
| surface antigen-2) | | | | |
| TROP2 | 052616-D04 | 1166 | 2911 | CD8SP-TROP2-h7E6-SVG-(vL-vH)- |
| (Trophoblast cell- | | | | Myc-z-P2A-K13-Flag-T2A-PAC |
| surface antigen-2) | | | | |
| TSHR (Thyrotropin | | 1167 | 2912 | SP-TSHb-Gly-Ser-Linker-CGHa-Myc- |
| receptor) | | | | z-P2A-K13-Flag-T2A-PAC |
| TSHR (Thyrotropin | | 1168 | 2913 | CD8SP-TSHR-K1-70-(vL-vH)-Myc-z- |
| receptor) | | | | P2A-K13-Flag-T2A-PAC |
| TSHR (Thyrotropin | 051616-D04 | 1169 | 2914 | CD8SP-TSHR-KB1-(vL-vH)-Myc-z- |
| receptor) | | | | P2A-K13-Flag-T2A-PAC |
| TSHR (Thyrotropin | | 1170 | 2915 | CD8SP-TSHR-5C9-(vL-vH)-Myc-z- |
| receptor) | | | | P2A-K13-Flag-T2A-PAC |
| TSLPR (Thymic | | 1171 | 2916 | CD8SP-TSLPR-(vL-vH)-Myc-z-P2A- |
| stromal | | | | K13-Flag-T2A-PAC |
| lymphopoietin | | | | |
| receptor) | | | | |
| Tyrosinase/MHC | | 1172 | 2917 | CD8SP-Tyros-B2-(vL-vH)-Myc-z- |
| class I complex | | | | P2A-K13-Flag-T2A-PAC |
| Tyrosinase/MHC | | 1173 | 2918 | CD8SP-Tyros-MC1-(vL-vH)-Myc-z- |
| class I complex | | | | P2A-K13-Flag-T2A-PAC |
| Tyrosinase/MHC | | 1174 | 2919 | CD8SP-Tyros-TA2-(vL-vH)-Myc-z- |
| class I complex | | | | P2A-K13-Flag-T2A-PAC |
| VEGFR3 | 060616-P04 | 1175 | 2920 | CD8SP-VEGFR3-Ab1-(vL-vH)-Myc-z- |
| | | | | P2A-K13-Flag-T2A-PAC |
| WT1/MHC class I | | 1176 | 2921 | CD8SP-WT1-Ab1-(vL-vH)-Myc-z- |
| complex | | | | P2A-K13-Flag-T2A-PAC |
| WT1/MHC class I | | 1177 | 2922 | CD8SP-WT1-Ab5-(vL-vH)-Myc-z- |
| complex | | | | P2A-K13-Flag-T2A-PAC |
| WT1/MHC class I | | 1178 | 2923 | CD8SP-MYC3-WT1-Ab13-(vL-vH)- |
| complex | | | | Myc-z-P2A-K13-Flag-T2A-PAC |
| WT1/MHC class I | | 1179 | 2924 | CD8SP-MYC3-WT1-Ab15-(vL-vH)- |
| complex | | | | Myc-z-P2A-K13-Flag-T2A-PAC |
| CDH19 | 051716-U05 | 1180 | 2925 | CD8SP-CDH19-4B10-(vL-vH)-Myc-z- |
| | | | | P2A-K13-Flag-T2A-PAC |
| Folate Receptor | | 1181 | 2926 | CD8SP-FRbeta-m923-(vL-vH)-Myc-z- |
| beta | | | | P2A-K13-Flag-T2A-PAC |
| LHR (Luteinizing | | 1182 | 2927 | CD8SP-LHR-8B7-(vL-vH)-Myc-z- |
| hormone Receptor) | | | | P2A-K13-Flag-T2A-PAC |
| LHR (Luteinizing | | 1183 | 2928 | CD8SP-LHR-5F4-21-(vL-vH)-Myc-z- |
| hormone Receptor) | | | | P2A-K13-Flag-T2A-PAC |
| B7H4 | | 1184 | 2929 | CD8SP-B7H4-hu22Cl0-(vL-vH)-Myc- |
| | | | | z-P2A-K13-Flag-T2A-PAC |
| B7H4 | | 1185 | 2930 | CD8SP-B7H4-hu1D11-(vL-vH)-Myc- |
| | | | | z-P2A-K13-Flag-T2A-PAC |
| IgE | | 1186 | 2931 | CD8SP-IgE-omalizumab-(vL-vH)- |
| | | | | Myc-z-P2A-K13-Flag-T2A-PAC |
| CD23 | | 1187 | 2932 | CD8SP-CD23-p5E8-(vL-vH)-Myc-z- |
| | | | | P2A-K13-Flag-T2A-PAC |
| GCC (Guanylyl | | 1188 | 2933 | CD8SP-GCC-5F9-(vL-vH)-Myc-z- |
| cyclase C) | | | | P2A-K13-Flag-T2A-PAC |
| GCC (Guanylyl | | 1189 | 2934 | CD8SP-GCC-Ab229-(vL-vH)-Myc-z- |
| cyclase C) | | | | P2A-K13-Flag-T2A-PAC |
| CD200R | | 1190 | 2935 | CD8SP-CD200R-huDx182-(vL-vH)- |
| | | | | Myc-z-P2A-K13-Flag-T2A-PAC |
| Tn-Muc1 | | 1191 | 2936 | CD8SP-Tn-Muc1-5E5-HL-(vH-vL)- |
| | | | | Myc-z-P2A-K13-Flag-T2A-PAC |
| CD22 | | 1192 | 2937 | CD8SP-CD22-5-HL-(vH-vL)-Myc-z- |
| | | | | P2A-K13-Flag-T2A-PAC |
| CD22 | | 1193 | 2938 | CD8SP-CD22-10-HL-(vH-vL)-Myc-z- |
| | | | | P2A-K13-Flag-T2A-PAC |
| CD22 | | 1194 | 2939 | CD8SP-CD22-31-HL-(vH-vL)-Myc-z- |
| | | | | P2A-K13-Flag-T2A-PAC |
| CD22 | | 1195 | 2940 | CD8SP-CD22-53-HL-(vH-vL)-Myc-z- |
| | | | | P2A-K13-Flag-T2A-PAC |
| CD22 | | 1196 | 2941 | CD8SP-CD22-65-HL-(vH-vL)-Myc-z- |
| | | | | P2A-K13-Flag-T2A-PAC |

TABLE 20
Exemplary CAR constructs containing 41BB costimulatory domain, CD3z activation domain and coexpressing K13

| | Clone | SEQ ID | SEQ ID | |
|---|---|---|---|---|
| Target | ID | (DNA) | (PRT) | CONSTRUCT NAME |
| CD19 | 111014- | 1197 | 2942 | CD8SP-FMC63-(vL-vH)-Myc-BBz-P2A- |
| | Y11 | | | K13-Flag-T2A-PAC |
| CD19 | | 1198 | 2943 | CD8SP-huFMC63-11-(vL-vH)-Myc-BBz- |
| | | | | P2A-K13-Flag-T2A-PAC |
| CD19 | | 1199 | 2944 | CD8SP-huFMC63-11-N203Q-(vL-vH)- |
| | | | | Myc-BBz-P2A-K13-Flag-T2A-PAC |
| CD19 | | 1200 | 2945 | CD8SP-CD19Bu12-(vL-vH)-Myc-BBz- |
| | | | | P2A-K13-Flag-T2A-PAC |
| CD19 | | 1201 | 2946 | CD8SP-2-CD19MM-(vL-vH)-Myc-BBz- |
| | | | | P2A-K13-Flag-T2A-PAC |
| CD19 | | 1202 | 2947 | CD8SP-CD19-4G7-(vL-vH)-Myc-BBz- |
| | | | | P2A-K13-Flag-T2A-PAC |
| CD19 | | 1203 | 2948 | CD8SP-CD19-MEDI-3649-(vL-vH)-Myc- |
| | | | | BBz-P2A-K13-Flag-T2A-PAC |
| CD19 | | 1204 | 2949 | CD8SP-CD19-Medrex-24D1-(vL-vH)- |
| | | | | Myc-BBz-P2A-K13-Flag-T2A-PAC |
| CD19 | | 1205 | 2950 | CD8SP-Ritx-CD19-MOR0028-(vL-vH)- |
| | | | | Myc-BBz-P2A-K13-Flag-T2A-PAC |
| CD19 | | 1206 | 2951 | CD8SP-CD19-HD37-H2L1-(vL-vH)-Myc- |
| | | | | BBz-P2A-K13-Flag-T2A-PAC |
| CD19 | | 1207 | 2952 | CD8SP-CD19-huBly3-(vL-vH)-Myc-BBz- |
| | | | | P2A-K13-Flag-T2A-PAC |
| CD19 | | 1208 | 2953 | CD8SP-CD19-huSJ25C1-(vL-vH)-Myc- |
| | | | | BBz-P2A-K13-Flag-T2A-PAC |
| CD19 | | 1209 | 2954 | CD8SP-Ritx-CD19-hB4-(vL-vH)-Myc- |
| | | | | BBz-P2A-K13-Flag-T2A-PAC |
| CD19 | | 1210 | 2955 | CD8SP-CD19-hu-mROO5-1-(vL-vH)- |
| | | | | Myc-BBz-P2A-K13-Flag-T2A-PAC |
| CD19 | | 1211 | 2956 | CD8SP-CD19-hA19-(vL-vH)-Myc-BBz- |
| | | | | P2A-K13-Flag-T2A-PAC |
| AFP/MHC class I | | 1212 | 2957 | CD8SP-AFP-61-(vL-vH)-Myc-BBz-P2A- |
| complex | | | | K13-Flag-T2A-PAC |
| AFP/MHC class I | | 1213 | 2958 | CD8SP-AFP-76-(vL-vH)-Myc-BBz-P2A- |
| complex | | | | K13-Flag-T2A-PAC |
| AFP/MHC class I | | 1214 | 2959 | CD8SP-AFP-79-(vL-vH)-Myc-BBz-P2A- |
| complex | | | | K13-Flag-T2A-PAC |
| HIV1-envelop | | 1215 | 2960 | CD8SP-HIV1-N6-(vL-vH)-Myc-BBz- |
| glycoprotein | | | | P2A-K13-Flag-T2A-PAC |
| ALK (Anaplastic | | 1216 | 2961 | CD8SP-Alk-48-(vL-vH)-Myc-BBz-P2A- |
| Lymphoma Kinase) | | | | K13-Flag-T2A-PAC |
| ALK (Anaplastic | | 1217 | 2962 | CD8SP-Alk-58-(vL-vH)-Myc-BBz-P2A- |
| Lymphoma Kinase) | | | | K13-Flag-T2A-PAC |
| Amyloid | | 1218 | 2963 | SP-Amyloid-158-(vL-vH)-Myc-BBz-P2A- |
| | | | | K13-Flag-T2A-PAC |
| Biotin | | 1219 | 2964 | CD8SP-dc-Avidin-Myc-BBz-P2A-K13- |
| | | | | Flag-T2A-PAC |
| CD45 | | 1220 | 2965 | CD8SP-BC8-CD45-(vL-vH)-Myc-BBz- |
| | | | | P2A-K13-Flag-T2A-PAC |
| BCMA | | 1221 | 2966 | CD8SP-BCMA-J6M0-(vL-vH)-Myc-BBz- |
| | | | | P2A-K13-Flag-T2A-PAC |
| BCMA | | 1222 | 2967 | CD8SP-BCMA-huC12A3-L3H3-(vL-vH)- |
| | | | | Myc-BBz-P2A-K13-Flag-T2A-PAC |
| BCMA | | 1223 | 2968 | CD8SP-BCMA-ET-40-(vL-vH)-Myc- |
| | | | | BBz-P2A-K13-Flag-T2A-PAC |
| BCMA | | 1224 | 2969 | CD8SP-BCMA-ET-54-(vL-vH)-Myc- |
| | | | | BBz-P2A-K13-Flag-T2A-PAC |
| BCMA | | 1225 | 2970 | CD8SP-BCMA-ET-03-(vL-vH)-Myc- |
| | | | | BBz-P2A-K13-Flag-T2A-PAC |
| BCMA | | 1226 | 2971 | CD8SP-BCMA-huC11.D5.3L1H3-(vL- |
| | | | | vH)-Myc-BBz-P2A-K13-Flag-T2A-PAC |
| BCMA | | 1227 | 2972 | CD8SP-BCMA-huC13-F12-(vL-vH)-Myc- |
| | | | | BBz-P2A-K13-Flag-T2A-PAC |
| CCR4 | | 1228 | 2973 | CD8SP-CCR4-humAb1567-(vL-vH)-Myc- |
| | | | | BBz-P2A-K13-Flag-T2A-PAC |
| HIV1-envelop | | 1229 | 2974 | CD8SP-CD4-ECD-Gly-Ser-Linker-DC- |
| glycoprotein | | | | SIGN-Myc-BBz-P2A-K13-Flag-T2A-PAC |
| CD5 | | 1230 | 2975 | CD8SP-CD5-9-(vL-vH)-Myc-BBz-P2A- |
| | | | | K13-Flag-T2A-PAC |
| CD5 | | 1231 | 2976 | CD8SP-CD5-18-(vL-vH)-Myc-BBz-P2A- |
| | | | | K13-Flag-T2A-PAC |
| Ig Fc | | 1232 | 2977 | CD8SP-CD16A-V158-ECD-v2-Myc-BBz- |
| | | | | P2A-K13-Flag-T2A-PAC |
| Ig Fc | | 1233 | 2978 | CD8SP-CD16A-V158-ECD-v1-Myc-BBz- |
| | | | | P2A-K13-Flag-T2A-PAC |
| CD20 | | 1234 | 2979 | CD8SP-CD20-2F2-(vL-vH)-Myc-BBz- |
| | | | | P2A-K13-Flag-T2A-PAC |
| CD20 | | 1235 | 2980 | CD8SP-CD20-GA101-(vL-vH)-Myc-BBz- |
| | | | | P2A-K13-Flag-T2A-PAC |
| CD20 | | 1236 | 2981 | CD8SP-CD20-Leu16-(vL-vH)-Myc-BBz- |
| | | | | P2A-K13-Flag-T2A-PAC |
| CD20 | | 1237 | 2982 | CD8SP-CD20-11B8-(vL-vH)-Myc-BBz- |
| | | | | P2A-K13-Flag-T2A-PAC |
| CD20 | | 1238 | 2983 | CD8SP-CD20-2C6-(vL-vH)-Myc-BBz- |
| | | | | P2A-K13-Flag-T2A-PAC |
| CD20 | | 1239 | 2984 | CD8SP-CD20-2H7-(vL-vH)-Myc-BBz- |
| | | | | P2A-K13-Flag-T2A-PAC |
| CD20 | | 1240 | 2985 | CD8SP-CD20-hA20-(vL-vH)-Myc-BBz- |
| | | | | P2A-K13-Flag-T2A-PAC |
| CD20 | | 1241 | 2986 | CD8SP-CD20-BM-CA-1925-v4-(vL-vH)- |
| | | | | Myc-BBz-P2A-K13-Flag-T2A-PAC |
| CD20 | | 1242 | 2987 | CD8SP-CD20-Ubli-v4-(vL-vH)-Myc- |
| | | | | BBz-P2A-K13-Flag-T2A-PAC |
| CD20 | | 1243 | 2988 | CD8SP-CD20-2H7-(vL-vH)-Myc-BBz- |
| | | | | P2A-K13-Flag-T2A-PAC |
| CD20 | | 1244 | 2989 | CD8SP-CD20-h1F5-(vL-vH)-Myc-BBz- |
| | | | | P2A-K13-Flag-T2A-PAC |
| CD20 | | 1245 | 2990 | CD8SP-CD20-7D8-(vL-vH)-Myc-BBz- |
| | | | | P2A-K13-Flag-T2A-PAC |
| CD20 | | 1246 | 2991 | CD8SP-CD20-AME-33-(vL-vH)-Myc- |
| | | | | BBz-P2A-K13-Flag-T2A-PAC |
| CD22 | | 1247 | 2992 | CD8SP-CD22-h10F4v2-(vL-vH)-Myc- |
| | | | | BBz-P2A-K13-Flag-T2A-PAC |
| CD22 | | 1248 | 2993 | CD8SP-CD22-H22Rhov2ACDRKA-(vL- |
| | | | | vH)-Myc-BBz-P2A-K13-Flag-T2A-PAC |
| CD22 | | 1249 | 2994 | CD8SP-CD22-m971-(vL-vH)-Myc-BBz- |
| | | | | P2A-K13-Flag-T2A-PAC |
| CD22 | | 1250 | 2995 | CD8SP-CD22-m971-HL-(vH-vL)-Myc- |
| | | | | BBz-P2A-K13-Flag-T2A-PAC |
| CD30 | | 1251 | 2996 | CD8SP-CD30-5F11-(vL-vH)-Myc-BBz- |
| | | | | P2A-K13-Flag-T2A-PAC |
| CD30 | | 1252 | 2997 | CD8SP-CD30-Ac10-(vL-vH)-Myc-BBz- |
| | | | | P2A-K13-Flag-T2A-PAC |
| CD32 | | 1253 | 2998 | CD8SP-CD32-Med9-(vL-vH)-Myc-BBz- |
| | | | | P2A-K13-Flag-T2A-PAC |
| CD33 | | 1254 | 2999 | CD8SP-CD33-AF5-(vL-vH)-Myc-BBz- |
| | | | | P2A-K13-Flag-T2A-PAC |
| CD33 | | 1255 | 3000 | CD8SP-CD33-huMyc9-(vL-vH)-Myc- |
| | | | | BBz-P2A-K13-Flag-T2A-PAC |
| CD33 | | 1256 | 3001 | CD8SP-CD33-Boehr2800308-(vL-vH)- |
| | | | | Myc-BBz-P2A-K13-Flag-T2A-PAC |
| CD33 | | 1257 | 3002 | CD8SP-CD33-Him3-4-(vL-vH)-Myc- |
| | | | | BBz-P2A-K13-Flag-T2A-PAC |
| CD33 | | 1258 | 3003 | CD8SP-CD33-SGNh2H12-(vL-vH)-Myc- |
| | | | | BBz-P2A-K13-Flag-T2A-PAC |
| CD33 | | 1259 | 3004 | CD8SP-CD33-15G15-33-(vL-vH)-Myc- |
| | | | | BBz-P2A-K13-Flag-T2A-PAC |
| CD33 | | 1260 | 3005 | CD8SP-CD33-33H4-(vL-vH)-Myc-BBz- |
| | | | | P2A-K13-Flag-T2A-PAC |
| CD33 | | 1261 | 3006 | CD8SP-CD33-9C3-2-(vL-vH)-Myc-BBz- |
| | | | | P2A-K13-Flag-T2A-PAC |
| CD34 | | 1262 | 3007 | CD8SP-CD34-hu4C7-(vL-vH)-Myc-BBz- |
| | | | | P2A-K13-Flag-T2A-PAC |
| CD44v6 | | 1263 | 3008 | CD8SP-CD44v6-Biwa8-(vL-vH)-Myc- |
| | | | | BBz-P2A-K13-Flag-T2A-PAC |
| CD70 | | 1264 | 3009 | CD8SP-CD70-h1F6-(vL-vH)-Myc-BBz- |
| | | | | P2A-K13-Flag-T2A-PAC |
| CD79b | | 1265 | 3010 | CD8SP-CD79b-2F2-(vL-vH)-Myc-BBz- |
| | | | | P2A-K13-Flag-T2A-PAC |
| CD79b | | 1266 | 3011 | CD8SP-huMA79bv28-(vL-vH)-Myc-BBz- |
| | | | | P2A-K13-Flag-T2A-PAC |
| CD99 | | 1267 | 3012 | CD8SP-CD99-hu12E7-(vL-vH)-Myc- |
| | | | | BBz-P2A-K13-Flag-T2A-PAC |
| CD123 | | 1268 | 3013 | CD8SP-CD123-CSL362-(vL-vH)-Myc- |
| | | | | BBz-P2A-K13-Flag-T2A-PAC |
| CD123 | | 1269 | 3014 | CD8SP-CD123-1172-(vL-vH)-Myc-BBz- |
| | | | | P2A-K13-Flag-T2A-PAC |
| CD123 | | 1270 | 3015 | CD8SP-CD123-DART-1-(vL-vH)-Myc- |
| | | | | BBz-P2A-K13-Flag-T2A-PAC |
| CD123 | | 1271 | 3016 | CD8SP-CD123-DART-2-(vL-vH)-Myc- |
| | | | | BBz-P2A-K13-Flag-T2A-PAC |
| CD123 | | 1272 | 3017 | CD8SP-CD123-I3RB18-(vL-vH)-Myc- |
| | | | | BBz-P2A-K13-Flag-T2A-PAC |
| CD123 | | 1273 | 3018 | CD8SP-CD123-hu3E3-(vL-vH)-Myc- |
| | | | | BBz-P2A-K13-Flag-T2A-PAC |
| CD123 | | 1274 | 3019 | CD8SP-CD123-9F6-(vL-vH)-Myc-BBz- |
| | | | | P2A-K13-Flag-T2A-PAC |
| CD123 | | 1275 | 3020 | CD8SP-CD123-I3RB2-(vL-vH)-Myc- |
| | | | | BBz-P2A-K13-Flag-T2A-PAC |
| CD123 | | 1276 | 3021 | CD8SP-CD123-1176-(vL-vH)-Myc-BBz- |
| | | | | P2A-K13-Flag-T2A-PAC |
| CD123 | | 1277 | 3022 | CD8SP-Ritx2-CD123-8B11-(vL-vH)- |
| | | | | Myc-BBz-P2A-K13-Flag-T2A-PAC |
| CD123 | | 1278 | 3023 | CD8SP-CD123-2B8-(vL-vH)-Myc-BBz- |
| | | | | P2A-K13-Flag-T2A-PAC |
| CD123 | | 1279 | 3024 | CD8SP-CD123-9D7-(vL-vH)-Myc-BBz- |
| | | | | P2A-K13-Flag-T2A-PAC |
| CD123 | | 1280 | 3025 | CD8SP-CD123-3B10-(vL-vH)-Myc-BBz- |
| | | | | P2A-K13-Flag-T2A-PAC |
| CD138 | | 1281 | 3026 | CD8SP-CD138-(vL-vH)-Myc-BBz-P2A- |
| | | | | K13-Flag-T2A-PAC |
| CD179b | | 1282 | 3027 | CD8SP-CD179b-(vL-vH)-Myc-BBz-P2A- |
| | | | | K13-Flag-T2A-PAC |
| CD276 | | 1283 | 3028 | CD8SP-CD276-17-(vL-vH)-Myc-BBz- |
| | | | | P2A-K13-Flag-T2A-PAC |
| CD324 | | 1284 | 3029 | CD8SP-CD324-SC10-6-(vL-vH)-Myc- |
| | | | | BBz-P2A-K13-Flag-T2A-PAC |
| CD324 | | 1285 | 3030 | CD8SP-CD324-hSC10-17-(vL-vH)-Myc- |
| | | | | BBz-P2A-K13-Flag-T2A-PAC |
| CDH6 | | 1286 | 3031 | CD8SP-CDH6-NOV710-(vL-vH)-Myc- |
| | | | | BBz-P2A-K13-Flag-T2A-PAC |
| CDH6 | | 1287 | 3032 | CD8SP-CDH6-NOV712-(vL-vH)-Myc- |
| | | | | BBz-P2A-K13-Flag-T2A-PAC |
| CDH17 | | 1288 | 3033 | CD8SP-CDH17-PTA001A4-(vL-vH)- |
| | | | | Myc-BBz-P2A-K13-Flag-T2A-PAC |
| CDH19 | | 1289 | 3034 | CD8SP-CDH19-16A4-(vL-vH)-Myc-BBz- |
| | | | | P2A-K13-Flag-T2A-PAC |
| EGFR | | 1290 | 3035 | CD8SP-Cetuximab-(vL-vH)-Myc-BBz- |
| | | | | P2A-K13-Flag-T2A-PAC |
| CLEC5A | | 1291 | 3036 | CD8SP-CLEC5A-8H8F5-(vL-vH)-Myc- |
| | | | | BBz-P2A-K13-Flag-T2A-PAC |
| CLEC5A | | 1292 | 3037 | CD8SP-CLEC5A-3E12A2-(vL-vH)-Myc- |
| | | | | BBz-P2A-K13-Flag-T2A-PAC |
| GR/LHR | | 1293 | 3038 | SP-CGHb-Gly-Ser-Linker-CGHa-Myc- |
| (Gonadotropin | | | | BBz-P2A-K13-Flag-T2A-PAC |
| Receptor) | | | | |
| CLL1 | | 1294 | 3039 | CD8SP-CLL1-M26-(vL-vH)-Myc-BBz- |
| | | | | P2A-K13-Flag-T2A-PAC |
| CLL1 | | 1295 | 3040 | CD8SP-CLL1-M32-(vL-vH)-Myc-BBz- |
| | | | | P2A-K13-Flag-T2A-PAC |
| CLL1 | | 1296 | 3041 | CD8SP-CLL1-21C9-L2H3-(vL-vH)-Myc- |
| | | | | BBz-P2A-K13-Flag-T2A-PAC |
| CLL1 | | 1297 | 3042 | CD8SP-CLL1-6E7L4H1e-(vL-vH)-Myc- |
| | | | | BBz-P2A-K13-Flag-T2A-PAC |
| CLL1 | | 1298 | 3043 | CD8SP-CLL1-hu1075-v1-(vL-vH)-Myc- |
| | | | | BBz-P2A-K13-Flag-T2A-PAC |
| CLL1 | | 1299 | 3044 | CD8SP-CLL1-hu1075-v2-(vL-vH)-Myc- |
| | | | | BBz-P2A-K13-Flag-T2A-PAC |
| CMVpp65/MHC | | 1300 | 3045 | CD8SP-CMVpp65-F5-(vL-vH)-Myc-BBz- |
| class I complex | | | | P2A-K13-Flag-T2A-PAC |
| CS1 (SLAMF7) | | 1301 | 3046 | CD8SP-CS1-huLuc63-(vL-vH)-Myc-BBz- |
| | | | | P2A-K13-Flag-T2A-PAC |
| CS1 (SLAMF7) | | 1302 | 3047 | CD8SP-CS1-HuLuc64-(vL-vH)-Myc- |
| | | | | BBz-P2A-K13-Flag-T2A-PAC |
| CS1 (SLAMF7) | | 1303 | 3048 | CD8SP-CS1-huLuc90-(vL-vH)-Myc-BBz- |
| | | | | P2A-K13-Flag-T2A-PAC |
| CS1 (SLAMF7) | | 1304 | 3049 | CD8SP-CS1-PDL241-(vL-vH)-Myc-BBz- |
| | | | | P2A-K13-Flag-T2A-PAC |
| CS1 (SLAMF7) | | 1305 | 3050 | CD8SP-CS1-Hu27A-(vL-vH)-Myc-BBz- |
| | | | | P2A-K13-Flag-T2A-PAC |
| CS1 (SLAMF7) | | 1306 | 3051 | CD8SP-CS1-ScHu34C3-(vL-vH)-Myc- |
| | | | | BBz-P2A-K13-Flag-T2A-PAC |
| CS1 (SLAMF7) | | 1307 | 3052 | CD8SP-CS1-Hu31-D2-(vL-vH)-Myc- |
| | | | | BBz-P2A-K13-Flag-T2A-PAC |
| CS1(SLAMF7) | | 1308 | 3053 | CD8SP-CS1-Luc34-(vL-vH)-Myc-BBz- |
| | | | | P2A-K13-Flag-T2A-PAC |
| CS1 (SLAMF7) | | 1309 | 3054 | CD8SP-CS1-LucX2-(vL-vH)-Myc-BBz- |
| | | | | P2A-K13-Flag-T2A-PAC |
| CSF2RA | | 1310 | 3055 | CD8SP-CSF2RA-Ab6-(vL-vH)-Myc-BBz- |
| | | | | P2A-K13-Flag-T2A-PAC |
| CSF2RA | | 1311 | 3056 | CD8SP-CSF2RA-Ab1-(vL-vH)-Myc-BBz- |
| | | | | P2A-K13-Flag-T2A-PAC |
| CXCR4 and CD123 | | 1312 | 3057 | CD8SP-CXCR4-1-vHH-Gly-Ser-Linker- |
| | | | | CD123-1-vHH-Myc-BBz-P2A-K13-Flag- |
| | | | | T2A-PAC |
| CXCR4 and CD123 | | 1313 | 3058 | CD8SP-CXCR4-2-VHH-Gly-Ser-Linker- |
| | | | | CD123-2-VHH-Myc-BBz-P2A-K13-Flag- |
| | | | | T2A-PAC |
| DLL3 (Delta Like | | 1314 | 3059 | CD8SP-DLL3-hSC16-13-(vL-vH)-Myc- |
| Ligand 3) | | | | BBz-P2A-K13-Flag-T2A-PAC |
| DLL3 (Delta Like | | 1315 | 3060 | CD8SP-DLL3-hSC16-56-(vL-vH)-Myc- |
| Ligand 3) | | | | BBz-P2A-K13-Flag-T2A-PAC |
| EBNA3c/MHC class | | 1316 | 3061 | CD8SP-EBNA3c-315-(vL-vH)-Myc-BBz- |
| I complex | | | | P2A-K13-Flag-T2A-PAC |
| EBV-gp350 | | 1317 | 3062 | CD8SP-EBV-gp350-(vL-vH)-Myc-BBz- |
| | | | | P2A-K13-Flag-T2A-PAC |
| EGFR | | 1318 | 3063 | CD8SP-EGFR1-vHH-Myc-BBz-P2A- |
| | | | | K13-Flag-T2A-PAC |
| EGFR & CEA | | 1319 | 3064 | CD8SP-EGFR1-vHH-Gly-Ser-Linker- |
| | | | | CEA1-vHH-Myc-BBz-P2A-K13-Flag- |
| | | | | T2A-PAC |
| EGFR & CEA | | 1320 | 3065 | CD8SP-EGFR33-vHH-Gly-Ser-Linker- |
| | | | | CEA5-vHH-Myc-BBz-P2A-K13-Flag- |
| | | | | T2A-PAC |
| EGFRvIII | | 1321 | 3066 | CD8SP-EGFRvIII-139-(vL-vH)-Myc- |
| | | | | BBz-P2A-K13-Flag-T2A-PAC |
| EGFRvIII | | 1322 | 3067 | CD8SP-EGFRvIII-2173-(vL-vH)-Myc- |
| | | | | BBz-P2A-K13-Flag-T2A-PAC |
| EpCam1 | | 1323 | 3068 | CD8SP-Epcam1-MM1-(vL-vH)-Myc- |
| | | | | BBz-P2A-K13-Flag-T2A-PAC |
| EpCam1 | | 1324 | 3069 | CD8SP-Epcam1-D5K5-(vL-vH)-Myc- |
| | | | | BBz-P2A-K13-Flag-T2A-PAC |
| FLT3 | | 1325 | 3070 | CD8SP-FLT3-NC7-(vL-vH)-Myc-BBz- |
| | | | | P2A-K13-Flag-T2A-PAC |
| FITC | | 1326 | 3071 | CD8SP-FITC-(vL-vH)-Myc-BBz-P2A- |
| | | | | K13-Flag-T2A-PAC |
| FITC | | 1327 | 3072 | CD8SP-FITC-4M-53-(vL-vH)-Myc-BBz- |
| | | | | P2A-K13-Flag-T2A-PAC |
| FITC | | 1328 | 3073 | CD8SP-FITC-E2-HL-(vH-vL)-Myc-BBz- |
| | | | | P2A-K13-Flag-T2A-PAC |
| Influenza A HA | | 1329 | 3074 | CD8SP-FLU-MEDI-8852-(vL-vH)-Myc- |
| | | | | BBz-P2A-K13-Flag-T2A-PAC |
| FR1 (Folate | | 1330 | 3075 | CD8SP-FR1-huMov19-(vL-vH)-Myc- |
| Receptor alpha) | | | | BBz-P2A-K13-Flag-T2A-PAC |
| FSHR (Follicle | | 1331 | 3076 | CD8SP-FSHb-Gly-Ser-Linker-CGHa- |
| Stimulating | | | | Myc-BBz-P2A-K13-Flag-T2A-PAC |
| Hormone Receptor) | | | | |
| GAD (Glutamic | | 1332 | 3077 | CD8SP-GAD-G3H8-(vL-vH)-Myc-BBz- |
| Acid | | | | P2A-K13-Flag-T2A-PAC |
| Decarboxylase)/MHC | | | | |
| class I complex | | | | |
| GD2 | | 1333 | 3078 | CD8SP-GD2-hu14-18-(vL-vH)-Myc-BBz- |
| | | | | P2A-K13-Flag-T2A-PAC |
| GD2 | | 1334 | 3079 | CD8SP-GD2-hu3F8-(vL-vH)-Myc-BBz- |
| | | | | P2A-K13-Flag-T2A-PAC |
| GD3 | | 1335 | 3080 | CD8SP-GD3-KM-641-(vL-vH)-Myc-BBz- |
| | | | | P2A-K13-Flag-T2A-PAC |
| GFRa4 (GDNF | | 1336 | 3081 | CD8SP-GFRAlpha4-P4-6-(vL-vH)-Myc- |
| Family Receptor | | | | BBz-P2A-K13-Flag-T2A-PAC |
| Alpha 4) | | | | |
| GFRa4 (GDNF | | 1337 | 3082 | CD8SP-GFRa4-P4-10-(vL-vH)-Myc-BBz- |
| Family Receptor | | | | P2A-K13-Flag-T2A-PAC |
| Alpha 4) | | | | |
| GM1 | | 1338 | 3083 | CD8SP-GM1-5B2-(vL-vH)-Myc-BBz- |
| | | | | P2A-K13-Flag-T2A-PAC |
| GM1 | | 1339 | 3084 | CD8SP-GM1-7E5-(vL-vH)-Myc-BBz- |
| | | | | P2A-K13-Flag-T2A-PAC |
| GPRC5D (G-protein | | 1340 | 3085 | CD8SP-GPRC5D-ET150-5-(vL-vH)-Myc- |
| coupled receptor | | | | BBz-P2A-K13-Flag-T2A-PAC |
| family C group 5 | | | | |
| member D) | | | | |
| GPRC5D | | 1341 | 3086 | CD8SP-GPRC5D-ET150-18-(vL-vH)- |
| | | | | Myc-BBz-P2A-K13-Flag-T2A-PAC |
| GPRC5D | | 1342 | 3087 | CD8SP-GPRC5D-ET150-1-(vL-vH)-Myc- |
| | | | | BBz-P2A-K13-Flag-T2A-PAC |
| GPRC5D | | 1343 | 3088 | CD8SP-GPRC5D-ET150-2-(vL-vH)-Myc- |
| | | | | BBz-P2A-K13-Flag-T2A-PAC |
| gp100/MHC class I | | 1344 | 3089 | CD8SP-gp100-(vL-vH)-Myc-BBz-P2A- |
| complex | | | | K13-Flag-T2A-PAC |
| gp100/MHC class I | | 1345 | 3090 | CD8SP-gp100-G2D12-(vL-vH)-Myc-BBz- |
| complex | | | | P2A-K13-Flag-T2A-PAC |
| GPC3 (Glypican 3) | | 1346 | 3091 | CD8SP-GPC3-4E5-(vL-vH)-Myc-BBz- |
| | | | | P2A-K13-Flag-T2A-PAC |
| gpNMB | | 1347 | 3092 | CD8SP-gpNMB-115-(vL-vH)-Myc-BBz- |
| (Glycoprotein Nmb) | | | | P2A-K13-Flag-T2A-PAC |
| GRP78 | | 1348 | 3093 | CD8SP-GRP78-GC18-(vL-vH)-Myc-BBz- |
| | | | | P2A-K13-Flag-T2A-PAC |
| Her2 | | 1349 | 3094 | CD8SP-Her2-5F7-vHH-Myc-BBz-P2A- |
| | | | | K13-Flag-T2A-PAC |
| Her2 | | 1350 | 3095 | IgHSP-Her2-Affi-Myc-BBz-P2A-K13- |
| | | | | Flag-T2A-PAC |
| Her2 | | 1351 | 3096 | CD8SP-Her2-1-Darpin-Myc-BBz-P2A- |
| | | | | K13-Flag-T2A-PAC |
| Her2 | | 1352 | 3097 | IgHSP-Her2-2-Darpin-Myc-BBz-P2A- |
| | | | | K13-Flag-T2A-PAC |
| Her2 | | 1353 | 3098 | CD8SP-Her2-5F7-vHH-Gly-Ser-Linker- |
| | | | | Her2-47D5-vHH-Myc-BBz-P2A-K13- |
| | | | | Flag-T2A-PAC |
| Her2 | | 1354 | 3099 | CD8SP-Her2-Hu4D5-(vL-vH)-Myc-BBz- |
| | | | | P2A-K13-Flag-T2A-PAC |
| Her3 | | 1355 | 3100 | CD8SP-Her3-17B05So-vHH-Myc-BBz- |
| | | | | P2A-K13-Flag-T2A-PAC |
| Her3 | | 1356 | 3101 | CD8SP-Her3-Affi-Myc-BBz-P2A-K13- |
| | | | | Flag-T2A-PAC |
| Her2 and Her3 | | 1357 | 3102 | CD8SP-Her3-17B05So-vHH-Gly-Ser- |
| | | | | Linker-Her2-2D3-vHH-Myc-BBz-P2A- |
| | | | | K13-Flag-T2A-PAC |
| HIV1-gag/MHC | | 1358 | 3103 | CD8SP-HIV1-E5-(vL-vH)-Myc-BBz- |
| class I complex | | | | P2A-K13-Flag-T2A-PAC |
| HIV1-envelop | | 1359 | 3104 | CD8SP-HIV1-3BNC117-(vL-vH)-Myc- |
| glycoprotein | | | | BBz-P2A-K13-Flag-T2A-PAC |
| HIV1-envelop | | 1360 | 3105 | CD8SP-HIV1-PGT-128-(vL-vH)-Myc- |
| glycoprotein | | | | BBz-P2A-K13-Flag-T2A-PAC |
| HIV1-envelop | | 1361 | 3106 | CD8SP-HIV1-VR-C01-(vL-vH)-Myc- |
| glycoprotein | | | | BBz-P2A-K13-Flag-T2A-PAC |
| HIV1-envelop | | 1362 | 3107 | CD8SP-HIV1-X5-(vL-vH)-Myc-BBz- |
| glycoprotein | | | | P2A-K13-Flag-T2A-PAC |
| HLA-A2 | | 1363 | 3108 | CD8SP-HLA-A2-3PB2-(vL-vH)-Myc- |
| | | | | BBz-P2A-K13-Flag-T2A-PAC |
| HMW-MAA | | 1364 | 3109 | CD8SP-HMW-MAA-hIND-(vL-vH)-Myc- |
| | | | | BBz-P2A-K13-Flag-T2A-PAC |
| HPV16-E7/MHC | | 1365 | 3110 | CD8SP-HPV16-7-8-(vL-vH)-Myc-BBz- |
| class I complex | | | | P2A-K13-Flag-T2A-PAC |
| HPV16-E7/MHC | | 1366 | 3111 | CD8SP-HPV16-2-(vL-vH)-Myc-BBz- |
| class I complex | | | | P2A-K13-Flag-T2A-PAC |
| HTLV1-TAX/MHC | | 1367 | 3112 | CD8SP-HTLV-TAX-T3F2-(vL-vH)-Myc- |
| class I complex | | | | BBz-P2A-K13-Flag-T2A-PAC |
| HTLV1-TAX/MHC | | 1368 | 3113 | CD8SP-HTLV-TAX-T3E3-(vL-vH)-Myc- |
| class I complex | | | | BBz-P2A-K13-Flag-T2A-PAC |
| IL11Ra | | 1369 | 3114 | CD8SP-IL11Ra-8E2-Ts107-(vL-vH)-Myc- |
| | | | | BBz-P2A-K13-Flag-T2A-PAC |
| IL6Ra | | 1370 | 3115 | IgHSP-IL6R-304-vHH-Myc-BBz-P2A- |
| | | | | K13-Flag-T2A-PAC |
| IL13Ra2 | | 1371 | 3116 | CD8SP-IL13Ra2-hu107-(vL-vH)-Myc- |
| | | | | BBz-P2A-K13-Flag-T2A-PAC |
| IL13Ra2 | | 1372 | 3117 | CD8SP-IL13Ra2-Hu108-(vL-vH)-Myc- |
| | | | | BBz-P2A-K13-Flag-T2A-PAC |
| KSHV-K8.1 | | 1373 | 3118 | CD8SP-KSHV-4C3-(vL-vH)-Myc-BBz- |
| | | | | P2A-K13-Flag-T2A-PAC |
| LAMP1 | | 1374 | 3119 | CD8SP-LAMP1-humab1-2-(vL-vH)-Myc- |
| (Lysosomal- | | | | BBz-P2A-K13-Flag-T2A-PAC |
| associated | | | | |
| membrane protein 1) | | | | |
| LAMP1 | | 1375 | 3120 | CD8SP-LAMP1-Mb4-(vL-vH)-Myc-BBz- |
| (Lysosomal- | | | | P2A-K13-Flag-T2A-PAC |
| associated | | | | |
| membrane protein 1) | | | | |
| LewisY | | 1376 | 3121 | CD8SP-LewisY-huS193-(vL-vH)-Myc- |
| | | | | BBz-P2A-K13-Flag-T2A-PAC |
| L1CAM | | 1377 | 3122 | CD8SP-L1CAM-9-3-HU3-(vL-vH)-Myc- |
| | | | | BBz-P2A-K13-Flag-T2A-PAC |
| LHR | | 1378 | 3123 | SP-LHb-Gly-Ser-Linker-CGHa-Myc-BBz- |
| | | | | P2A-K13-Flag-T2A-PAC |
| Lym1 | | 1379 | 3124 | CD8SP-Lym1-(vL-vH)-Myc-BBz-P2A- |
| | | | | K13-Flag-T2A-PAC |
| Lym2 | | 1380 | 3125 | CD8SP-Lym2-(vL-vH)-Myc-BBz-P2A- |
| | | | | K13-Flag-T2A-PAC |
| CD79b | | 1381 | 3126 | CD8SP-huMA79bv28-(vL-vH)-Myc-BBz- |
| | | | | P2A-K13-Flag-T2A-PAC |
| MART1/MHC class | | 1382 | 3127 | CD8SP-MART1-CAG10-(vL-vH)-Myc- |
| I complex | | | | BBz-P2A-K13-Flag-T2A-PAC |
| MART1/MHC class | | 1383 | 3128 | CD8SP-MART1-CLA12-(vL-vH)-Myc- |
| I complex | | | | BBz-P2A-K13-Flag-T2A-PAC |
| Mesothelin | | 1384 | 3129 | CD8SP-Mesothelin-m912-(vL-vH)-Myc- |
| | | | | BBz-P2A-K13-Flag-T2A-PAC |
| cMet | | 1385 | 3130 | CD8SP-cMet-171-vHH-Myc-BBz-P2A- |
| | | | | K13-Flag-T2A-PAC |
| cMet and Her3 | | 1386 | 3131 | CD8SP-cMET-171-vHH-Gly-Ser-Linker- |
| | | | | Her3-21F06-vHH-Myc-BBz-P2A-K13- |
| | | | | Flag-T2A-PAC |
| MPL | | 1387 | 3132 | CD8SP-MPL-175-(vL-vH)-Myc-BBz- |
| (Thrombopoietin | | | | P2A-K13-Flag-T2A-PAC |
| receptor) | | | | |
| MPL | | 1388 | 3133 | CD8SP-MPL-161-(vL-vH)-Myc-BBz- |
| (Thrombopoietin | | | | P2A-K13-Flag-T2A-PAC |
| receptor) | | | | |
| MPL | | 1389 | 3134 | CD8SP-MPL-161-HL-(vH-vL)-Myc-BBz- |
| (Thrombopoietin | | | | P2A-K13-Flag-T2A-PAC |
| receptor) | | | | |
| MPL | | 1390 | 3135 | CD8SP-2-MPL-111-(vL-vH)-Myc-BBz- |
| (Thrombopoietin | | | | P2A-K13-Flag-T2A-PAC |
| receptor) | | | | |
| MPL | | 1391 | 3136 | CD8SP-MPL-178-(vL-vH)-Myc-BBz- |
| (Thrombopoietin | | | | P2A-K13-Flag-T2A-PAC |
| receptor) | | | | |
| MPL | | 1392 | 3137 | CD8SP-MPL-AB317-(vL-vH)-Myc-BBz- |
| (Thrombopoietin | | | | P2A-K13-Flag-T2A-PAC |
| receptor) | | | | |
| MPL | | 1393 | 3138 | CD8SP-MPL-12E10-(vL-vH)-Myc-BBz- |
| (Thrombopoietin | | | | P2A-K13-Flag-T2A-PAC |
| receptor) | | | | |
| MPL | | 1394 | 3139 | CD8SP-MPL-huVB22Bw5-(vL-vH)-Myc- |
| (Thrombopoietin | | | | BBz-P2A-K13-Flag-T2A-PAC |
| receptor) | | | | |
| Muc1/MHC class I | | 1395 | 3140 | CD8SP-Muc1-D6-M3B8-(vL-vH)-Myc- |
| complex | | | | BBz-P2A-K13-Flag-T2A-PAC |
| Muc1/MHC class I | | 1396 | 3141 | CD8SP-MUC1-D6-M3A1-(vL-vH)-Myc- |
| complex | | | | BBz-P2A-K13-Flag-T2A-PAC |
| Muc16 | | 1397 | 3142 | CD8SP-Muc16-4H11-(vL-vH)-Myc-BBz- |
| | | | | P2A-K13-Flag-T2A-PAC |
| EGFR | | 1398 | 3143 | CD8SP-Nimotuzumab-(vL-vH)-Myc-BBz- |
| | | | | P2A-K13-Flag-T2A-PAC |
| NKG2D Ligand | | 1399 | 3144 | CD8SP-NKG2D-(GGGGS-GGGGD)- |
| | | | | Myc-BBz-P2A-K13-Flag-T2A-PAC |
| NKG2D | | 1400 | 3145 | CD8SP-NKG2D-MS-(vL-vH)-Myc-BBz- |
| | | | | P2A-K13-Flag-T2A-PAC |
| NY-BR1 | | 1401 | 3146 | CD8SP-NYBR1-(vL-vH)-Myc-BBz-P2A- |
| | | | | K13-Flag-T2A-PAC |
| NY-ESO/MHC class | | 1402 | 3147 | CD8SP-NYESO-T1-(vL-vH)-Myc-BBz- |
| I complex | | | | P2A-K13-Flag-T2A-PAC |
| NY-ESO/MHC class | | 1403 | 3148 | CD8SP-NYESO-T2-(vL-vH)-Myc-BBz- |
| I complex | | | | P2A-K13-Flag-T2A-PAC |
| PD1 ligand (e.g., | | 1404 | 3149 | CD8SP-PD1-ECD-Myc-BBz-P2A-K13- |
| PDL1) | | | | Flag-T2A-PAC |
| PDL1 | | 1405 | 3150 | CD8SP-PDL1-Atezoli-(vL-vH)-Myc-BBz- |
| | | | | P2A-K13-Flag-T2A-PAC |
| PDL1 | | 1406 | 3151 | CD8SP-PDL1-SP142-(vL-vH)-Myc-BBz- |
| | | | | P2A-K13-Flag-T2A-PAC |
| PDL1 | | 1407 | 3152 | CD8SP-PDL1-10A5-(vL-vH)-Myc-BBz- |
| | | | | P2A-K13-Flag-T2A-PAC |
| PSCA (Prostate stem | | 1408 | 3153 | CD8SP-PSCA-Ha14-121-(vL-vH)-Myc- |
| cell antigen) | | | | BBz-P2A-K13-Flag-T2A-PAC |
| PSCA (Prostate stem | | 1409 | 3154 | CD8SP-PSCA-Ha14-117-(vL-vH)-Myc- |
| cell antigen) | | | | BBz-P2A-K13-Flag-T2A-PAC |
| PR1/MHC class I | | 1410 | 3155 | CD8SP-PR1-(vL-vH)-Myc-BBz-P2A- |
| complex | | | | K13-Flag-T2A-PAC |
| PSMA (Prostate | | 1411 | 3156 | CD8SP-PSMA-006-(vL-vH)-Myc-BBz- |
| Specific Membrane | | | | P2A-K13-Flag-T2A-PAC |
| Antigen) | | | | |
| PSMA (Prostate | | 1412 | 3157 | CD8SP-PSMA-J591-(vL-vH)-Myc-BBz- |
| Specific Membrane | | | | P2A-K13-Flag-T2A-PAC |
| Antigen) | | | | |
| PTK7 (Tyrosine- | | 1413 | 3158 | CD8SP-PTK7-hSC6-23-(vL-vH)-Myc- |
| protein kinase-like 7) | | | | BBz-P2A-K13-Flag-T2A-PAC |
| PTK7 (Tyrosine- | | 1414 | 3159 | CD8SP-PTK7-SC6-10-2-(vL-vH)-Myc- |
| protein kinase-like 7) | | | | BBz-P2A-K13-Flag-T2A-PAC |
| ROR1 | | 1415 | 3160 | CD8SP-ROR1-4A5-(vL-vH)-Myc-BBz- |
| | | | | P2A-K13-Flag-T2A-PAC |
| ROR1 | | 1416 | 3161 | CD8SP-ROR1-4C10-(vL-vH)-Myc-BBz- |
| | | | | P2A-K13-Flag-T2A-PAC |
| Mesothelin | | 1417 | 3162 | CD8SP-SD1-vHH-Gly-Ser-Linker-SD2- |
| | | | | vF1H-Myc-BBz-P2A-K13-Flag-T2A-PAC |
| SLea | | 1418 | 3163 | CD8SP-SLea-7E3-(vL-vH)-Myc-BBz- |
| | | | | P2A-K13-Flag-T2A-PAC |
| SLea | | 1419 | 3164 | CD8SP-SLea-5B1-(vL-vH)-Myc-BBz- |
| | | | | P2A-K13-Flag-T2A-PAC |
| SSEA4 (stage- | | 1420 | 3165 | CD8SP-SSEA4-(vL-vH)-Myc-BBz-P2A- |
| specific embryonic | | | | K13-Flag-T2A-PAC |
| antigen 4) | | | | |
| TCRB1 (TCR beta 1 | | 1421 | 3166 | CD8SP-TCRB1-CP01-E09-(vL-vH)-Myc- |
| constant chain) | | | | BBz-P2A-K13-Flag-T2A-PAC |
| TCRB1 (TCR beta 1 | | 1422 | 3167 | CD8SP-TCRB1-Jovi1-(vL-vH)-Myc-BBz- |
| constant chain) | | | | P2A-K13-Flag-T2A-PAC |
| TCRB2 (TCR beta 2 | | 1423 | 3168 | CD8SP-TCRB2-CP01-D05-(vL-vH)-Myc- |
| constant chain) | | | | BBz-P2A-K13-Flag-T2A-PAC |
| TCRB2 (TCR beta 2 | | 1424 | 3169 | CD8SP-TCRB2-CP01-E05-(vL-vH)-Myc- |
| constant chain) | | | | BBz-P2A-K13-Flag-T2A-PAC |
| TCRgd (TCR | | 1425 | 3170 | CD8SP-TCRgd-G5-4-(vL-vH)-Myc-BBz- |
| gamma/delta) | | | | P2A-K13-Flag-T2A-PAC |
| hTERT/MHC class I | | 1426 | 3171 | CD8SP-TERT-4A9-T540-(vL-vH)-Myc- |
| complex | | | | BBz-P2A-K13-Flag-T2A-PAC |
| hTERT/MHC class I | | 1427 | 3172 | CD8SP-TERT-3G3-T865-(vL-vH)-Myc- |
| complex | | | | BBz-P2A-K13-Flag-T2A-PAC |
| Tissue Factor-1 | | 1428 | 3173 | CD8SP-TGFBR2-Ab1-(vL-vH)-Myc-BBz- |
| | | | | P2A-K13-Flag-T2A-PAC |
| TGFBR2 | | 1429 | 3174 | CD8SP-TF1-98-(vL-vH)-Myc-BBz-P2A- |
| | | | | K13-Flag-T2A-PAC |
| TIM1/HAVCR | | 1430 | 3175 | CD8SP-TIM1-HVCR1-270-2-(vL-vH)- |
| | | | | Myc-BBz-P2A-K13-Flag-T2A-PAC |
| TIM1/HAVCR | | 1431 | 3176 | CD8SP-TIM1-HVCR1-ARD5-(vL-vH)- |
| | | | | Myc-BBz-P2A-K13-Flag-T2A-PAC |
| TnAg | | 1432 | 3177 | CD8SP-TnAg-(vL-vH)-Myc-BBz-P2A- |
| | | | | K13-Flag-T2A-PAC |
| Tn-Muc1 | | 1433 | 3178 | CD8SP-TnMuc1-hu5E5-RHA8-RKA-2- |
| | | | | (vL-vH)-Myc-BBz-P2A-K13-Flag-T2A- |
| | | | | PAC |
| MPL | | 1434 | 3179 | CD8SP-hTPO-Myc-BBz-P2A-K13-Flag- |
| (Thrombopoietin | | | | T2A-PAC |
| receptor) | | | | |
| TROP2 (Trophoblast | | 1435 | 3180 | CD8SP-TROP2-ARA47-HV3KV3-(vL- |
| cell-surface antigen-2) | | | | vH)-Myc-BBz-P2A-K13-Flag-T2A-PAC |
| TROP2 | | 1436 | 3181 | CD8SP-TROP2-h7E6-SVG-(vL-vH)-Myc- |
| | | | | BBz-P2A-K13-Flag-T2A-PAC |
| TSHR (Thyrotropin | | 1437 | 3182 | SP-TSHb-Gly-Ser-Linker-CGHa-Myc- |
| receptor) | | | | BBz-P2A-K13-Flag-T2A-PAC |
| TSHR | | 1438 | 3183 | CD8SP-TSHR-K1-70-(vL-vH)-Myc-BBz- |
| | | | | P2A-K13-Flag-T2A-PAC |
| TSHR | | 1439 | 3184 | CD8SP-TSHR-KB1-(vL-vH)-Myc-BBz- |
| | | | | P2A-K13-Flag-T2A-PAC |
| TSHR | | 1440 | 3185 | CD8SP-TSHR-5C9-(vL-vH)-Myc-BBz- |
| | | | | P2A-K13-Flag-T2A-PAC |
| TSLPR (Thymic | | 1441 | 3186 | CD8SP-TSLPR-(vL-vH)-Myc-BBz-P2A- |
| stromal | | | | K13-Flag-T2A-PAC |
| lymphopoietin | | | | |
| receptor) | | | | |
| Tyrosinase/MHC | | 1442 | 3187 | CD8SP-Tyros-B2-(vL-vH)-Myc-BBz- |
| class I complex | | | | P2A-K13-Flag-T2A-PAC |
| Tyrosinase/MHC | | 1443 | 3188 | CD8SP-Tyros-MC1-(vL-vH)-Myc-BBz- |
| class I complex | | | | P2A-K13-Flag-T2A-PAC |
| Tyrosinase/MHC | | 1444 | 3189 | CD8SP-Tyros-TA2-(vL-vH)-Myc-BBz- |
| class I complex | | | | P2A-K13-Flag-T2A-PAC |
| VEGFR3 | | 1445 | 3190 | CD8SP-VEGFR3-Ab1-(vL-vH)-Myc- |
| | | | | BBz-P2A-K13-Flag-T2A-PAC |
| WT1/MHC class I | | 1446 | 3191 | CD8SP-WT1-Ab1-(vL-vH)-Myc-BBz- |
| complex | | | | P2A-K13-Flag-T2A-PAC |
| WT1/MHC class I | | 1447 | 3192 | CD8SP-WT1-Ab5-(vL-vH)-Myc-BBz- |
| complex | | | | P2A-K13-Flag-T2A-PAC |
| WT1/MHC class I | | 1448 | 3193 | CD8SP-MYC3-WT1-Ab13-(vL-vH)-Myc- |
| complex | | | | BBz-P2A-K13-Flag-T2A-PAC |
| WT1/MHC class I | | 1449 | 3194 | CD8SP-MYC3-WT1-Ab15-(vL-vH)-Myc- |
| complex | | | | BBz-P2A-K13-Flag-T2A-PAC |
| CDH19 | | 1450 | 3195 | CD8SP-CDH19-4B10-(vL-vH)-Myc-BBz- |
| | | | | P2A-K13-Flag-T2A-PAC |
| Folate Receptor beta | | 1451 | 3196 | CD8SP-FRbeta-m923-(vL-vH)-Myc-BBz- |
| | | | | P2A-K13-Flag-T2A-PAC |
| LHR (Luteinizing | | 1452 | 3197 | CD8SP-LHR-8B7-(vL-vH)-Myc-BBz- |
| hormone Receptor) | | | | P2A-K13-Flag-T2A-PAC |
| LHR (Luteinizing | | 1453 | 3198 | CD8SP-LHR-5F4-21-(vL-vH)-Myc-BBz- |
| hormone Receptor) | | | | P2A-K13-Flag-T2A-PAC |
| B7H4 | | 1454 | 3199 | CD8SP-B7H4-hu22Cl0-(vL-vH)-Myc- |
| | | | | BBz-P2A-K13-Flag-T2A-PAC |
| B7H4 | | 1455 | 3200 | CD8SP-B7H4-hu1D11-(vL-vH)-Myc- |
| | | | | BBz-P2A-K13-Flag-T2A-PAC |
| IgE | | 1456 | 3201 | CD8SP-IgE-omalizumab-(vL-vH)-Myc- |
| | | | | BBz-P2A-K13-Flag-T2A-PAC |
| CD23 | | 1457 | 3202 | CD8SP-CD23-p5E8-(vL-vH)-Myc-BBz- |
| | | | | P2A-K13-Flag-T2A-PAC |
| GCC (Guanylyl | | 1458 | 3203 | CD8SP-GCC-5F9-(vL-vH)-Myc-BBz- |
| cyclase C) | | | | P2A-K13-Flag-T2A-PAC |
| GCC (Guanylyl | | 1459 | 3204 | CD8SP-GCC-Ab229-(vL-vH)-Myc-BBz- |
| cyclase C) | | | | P2A-K13-Flag-T2A-PAC |
| CD200R | | 1460 | 3205 | CD8SP-CD200R-huDx182-(vL-vH)-Myc- |
| | | | | BBz-P2A-K13-Flag-T2A-PAC |
| Tn-Muc1 | | 1461 | 3206 | CD8SP-Tn-Muc1-5E5-HL-(vH-vL)-Myc- |
| | | | | BBz-P2A-K13-Flag-T2A-PAC |
| CD22 | | 1462 | 3207 | CD8SP-CD22-5-HL-(vH-vL)-Myc-BBz- |
| | | | | P2A-K13-Flag-T2A-PAC |
| CD22 | | 1463 | 3208 | CD8SP-CD22-10-HL-(vH-vL)-Myc-BBz- |
| | | | | P2A-K13-Flag-T2A-PAC |
| CD22 | | 1464 | 3209 | CD8SP-CD22-31-HL-(vH-vL)-Myc-BBz- |
| | | | | P2A-K13-Flag-T2A-PAC |
| CD22 | | 1465 | 3210 | CD8SP-CD22-53-HL-(vH-vL)-Myc-BBz- |
| | | | | P2A-K13-Flag-T2A-PAC |
| CD22 | | 1466 | 3211 | CD8SP-CD22-65-HL-(vH-vL)-Myc-BBz- |
| | | | | P2A-K13-Flag-T2A-PAC |

TABLE 21
Exemplary CAR constructs containing 41BB costimulatory domain,
CD3z activation domain

| | | SEQ ID | SEQ ID | |
|---|---|---|---|---|
| Target | Clone ID | (DNA) | (PRT) | CONSTRUCT NAME |
| CD19 | 112014- | 1467 | 3212 | CD8SP-FMC63-(vL-vH)-Myc- |
| | A13 | | | BBz-T2A-PAC |
| CD19 | 052616- | 1468 | 3213 | CD8SP-huFMC63-11-(vL-vH)- |
| | T03 | | | Myc-BBz-T2A-PAC |
| CD19 | | 1469 | 3214 | CD8SP-huFMC63-11-N203Q-(vL- |
| | | | | vH)-Myc-BBz-T2A-PAC |
| CD19 | 082815- | 1470 | 3215 | CD8SP-CD19Bu12-(vL-vH)-Myc- |
| | P08 | | | BBz-T2A-PAC |
| CD19 | 062915- | 1471 | 3216 | CD8SP-2-CD19MM-(vL-vH)-Myc- |
| | D03 | | | BBz-T2A-PAC |
| CD19 | | 1472 | 3217 | CD8SP-CD19-4G7-(vL-vH)-Myc- |
| | | | | BBz-T2A-PAC |
| CD19 | | 1473 | 3218 | CD8SP-CD19-MEDI-3649-(vL- |
| | | | | vH)-Myc-BBz-T2A-PAC |
| CD19 | | 1474 | 3219 | CD8SP-CD19-Medrex-24D1-(vL- |
| | | | | vH)-Myc-BBz-T2A-PAC |
| CD19 | | 1475 | 3220 | CD8SP-Ritx-CD19-MOR0028-(vL- |
| | | | | vH)-Myc-BBz-T2A-PAC |
| CD19 | | 1476 | 3221 | CD8SP-CD19-HD37-H2L1-(vL- |
| | | | | vH)-Myc-BBz-T2A-PAC |
| CD19 | | 1477 | 3222 | CD8SP-CD19-huBly3-(vL-vH)- |
| | | | | Myc-BBz-T2A-PAC |
| CD19 | | 1478 | 3223 | CD8SP-CD19-huSJ25C1-(vL-vH)- |
| | | | | Myc-BBz-T2A-PAC |
| CD19 | | 1479 | 3224 | CD8SP-Ritx-CD19-hB4-(vL-vH)- |
| | | | | Myc-BBz-T2A-PAC |
| CD19 | | 1480 | 3225 | CD8SP-CD19-hu-mROO5-1-(vL- |
| | | | | vH)-Myc-BBz-T2A-PAC |
| CD19 | | 1481 | 3226 | CD8SP-CD19-hA19-(vL-vH)-Myc- |
| | | | | BBz-T2A-PAC |
| AFP/MHC class I | | 1482 | 3227 | CD8SP-AFP-61-(vL-vH)-Myc- |
| complex | | | | BBz-T2A-PAC |
| AFP/MHC class I | | 1483 | 3228 | CD8SP-AFP-76-(vL-vH)-Myc- |
| complex | | | | BBz-T2A-PAC |
| AFP/MHC class I | | 1484 | 3229 | CD8SP-AFP-79-(vL-vH)-Myc- |
| complex | | | | BBz-T2A-PAC |
| HIV1-envelop | | 1485 | 3230 | CD8SP-HIV1-N6-(vL-vH)-Myc- |
| glycoprotein | | | | BBz-T2A-PAC |
| ALK (Anaplastic | 052616- | 1486 | 3231 | CD8SP-Alk-48-(vL-vH)-Myc-BBz- |
| Lymphoma Kinase) | C05 | | | T2A-PAC |
| ALK (Anaplastic | | 1487 | 3232 | CD8SP-Alk-58-(vL-vH)-Myc-BBz- |
| Lymphoma Kinase) | | | | T2A-PAC |
| Amyloid | | 1488 | 3233 | SP-Amyloid-158-(vL-vH)-Myc- |
| | | | | BBz-T2A-PAC |
| Biotin | 052616-I05 | 1489 | 3234 | CD8SP-dc-Avidin-Myc-BBz-T2A- |
| | | | | PAC |
| CD45 | | 1490 | 3235 | CD8SP-BC8-CD45-(vL-vH)-Myc- |
| | | | | BBz-T2A-PAC |
| BCMA | | 1491 | 3236 | CD8SP-BCMA-J6M0-(vL-vH)- |
| | | | | Myc-BBz-T2A-PAC |
| BCMA | 123015-J03 | 1492 | 3237 | CD8SP-BCMA-huC12A3-L3H3- |
| | | | | (vL-vH)-Myc-BBz-T2A-PAC |
| BCMA | | 1493 | 3238 | CD8SP-BCMA-ET-40-(vL-vH)- |
| | | | | Myc-BBz-T2A-PAC |
| BCMA | | 1494 | 3239 | CD8SP-BCMA-ET-54-(vL-vH)- |
| | | | | Myc-BBz-T2A-PAC |
| BCMA | | 1495 | 3240 | CD8SP-BCMA-ET-03-(vL-vH)- |
| | | | | Myc-BBz-T2A-PAC |
| BCMA | | 1496 | 3241 | CD8SP-BCMA-huC11.D5.3L1H3- |
| | | | | (vL-vH)-Myc-BBz-T2A-PAC |
| BCMA | | 1497 | 3242 | CD8SP-BCMA-huC13-F12-(vL- |
| | | | | vH)-Myc-BBz-T2A-PAC |
| CCR4 | | 1498 | 3243 | CD8SP-CCR4-humAb1567-(vL- |
| | | | | vH)-Myc-BBz-T2A-PAC |
| HIV1-envelop | | 1499 | 3244 | CD8SP-CD4-ECD-Gly-Ser-Linker- |
| glycoprotein | | | | DC-SIGN-Myc-BBz-T2A-PAC |
| CD5 | 031416- | 1500 | 3245 | CD8SP-CD5-9-(vL-vH)-Myc-BBz- |
| | B03 | | | T2A-PAC |
| CD5 | 031416- | 1501 | 3246 | CD8SP-CD5-18-(vL-vH)-Myc- |
| | A04 | | | BBz-T2A-PAC |
| Ig Fc | | 1502 | 3247 | CD8SP-CD16A-V158-ECD-v2- |
| | | | | Myc-BBz-T2A-PAC |
| Ig Fc | | 1503 | 3248 | CD8SP-CD16A-V158-ECD-v1- |
| | | | | Myc-BBz-T2A-PAC |
| CD20 | 081115- | 1504 | 3249 | CD8SP-CD20-2F2-(vL-vH)-Myc- |
| | Y02 and | | | BBz-T2A-PAC |
| | 081115- | | | |
| | B01 | | | |
| CD20 | 111815- | 1505 | 3250 | CD8SP-CD20-GA101-(vL-vH)- |
| | A03 | | | Myc-BBz-T2A-PAC |
| CD20 | | 1506 | 3251 | CD8SP-CD20-Leu16-(vL-vH)- |
| | | | | Myc-BBz-T2A-PAC |
| CD20 | | 1507 | 3252 | CD8SP-CD20-11B8-(vL-vH)-Myc- |
| | | | | BBz-T2A-PAC |
| CD20 | | 1508 | 3253 | CD8SP-CD20-2C6-(vL-vH)-Myc- |
| | | | | BBz-T2A-PAC |
| CD20 | | 1509 | 3254 | CD8SP-CD20-2H7-(vL-vH)-Myc- |
| | | | | BBz-T2A-PAC |
| CD20 | | 1510 | 3255 | CD8SP-CD20-hA20-(vL-vH)-Myc- |
| | | | | BBz-T2A-PAC |
| CD20 | | 1511 | 3256 | CD8SP-CD20-BM-CA-1925-v4- |
| | | | | (vL-vH)-Myc-BBz-T2A-PAC |
| CD20 | | 1512 | 3257 | CD8SP-CD20-Ubli-v4-(vL-vH)- |
| | | | | Myc-BBz-T2A-PAC |
| CD20 | | 1513 | 3258 | CD8SP-CD20-2H7-(vL-vH)-Myc- |
| | | | | BBz-T2A-PAC |
| CD20 | | 1514 | 3259 | CD8SP-CD20-h1F5-(vL-vH)-Myc- |
| | | | | BBz-T2A-PAC |
| CD20 | | 1515 | 3260 | CD8SP-CD20-7D8-(vL-vH)-Myc- |
| | | | | BBz-T2A-PAC |
| CD20 | | 1516 | 3261 | CD8SP-CD20-AME-33-(vL-vH)- |
| | | | | Myc-BBz-T2A-PAC |
| CD22 | 052616- | 1517 | 3262 | CD8SP-CD22-h10F4v2-(vL-vH)- |
| | H04 & | | | Myc-BBz-T2A-PAC |
| | 052516-I07 | | | |
| CD22 | 052316- | 1518 | 3263 | CD8SP-CD22- |
| | H07 | | | H22Rhov2ACDRKA-(vL-vH)- |
| | | | | Myc-BBz-T2A-PAC |
| CD22 | 091515- | 1519 | 3264 | CD8SP-CD22-m971-(vL-vH)-Myc- |
| | A02 | | | BBz-T2A-PAC |
| CD22 | | 1520 | 3265 | CD8SP-CD22-m971-HL-(vH-vL)- |
| | | | | Myc-BBz-T2A-PAC |
| CD30 | | 1521 | 3266 | CD8SP-CD30-5F11-(vL-vH)-Myc- |
| | | | | BBz-T2A-PAC |
| CD30 | 012216- | 1522 | 3267 | CD8SP-CD30-Ac10-(vL-vH)-Myc- |
| | H04 | | | BBz-T2A-PAC |
| CD32 | 060916- | 1523 | 3268 | CD8SP-CD32-Med9-(vL-vH)-Myc- |
| | A02 | | | BBz-T2A-PAC |
| CD33 | | 1524 | 3269 | CD8SP-CD33-AF5-(vL-vH)-Myc- |
| | | | | BBz-T2A-PAC |
| CD33 | 111815- | 1525 | 3270 | CD8SP-CD33-huMyc9-(vL-vH)- |
| | C07 | | | Myc-BBz-T2A-PAC |
| CD33 | | 1526 | 3271 | CD8SP-CD33-Boehr2800308-(vL- |
| | | | | vH)-Myc-BBz-T2A-PAC |
| CD33 | | 1527 | 3272 | CD8SP-CD33-Him3-4-(vL-vH)- |
| | | | | Myc-BBz-T2A-PAC |
| CD33 | | 1528 | 3273 | CD8SP-CD33-SGNh2H12-(vL- |
| | | | | vH)-Myc-BBz-T2A-PAC |
| CD33 | | 1529 | 3274 | CD8SP-CD33-15G15-33-(vL-vH)- |
| | | | | Myc-BBz-T2A-PAC |
| CD33 | | 1530 | 3275 | CD8SP-CD33-33H4-(vL-vH)-Myc- |
| | | | | BBz-T2A-PAC |
| CD33 | | 1531 | 3276 | CD8SP-CD33-9C3-2-(vL-vH)- |
| | | | | Myc-BBz-T2A-PAC |
| CD34 | 052316-I03 | 1532 | 3277 | CD8SP-CD34-hu4C7-(vL-vH)- |
| | & 052616- | | | Myc-BBz-T2A-PAC |
| | H06 | | | |
| CD44v6 | | 1533 | 3278 | CD8SP-CD44v6-Biwa8-(vL-vH)- |
| | | | | Myc-BBz-T2A-PAC |
| CD70 | | 1534 | 3279 | CD8SP-CD70-h1F6-(vL-vH)-Myc- |
| | | | | BBz-T2A-PAC |
| CD79b | 111815- | 1535 | 3280 | CD8SP-CD79b-2F2-(vL-vH)-Myc- |
| | B04 | | | BBz-T2A-PAC |
| CD79b | | 1536 | 3281 | CD8SP-huMA79bv28-(vL-vH)- |
| | | | | Myc-BBz-T2A-PAC |
| CD99 | | 1537 | 3282 | CD8SP-CD99-hu12E7-(vL-vH)- |
| | | | | Myc-BBz-T2A-PAC |
| CD123 | 081115- | 1538 | 3283 | CD8SP-CD123-CSL362-(vL-vH)- |
| | X01 | | | Myc-BBz-T2A-PAC |
| CD123 | | 1539 | 3284 | CD8SP-CD123-1172-(vL-vH)- |
| | | | | Myc-BBz-T2A-PAC |
| CD123 | | 1540 | 3285 | CD8SP-CD123-DART-1-(vL-vH)- |
| | | | | Myc-BBz-T2A-PAC |
| CD123 | | 1541 | 3286 | CD8SP-CD123-DART-2-(vL-vH)- |
| | | | | Myc-BBz-T2A-PAC |
| CD123 | | 1542 | 3287 | CD8SP-CD123-I3RB18-(vL-vH)- |
| | | | | Myc-BBz-T2A-PAC |
| CD123 | | 1543 | 3288 | CD8SP-CD123-hu3E3-(vL-vH)- |
| | | | | Myc-BBz-T2A-PAC |
| CD123 | | 1544 | 3289 | CD8SP-CD123-9F6-(vL-vH)-Myc- |
| | | | | BBz-T2A-PAC |
| CD123 | | 1545 | 3290 | CD8SP-CD123-I3RB2-(vL-vH)- |
| | | | | Myc-BBz-T2A-PAC |
| CD123 | | 1546 | 3291 | CD8SP-CD123-1176-(vL-vH)- |
| | | | | Myc-BBz-T2A-PAC |
| CD123 | | 1547 | 3292 | CD8SP-Ritx2-CD123-8B11-(vL- |
| | | | | vH)-Myc-BBz-T2A-PAC |
| CD123 | | 1548 | 3293 | CD8SP-CD123-2B8-(vL-vH)-Myc- |
| | | | | BBz-T2A-PAC |
| CD123 | | 1549 | 3294 | CD8SP-CD123-9D7-(vL-vH)-Myc- |
| | | | | BBz-T2A-PAC |
| CD123 | | 1550 | 3295 | CD8SP-CD123-3B10-(vL-vH)- |
| | | | | Myc-BBz-T2A-PAC |
| CD138 | 041715- | 1551 | 3296 | CD8SP-CD138-(vL-vH)-Myc-BBz- |
| | D08 | | | T2A-PAC |
| CD179b | | 1552 | 3297 | CD8SP-CD179b-(vL-vH)-Myc- |
| | | | | BBz-T2A-PAC |
| CD276 | 052316- | 1553 | 3298 | CD8SP-CD276-17-(vL-vH)-Myc- |
| | C05 | | | BBz-T2A-PAC |
| CD324 | 052516- | 1554 | 3299 | CD8SP-CD32410-6-(vL-vH)-Myc- |
| | B02 | | | BBz-T2A-PAC |
| CD324 | 052516- | 1555 | 3300 | CD8SP-CD324-hSC10-17-(vL- |
| | A07 | | | vH)-Myc-BBz-T2A-PAC |
| CDH6 | | 1556 | 3301 | CD8SP-CDH6-NOV710-(vL-vH)- |
| | | | | Myc-BBz-T2A-PAC |
| CDH6 | | 1557 | 3302 | CD8SP-CDH6-NOV712-(vL-vH)- |
| | | | | Myc-BBz-T2A-PAC |
| CDH17 | | 1558 | 3303 | CD8SP-CDH17-PTA001A4-(vL- |
| | | | | vH)-Myc-BBz-T2A-PAC |
| CDH19 | | 1559 | 3304 | CD8SP-CDH19-16A4-(vL-vH)- |
| | | | | Myc-BBz-T2A-PAC |
| EGFR | | 1560 | 3305 | CD8SP-Cetuximab-(vL-vH)-Myc- |
| | | | | BBz-T2A-PAC |
| CLEC5A | | 1561 | 3306 | CD8SP-CLEC5A-8H8F5-(vL-vH)- |
| | | | | Myc-BBz-T2A-PAC |
| CLEC5A | 052316- | 1562 | 3307 | CD8SP-CLEC5A-3E12A2-(vL- |
| | G04 | | | vH)-Myc-BBz-T2A-PAC |
| GR/LHR (Gonadotropin | | 1563 | 3308 | SP-CGHb-Gly-Ser-Linker-CGHa- |
| Receptor) | | | | Myc-BBz-T2A-PAC |
| CLL1 | 110215- | 1564 | 3309 | CD8SP-CLL1-M26-(vL-vH)-Myc- |
| | H06 | | | BBz-T2A-PAC |
| CLL1 | 110215-I08 | 1565 | 3310 | CD8SP-CLL1-M32-(vL-vH)-Myc- |
| | | | | BBz-T2A-PAC |
| CLL1 | | 1566 | 3311 | CD8SP-CLL1-21C9-L2H3-(vL- |
| | | | | vH)-Myc-BBz-T2A-PAC |
| CLL1 | | 1567 | 3312 | CD8SP-CLL1-6E7L4H1e-(vL-vH)- |
| | | | | Myc-BBz-T2A-PAC |
| CLL1 | | 1568 | 3313 | CD8SP-CLL1-hu1075-v1-(vL-vH)- |
| | | | | Myc-BBz-T2A-PAC |
| CLL1 | | 1569 | 3314 | CD8SP-CLL1-hu1075-v2-(vL-vH)- |
| | | | | Myc-BBz-T2A-PAC |
| CMVpp65/MHC class I | | 1570 | 3315 | CD8SP-CMVpp65-F5-(vL-vH)- |
| complex | | | | Myc-BBz-T2A-PAC |
| CS1 (SLAMF7) | | 1571 | 3316 | CD8SP-CS1-huLuc63-(vL-vH)- |
| | | | | Myc-BBz-T2A-PAC |
| CS1 (SLAMF7) | 052616- | 1572 | 3317 | CD8SP-CS1-HuLuc64-(vL-vH)- |
| | U05 | | | Myc-BBz-T2A-PAC |
| CS1 (SLAMF7) | | 1573 | 3318 | CD8SP-CS1-Luc90-(vL-vH)-Myc- |
| | | | | BBz-T2A-PAC |
| CS1 (SLAMF7) | | 1574 | 3319 | CD8SP-CS1-PDL241-(vL-vH)- |
| | | | | Myc-BBz-T2A-PAC |
| CS1 (SLAMF7) | | 1575 | 3320 | CD8SP-CS1-Hu27A-(vL-vH)-Myc- |
| | | | | BBz-T2A-PAC |
| CS1 (SLAMF7) | | 1576 | 3321 | CD8SP-CS1Hu34C3-(vL-vH)- |
| | | | | Myc-BBz-T2A-PAC |
| CS1 (SLAMF7) | | 1577 | 3322 | CD8SP-CS1-Hu31-D2-(vL-vH)- |
| | | | | Myc-BBz-T2A-PAC |
| CS1(SLAMF7) | | 1578 | 3323 | CD8SP-CS1-Luc34-(vL-vH)-Myc- |
| | | | | BBz-T2A-PAC |
| CS1 (SLAMF7) | | 1579 | 3324 | CD8SP-CS1-LucX2-(vL-vH)-Myc- |
| | | | | BBz-T2A-PAC |
| CSF2RA | 052616- | 1580 | 3325 | CD8SP-CSF2RA-Ab6-(vL-vH)- |
| | G03 | | | Myc-BBz-T2A-PAC |
| CSF2RA | | 1581 | 3326 | CD8SP-CSF2RA-Ab1-(vL-vH)- |
| | | | | Myc-BBz-T2A-PAC |
| CXCR4 and CD123 | | 1582 | 3327 | CD8SP-CXCR4-1-vHH-Gly-Ser- |
| | | | | Linker-CD123-1-vHH-Myc-BBz- |
| | | | | T2A-PAC |
| CXCR4 and CD123 | | 1583 | 3328 | CD8SP-CXCR4-2-VHH-Gly-Ser- |
| | | | | Linker-CD123-2-VHH-Myc-BBz- |
| | | | | T2A-PAC |
| DLL3 (Delta Like | 052516- | 1584 | 3329 | CD8SP-DLL3-hSC16-13-(vL-vH)- |
| Ligand 3) | D07 | | | Myc-BBz-T2A-PAC |
| DLL3 (Delta Like | 052516- | 1585 | 3330 | CD8SP-DLL3-hSC16-56-(vL-vH)- |
| Ligand 3) | C07 | | | Myc-BBz-T2A-PAC |
| EBNA3c/MHC class I | | 1586 | 3331 | CD8SP-EBNA3c-315-(vL-vH)- |
| complex | | | | Myc-BBz-T2A-PAC |
| EBV-gp350 | | 1587 | 3332 | CD8SP-EBV-gp350-(vL-vH)-Myc- |
| | | | | BBz-T2A-PAC |
| EGFR | | 1588 | 3333 | CD8SP-EGFR1-vHH-Myc-BBz- |
| | | | | T2A-PAC |
| EGFR & CEA | | 1589 | 3334 | CD8SP-EGFR1-vHH-Gly-Ser- |
| | | | | Linker-CEA1-vHH-Myc-BBz-T2A- |
| | | | | PAC |
| EGFR & CEA | | 1590 | 3335 | CD8SP-EGFR33-vHH-Gly-Ser- |
| | | | | Linker-CEA5-vHH-Myc-BBz-T2A- |
| | | | | PAC |
| EGFRvIII | 081115- | 1591 | 3336 | CD8SP-EGFRvIII-139-(vL-vH)- |
| | A02 | | | Myc-BBz-T2A-PAC |
| EGFRvIII | 081115- | 1592 | 3337 | CD8SP-EGFRvIII-2173-(vL-vH)- |
| | E01 | | | Myc-BBz-T2A-PAC |
| EpCam1 | | 1593 | 3338 | CD8SP-Epcam1-MM1-(vL-vH)- |
| | | | | Myc-BBz-T2A-PAC |
| EpCam1 | 111915- | 1594 | 3339 | CD8SP-Epcam1-D5K5-(vL-vH)- |
| | E05 & | | | Myc-BBz-T2A-PAC |
| | 112015- | | | |
| | C04 | | | |
| FLT3 | | 1595 | 3340 | CD8SP-FLT3-NC7-(vL-vH)-Myc- |
| | | | | BBz-T2A-PAC |
| FITC | 052316- | 1596 | 3341 | CD8SP-FITC-(vL-vH)-Myc-BBz- |
| | B01 | | | T2A-PAC |
| FITC | | 1597 | 3342 | CD8SP-FITC-4M-53-(vL-vH)- |
| | | | | Myc-BBz-T2A-PAC |
| FITC | | 1598 | 3343 | CD8SP-FITC-E2-HL-(vH-vL)- |
| | | | | Myc-BBz-T2A-PAC |
| Influenza A HA | | 1599 | 3344 | CD8SP-FLU-MEDI-8852-(vL-vH)- |
| | | | | Myc-BBz-T2A-PAC |
| FR1 (Folate Receptor | 101215- | 1600 | 3345 | CD8SP-FR1-huMov19-(vL-vH)- |
| alpha) | A01 | | | Myc-BBz-T2A-PAC |
| FSHR (Follicle | | 1601 | 3346 | CD8SP-FSHb-Gly-Ser-Linker- |
| Stimulating Hormone | | | | CGHa-Myc-BBz-T2A-PAC |
| Receptor) | | | | |
| GAD (Glutamic Acid | | 1602 | 3347 | CD8SP-GAD-G3H8-(vL-vH)-Myc- |
| Decarboxylase)/MHC | | | | BBz-T2A-PAC |
| class I complex | | | | |
| GD2 | 100515 | 1603 | 3348 | CD8SP-GD2-hu14-18-(vL-vH)- |
| | F01 | | | Myc-BBz-T2A-PAC |
| GD2 | 052516- | 1604 | 3349 | CD8SP-GD2-hu3F8-(vL-vH)-Myc- |
| | O08 | | | BBz-T2A-PAC |
| GD3 | 052316- | 1605 | 3350 | CD8SP-GD3-KM-641-(vL-vH)- |
| | A06 | | | Myc-BBz-T2A-PAC |
| GFRa4 (GDNF Family | | 1606 | 3351 | CD8SP-GFRAlpha4-P4-6-(vL-vH)- |
| Receptor Alpha 4) | | | | Myc-BBz-T2A-PAC |
| GFRa4 (GDNF Family | | 1607 | 3352 | CD8SP-GFRa4-P4-10-(vL-vH)- |
| Receptor Alpha 4) | | | | Myc-BBz-T2A-PAC |
| GM1 | | 1608 | 3353 | CD8SP-GM1-5B2-(vL-vH)-Myc- |
| | | | | BBz-T2A-PAC |
| GM1 | | 1609 | 3354 | CD8SP-GM1-7E5-(vL-vH)-Myc- |
| | | | | BBz-T2A-PAC |
| GPRC5D (G-protein | | 1610 | 3355 | CD8SP-GPRC5D-ET150-5-(vL- |
| coupled receptor family | | | | vH)-Myc-BBz-T2A-PAC |
| C group 5 member D) | | | | |
| GPRC5D | | 1611 | 3356 | CD8SP-GPRC5D-ET150-18-(vL- |
| | | | | vH)-Myc-BBz-T2A-PAC |
| GPRC5D | | 1612 | 3357 | CD8SP-GPRC5D-ET150-1-(vL- |
| | | | | vH)-Myc-BBz-T2A-PAC |
| GPRC5D | | 1613 | 3358 | CD8SP-GPRC5D-ET150-2-(vL- |
| | | | | vH)-Myc-BBz-T2A-PAC |
| gp100/MHC class I | | 1614 | 3359 | CD8SP-gp100-(vL-vH)-Myc-BBz- |
| complex | | | | T2A-PAC |
| gp100/MHC class I | | 1615 | 3360 | CD8SP-gp100-G2D12-(vL-vH)- |
| complex | | | | Myc-BBz-T2A-PAC |
| GPC3 (Glypican 3) | | 1616 | 3361 | CD8SP-GPC3-4E5-(vL-vH)-Myc- |
| | | | | BBz-T2A-PAC |
| gpNMB (Glycoprotein | | 1617 | 3362 | CD8SP-gpNMB-115-(vL-vH)- |
| Nmb) | | | | Myc-BBz-T2A-PAC |
| GRP78 | | 1618 | 3363 | CD8SP-GRP78-GC18-(vL-vH)- |
| | | | | Myc-BBz-T2A-PAC |
| Her2 | | 1619 | 3364 | CD8SP-Her2-5F7-vHH-Myc-BBz- |
| | | | | T2A-PAC |
| Her2 | | 1620 | 3365 | IgHSP-Her2-Affi-Myc-BBz-T2A- |
| | | | | PAC |
| Her2 | | 1621 | 3366 | CD8SP-Her2-1-Darpin-Myc-BBz- |
| | | | | T2A-PAC |
| Her2 | | 1622 | 3367 | IgHSP-Her2-2-Darpin-Myc-BBz- |
| | | | | T2A-PAC |
| Her2 | | 1623 | 3368 | CD8SP-Her2-5F7-vHH-Gly-Ser- |
| | | | | Linker-Her2-47D5-vHH-Myc-BBz- |
| | | | | T2A-PAC |
| Her2 | | 1624 | 3369 | CD8SP-Her2-Hu4D5-(vL-vH)- |
| | | | | Myc-BBz-T2A-PAC |
| Her3 | | 1625 | 3370 | CD8SP-Her3-17B05So-vHH-Myc- |
| | | | | BBz-T2A-PAC |
| Her3 | | 1626 | 3371 | CD8SP-Her3-Affi-Myc-BBz-T2A- |
| | | | | PAC |
| Her2 and Her3 | 041316-B06 | 1627 | 3372 | CD8SP-Her3-17B05So-vHH-Gly- |
| | | | | Ser-Linker-Her2-2D3-vHH-Myc- |
| | | | | BBz-T2A-PAC |
| HIV1-gag/MHC class I | | 1628 | 3373 | CD8SP-HIV1-E5-(vL-vH)-Myc- |
| complex | | | | BBz-T2A-PAC |
| HIV1-envelop | | 1629 | 3374 | CD8SP-HIV1-3BNC117-(vL-vH)- |
| glycoprotein | | | | Myc-BBz-T2A-PAC |
| HIV1-envelop | | 1630 | 3375 | CD8SP-HIV1-PGT-128-(vL-vH)- |
| glycoprotein | | | | Myc-BBz-T2A-PAC |
| HIV1-envelop | | 1631 | 3376 | CD8SP-HIV1-VR-C01-(vL-vH)- |
| glycoprotein | | | | Myc-BBz-T2A-PAC |
| HIV1-envelop | | 1632 | 3377 | CD8SP-HIV1-X5-(vL-vH)-Myc- |
| glycoprotein | | | | BBz-T2A-PAC |
| HLA-A2 | | 1633 | 3378 | CD8SP-HLA-A2-3PB2-(vL-vH)- |
| | | | | Myc-BBz-T2A-PAC |
| HMW-MAA | 060116- | 1634 | 3379 | CD8SP-HMW-MAA-hIND-(vL- |
| | B02 | | | vH)-Myc-BBz-T2A-PAC |
| HPV16-E7/MHC class I | 1635 | 3380 | | CD8SP-HPV16-7-8-(vL-vH)-Myc- |
| complex | | | | BBz-T2A-PAC |
| HPV16-E7/MHC class I | | 1636 | 3381 | CD8SP-HPV16-2-(vL-vH)-Myc- |
| complex | | | | BBz-T2A-PAC |
| HTLV1-TAX/MHC | | 1637 | 3382 | CD8SP-HTLV-TAX-T3F2-(vL- |
| class I complex | | | | vH)-Myc-BBz-T2A-PAC |
| HTLV1-TAX/MHC | | 1638 | 3383 | CD8SP-HTLV-TAX-T3E3-(vL- |
| class I complex | | | | vH)-Myc-BBz-T2A-PAC |
| IL11Ra | 052316- | 1639 | 3384 | CD8SP-IL11Ra-8E2-Ts107-(vL- |
| | D02 | | | vH)-Myc-BBz-T2A-PAC |
| IL6Ra | | 1640 | 3385 | IgHSP-IL6R-304-vHH-Myc-BBz- |
| | | | | T2A-PAC |
| IL13Ra2 | 052616- | 1641 | 3386 | CD8SP-IL13Ra2-hu107-(vL-vH)- |
| | B03 | | | Myc-BBz-T2A-PAC |
| IL13Ra2 | | 1642 | 3387 | CD8SP-IL13Ra2-Hu108-(vL-vH)- |
| | | | | Myc-BBz-T2A-PAC |
| KSHV-K8.1 | 042315- | 1643 | 3388 | CD8SP-KSHV-4C3-(vL-vH)-Myc- |
| | N01 | | | BBz-T2A-PAC |
| LAMP1 (Lysosomal- | | 1644 | 3389 | CD8SP-LAMP1-humab1-2-(vL- |
| associated membrane | | | | vH)-Myc-BBz-T2A-PAC |
| protein 1) | | | | |
| LAMP1 (Lysosomal- | | 1645 | 3390 | CD8SP-LAMP1-Mb4-(vL-vH)- |
| associated membrane | | | | Myc-BBz-T2A-PAC |
| protein 1) | | | | |
| LewisY | | 1646 | 3391 | CD8SP-LewisY-huS193-(vL-vH)- |
| | | | | Myc-BBz-T2A-PAC |
| L1CAM | 052516- | 1647 | 3392 | CD8SP-L1CAM-9-3-HU3-(vL- |
| | Q07 | | | vH)-Myc-BBz-T2A-PAC |
| LHR | | 1648 | 3393 | SP-LHb-Gly-Ser-Linker-CGHa- |
| | | | | Myc-BBz-T2A-PAC |
| Lym1 | | 1649 | 3394 | CD8SP-Lym1-(vL-vH)-Myc-BBz- |
| | | | | T2A-PAC |
| Lym2 | | 1650 | 3395 | CD8SP-Lym2-(vL-vH)-Myc-BBz- |
| | | | | T2A-PAC |
| CD79b | | 1651 | 3396 | CD8SP-huMA79bv28-(vL-vH)- |
| | | | | Myc-BBz-T2A-PAC |
| MART1/MHC class I | | 1652 | 3397 | CD8SP-MART1-CAG10-(vL-vH)- |
| complex | | | | Myc-BBz-T2A-PAC |
| MART1/MHC class I | | 1653 | 3398 | CD8SP-MART1-CLA12-(vL-vH)- |
| complex | | | | Myc-BBz-T2A-PAC |
| Mesothelin | 052516- | 1654 | 3399 | CD8SP-Mesothelin-m912-(vL-vH)- |
| | P07 | | | Myc-BBz-T2A-PAC |
| cMet | | 1655 | 3400 | CD8SP-cMet-171-vHH-Myc-BBz- |
| | | | | T2A-PAC |
| cMet and Her3 | 041316- | 1656 | 3401 | CD8SP-cMET-171-vHH-Gly-Ser- |
| | F06 | | | Linker-Her3-21F06-vHH-Myc- |
| | | | | BBz-T2A-PAC |
| MPL (Thrombopoietin | 022415- | 1657 | 3402 | CD8SP-MPL-175-(vL-vH)-Myc- |
| receptor) | Q05 | | | BBz-T2A-PAC |
| MPL (Thrombopoietin | | 1658 | 3403 | CD8SP-MPL-161-(vL-vH)-Myc- |
| receptor) | | | | BBz-T2A-PAC |
| MPL (Thrombopoietin | | 1659 | 3404 | CD8SP-MPL-161-HL-(vH-vL)- |
| receptor) | | | | Myc-BBz-T2A-PAC |
| MPL (Thrombopoietin | 041316- | 1660 | 3405 | CD8SP-2-MPL-111-(vL-vH)-Myc- |
| receptor) | A03 | | | BBz-T2A-PAC |
| MPL (Thrombopoietin | | 1661 | 3406 | CD8SP-MPL-178-(vL-vH)-Myc- |
| receptor) | | | | BBz-T2A-PAC |
| MPL (Thrombopoietin | | 1662 | 3407 | CD8SP-MPL-AB317-(vL-vH)- |
| receptor) | | | | Myc-BBz-T2A-PAC |
| MPL (Thrombopoietin | | 1663 | 3408 | CD8SP-MPL-12E10-(vL-vH)-Myc- |
| receptor) | | | | BBz-T2A-PAC |
| MPL (Thrombopoietin | | 1664 | 3409 | CD8SP-MPL-huVB22Bw5-(vL- |
| receptor) | | | | vH)-Myc-BBz-T2A-PAC |
| Muc1/MHC class I | 052316 | 1665 | 3410 | CD8SP-Muc1-D6-M3B8-(vL-vH)- |
| complex | A02 | | | Myc-BBz-T2A-PAC |
| Muc1/MHC class I | | 1666 | 3411 | CD8SP-MUC1-D6-M3A1-(vL- |
| complex | | | | vH)-Myc-BBz-T2A-PAC |
| Muc16 | 111915- | 1667 | 3412 | CD8SP-Muc16-4H11-(vL-vH)- |
| | F04 | | | Myc-BBz-T2A-PAC |
| EGFR | | 1668 | 3413 | CD8SP-Nimotuzumab-(vL-vH)- |
| | | | | Myc-BBz-T2A-PAC |
| NKG2D Ligand | | 1669 | 3414 | CD8SP-NKG2D-(GGGGS- |
| | | | | GGGGD)-Myc-BBz-T2A-PAC |
| NKG2D | | 1670 | 3415 | CD8SP-NKG2D-MS-(vL-vH)- |
| | | | | Myc-BBz-T2A-PAC |
| NY-BR1 | | 1671 | 3416 | CD8SP-NYBR1-(vL-vH)-Myc- |
| | | | | BBz-T2A-PAC |
| NY-ESO/MHC class I | | 1672 | 3417 | CD8SP-NYESO-T1-(vL-vH)-Myc- |
| complex | | | | BBz-T2A-PAC |
| NY-ESO/MHC class I | | 1673 | 3418 | CD8SP-NYESO-T2-(vL-vH)-Myc- |
| complex | | | | BBz-T2A-PAC |
| PD1 ligand (e.g., PDL1) | | 1674 | 3419 | CD8SP-PD1-ECD-Myc-BBz-T2A- |
| | | | | PAC |
| PDL1 | 100516-J03 | 1675 | 3420 | CD8SP-PDL1-Atezoli-(vL-vH)- |
| | | | | Myc-BBz-T2A-PAC |
| PDL1 | 100516- | 1676 | 3421 | CD8SP-PDL1-SP142-(vL-vH)- |
| | K03 | | | Myc-BBz-T2A-PAC |
| PDL1 | | 1677 | 3422 | CD8SP-PDL1-10A5-(vL-vH)-Myc- |
| | | | | BBz-T2A-PAC |
| PSCA (Prostate stem cell | | 1678 | 3423 | CD8SP-PSCA-Ha14-121-(vL-vH)- |
| antigen) | | | | Myc-BBz-T2A-PAC |
| PSCA (Prostate stem cell | | 1679 | 3424 | CD8SP-PSCA-Ha14-117-(vL-vH)- |
| antigen) | | | | Myc-BBz-T2A-PAC |
| PR1/MHC class I | 052516- | 1680 | 3425 | CD8SP-PR1-(vL-vH)-Myc-BBz- |
| complex | K07 | | | T2A-PAC |
| PSMA (Prostate Specific | 052516- | 1681 | 3426 | CD8SP-PSMA-006-(vL-vH)-Myc- |
| Membrane Antigen) | N07 | | | BBz-T2A-PAC |
| PSMA (Prostate Specific | 111815- | 1682 | 3427 | CD8SP-PSMA-J591-(vL-vH)-Myc- |
| Membrane Antigen) | E06 | | | BBz-T2A-PAC |
| PTK7 (Tyrosine-protein | 052516- | 1683 | 3428 | CD8SP-PTK7-hSC6-23-(vL-vH)- |
| kinase-like 7) | F07 | | | Myc-BBz-T2A-PAC |
| PTK7 (Tyrosine-protein | 052516- | 1684 | 3429 | CD8SP-PTK76-10-2-(vL-vH)-Myc- |
| kinase-like 7) | E07 | | | BBz-T2A-PAC |
| ROR1 | 082815- | 1685 | 3430 | CD8SP-ROR1-4A5-(vL-vH)-Myc- |
| | M05 | | | BBz-T2A-PAC |
| ROR1 | 082815- | 1686 | 3431 | CD8SP-ROR1-4C10-(vL-vH)-Myc- |
| | N06 | | | BBz-T2A-PAC |
| Mesothelin | | 1687 | 3432 | CD8SP-SD1-vHH-Gly-Ser-Linker- |
| | | | | SD2-vHH-Myc-BBz-T2A-PAC |
| SLea | | 1688 | 3433 | CD8SP-SLea-7E3-(vL-vH)-Myc- |
| | | | | BBz-T2A-PAC |
| SLea | | 1689 | 3434 | CD8SP-SLea-5B1-(vL-vH)-Myc- |
| | | | | BBz-T2A-PAC |
| SSEA4 (stage-specific | | 1690 | 3435 | CD8SP-SSEA4-(vL-vH)-Myc-BBz- |
| embryonic antigen 4) | | | | T2A-PAC |
| TCRB1 (TCR beta 1 | | 1691 | 3436 | CD8SP-TCRB1-CP01-E09-(vL- |
| constant chain) | | | | vH)-Myc-BBz-T2A-PAC |
| TCRB1 (TCR beta 1 | 050516- | 1692 | 3437 | CD8SP-TCRB1-Jovil-(vL-vH)- |
| constant chain) | A07 | | | Myc-BBz-T2A-PAC |
| TCRB2 (TCR beta 2 | 050516- | 1693 | 3438 | CD8SP-TCRB2-CP01-D05-(vL- |
| constant chain) | C07 | | | vH)-Myc-BBz-T2A-PAC |
| TCRB2 (TCR beta 2 | 050516- | 1694 | 3439 | CD8SP-TCRB2-CP01-E05-(vL- |
| constant chain) | B05 | | | vH)-Myc-BBz-T2A-PAC |
| TCRgd (TCR | | 1695 | 3440 | CD8SP-TCRgd-G5-4-(vL-vH)- |
| gamma/delta) | | | | Myc-BBz-T2A-PAC |
| hTERT/MHC class I | 051816- | 1696 | 3441 | CD8SP-TERT-4A9-T540-(vL-vH)- |
| complex | H02 | | | Myc-BBz-T2A-PAC |
| hTERT/MHC class I | | 1697 | 3442 | CD8SP-TERT-3G3-T865-(vL-vH)- |
| complex | | | | Myc-BBz-T2A-PAC |
| Tissue Factor-1 | | 1698 | 3443 | CD8SP-TGFBR2-Ab1-(vL-vH)- |
| | | | | Myc-BBz-T2A-PAC |
| TGFBR2 | | 1699 | 3444 | CD8SP-TF1-98-(vL-vH)-Myc- |
| | | | | BBz-T2A-PAC |
| TIM1/HAVCR | | 1700 | 3445 | CD8SP-TIM1-HVCR1-270-2-(vL- |
| | | | | vH)-Myc-BBz-T2A-PAC |
| TIM1/HAVCR | | 1701 | 3446 | CD8SP-TIM1-HVCR1-ARD5-(vL- |
| | | | | vH)-Myc-BBz-T2A-PAC |
| TnAg | 052616- | 1702 | 3447 | CD8SP-TnAg-(vL-vH)-Myc-BBz- |
| | F06 | | | T2A-PAC |
| Tn-Muc1 | | 1703 | 3448 | CD8SP-TnMuc1-hu5E5-RHA8- |
| | | | | RKA-2-(vL-vH)-Myc-BBz-T2A- |
| | | | | PAC |
| MPL (Thrombopoietin | | 1704 | 3449 | CD8SP-hTPO-Myc-BBz-T2A-PAC |
| receptor) | | | | |
| TROP2 (Trophoblast | | 1705 | 3450 | CD8SP-TROP2-ARA47-HV3KV3- |
| cell-surface antigen-2) | | | | (vL-vH)-Myc-BBz-T2A-PAC |
| TROP2 (Trophoblast | | 1706 | 3451 | CD8SP-TROP2-h7E6-SVG-(vL- |
| cell-surface antigen-2) | | | | vH)-Myc-BBz-T2A-PAC |
| TSHR (Thyrotropin | | 1707 | 3452 | SP-TSHb-Gly-Ser-Linker-CGHa- |
| receptor) | | | | Myc-BBz-T2A-PAC |
| TSHR (Thyrotropin | | 1708 | 3453 | CD8SP-TSHR-K1-70-(vL-vH)- |
| receptor) | | | | Myc-BBz-T2A-PAC |
| TSHR (Thyrotropin | 052616- | 1709 | 3454 | CD8SP-TSHR-KB1-(vL-vH)-Myc- |
| receptor) | E05 | | | BBz-T2A-PAC |
| TSHR (Thyrotropin | | 1710 | 3455 | CD8SP-TSHR-5C9-(vL-vH)-Myc- |
| receptor) | | | | BBz-T2A-PAC |
| TSLPR (thymic stromal | 052516- | 1711 | 3456 | CD8SP-TSLPR-(vL-vH)-Myc- |
| lymphopoietin receptor) | L07 | | | BBz-T2A-PAC |
| Tyrosinase/MHC class I | 052516- | 1712 | 3457 | CD8SP-Tyros-B2-(vL-vH)-Myc- |
| complex | D06 | | | BBz-T2A-PAC |
| Tyrosinase/MHC class I | | 1713 | 3458 | CD8SP-Tyros-MC1-(vL-vH)-Myc- |
| complex | | | | BBz-T2A-PAC |
| Tyrosinase/MHC class I | | 1714 | 3459 | CD8SP-Tyros-TA2-(vL-vH)-Myc- |
| complex | | | | BBz-T2A-PAC |
| VEGFR3 | | 1715 | 3460 | CD8SP-VEGFR3-Ab1-(vL-vH)- |
| | | | | Myc-BBz-T2A-PAC |
| WT1/MHC class I | 101415- | 1716 | 3461 | CD8SP-WT1-Abl-(vL-vH)-Myc- |
| complex | P01 | | | BBz-T2A-PAC |
| WT1/MHC class I | 052516- | 1717 | 3462 | CD8SP-WT1-Ab5-(vL-vH)-Myc- |
| complex | M07 | | | BBz-T2A-PAC |
| WT1/MHC class I | 052516- | 1718 | 3463 | CD8SP-MYC3-WT1-Ab13-(vL- |
| complex | R04 | | | vH)-Myc-BBz-T2A-PAC |
| WT1/MHC class I | 052616- | 1719 | 3464 | CD8SP-MYC3-WT1-Ab15-(vL- |
| complex | S02 | | | vH)-Myc-BBz-T2A-PAC |
| CDH19 | | 1720 | 3465 | CD8SP-CDH19-4B10-(vL-vH)- |
| | | | | Myc-BBz-T2A-PAC |
| Folate Receptor beta | | 1721 | 3466 | CD8SP-FRbeta-m923-(vL-vH)- |
| | | | | Myc-BBz-T2A-PAC |
| LHR (Luteinizing | | 1722 | 3467 | CD8SP-LHR-8B7-(vL-vH)-Myc- |
| hormone Receptor) | | | | BBz-T2A-PAC |
| LHR (Luteinizing | | 1723 | 3468 | CD8SP-LHR-5F4-21-(vL-vH)- |
| hormone Receptor) | | | | Myc-BBz-T2A-PAC |
| B7H4 | | 1724 | 3469 | CD8SP-B7H4-hu22C10-(vL-vH)- |
| | | | | Myc-BBz-T2A-PAC |
| B7H4 | | 1725 | 3470 | CD8SP-B7H4-hu1D11-(vL-vH)- |
| | | | | Myc-BBz-T2A-PAC |
| IgE | | 1726 | 3471 | CD8SP-IgE-omalizumab-(vL-vH)- |
| | | | | Myc-BBz-T2A-PAC |
| CD23 | | 1727 | 3472 | CD8SP-CD23-p5E8-(vL-vH)-Myc- |
| | | | | BBz-T2A-PAC |
| GCC (Guanylyl cyclase | | 1728 | 3473 | CD8SP-GCC-5F9-(vL-vH)-Myc- |
| C) | | | | BBz-T2A-PAC |
| GCC (Guanylyl cyclase | | 1729 | 3474 | CD8SP-GCC-Ab229-(vL-vH)- |
| C) | | | | Myc-BBz-T2A-PAC |
| CD200R | | 1730 | 3475 | CD8SP-CD200R-huDx182-(vL- |
| | | | | vH)-Myc-BBz-T2A-PAC |

TABLE 22
Exemplary CAR constructs targeting different antigens

| | | SEQ ID | SEQ ID | |
|---|---|---|---|---|
| Target | CLONE ID | (DNA) | (PRT) | CONSTRUCT NAME |
| MPL | 021715-Z07 | 1731 | 3476 | CD8SP-161-(vL-vH)-Myc-CD28z-T2A-PAC |
| MPL | 090814-C03 | 1732 | 3477 | CD8SP-161-(vL-vH)-Myc-CD8TM-BBz-T2A-EGFP |
| MPL | 031615-Q04 | 1733 | 3478 | CD8SP-175-(vL-vH)-Myc-CD28z-T2A-PAC |
| MPL | 031615-R04 | 1734 | 3479 | CD8SP-178-(vL-vH)-Myc-CD28z-T2A-PAC |
| MPL | 031615-T04 | 1735 | 3480 | CD8SP-AB317-(vL-vH)-Myc-CD28z-T2A-PAC |
| MPL | 031615-S03 | 1736 | 3481 | CD8SP-12E10-(vL-vH)-Myc-CD28z-T2A-PAC |
| MPL | 032415-M03 | 1737 | 3482 | CD8SP-huVB22Bw5-(vL-vH)-Myc-CD28z-T2A-PAC |
| MPL | 031915-U04 | 1738 | 3483 | hTPO-(1-187)-Myc-CD28z-T2A-PAC |
| MPL | 031915-V03 | 1739 | 3484 | mTPO-(1-187)-Myc-CD28z-T2A-PAC |
| MPL | 021216-D01 | 1740 | 3485 | CD8SP-161-(vL-vH)-BBz-P2A-IgHSP-IL6R-304- |
| | | | | vHH-Alb8-vHH-Flag-T2A-PAC |
| MPL | 112916-U06 | 1741 | 3486 | CD8SP-161-(vL-vH)-Myc-z-P2A-FKBP-K13-FLAG- |
| | | | | T2A-PAC |
| MPL | 112916-V01 | 1742 | 3487 | CD8SP-161-(vL-vH)-Myc-z-P2A-FLAG-HTLV2- |
| | | | | TAX-RS-T2A-PAC |
| MPL | 112916-W06 | 1743 | 3488 | CD8SP-161-(vL-vH)-Myc-z-P2A-HTLV2-TAX-RS- |
| | | | | T2A-PAC |
| MPL | 112614-E05 | 1744 | 3489 | CD8SP-161-(vL-vH)-Myc-BBz-P2A-FKBP-K13-Flag- |
| | | | | T2A-EGFP |
| MPL | 011315-F02 | 1745 | 3490 | CD8SP-161(vL-vH)-BBz-P2A-IgHSP-IL6-19A(vL- |
| | | | | vH)-Flag-T2A-EGFP |
| MPL | 012015-I29 | 1746 | 3491 | CD8SP-161(vL-vH)-BBz-P2A-IgHSP-IL6R-M83(vL- |
| | | | | vH)-Flag-T2A-EGFP |
| MPL | 022415-T02 | 1747 | 3492 | CD8SP-161-(vL-vH)-Myc-CD28z-P2A-K13-Flag- |
| | | | | T2A-EGFP |
| MPL | 012115-L04 | 1748 | 3493 | CD8SP-161-(vL-vH)-BBz-P2A-IgHSP-Fx06-Flag- |
| | | | | T2A-EGFP |
| MPL | 070315-H03 | 1749 | 3494 | CD8SP-161-(vL-vH)-Myc-BBZ-P2A-MC159-Flag- |
| | | | | T2A-Pac |
| CD19 | 112614-C06 | 1750 | 3495 | CD8SP-FMC63(vL-vH)-Myc-z-P2A-MC159-Flag- |
| | | | | T2A-PAC |
| CD19 | 111014-Z13 | 1751 | 3496 | CD8SP-FMC63(vL-vH)-Myc-BBz-P2A-MC159-Flag- |
| | | | | T2A-PAC |
| CD19 | 010100-N01 | 1752 | 3497 | CD8SP-FMC63(vL-vH)-Myc-BBz-P2A-Flag-HTLV2- |
| | | | | TAX-RS-T2A-PAC |
| CD19 | 100215-B07 | 1753 | 3498 | CD8SP-FMC63(vL-vH)-Myc-BBz-P2A-cFLIP-p22- |
| | | | | Flag-T2A-PAC |
| CD19 | 092215-A06 | 1754 | 3499 | CD8SP-FMC63(vL-vH)-Myc-BBz-P2A-cFLIP-L- |
| | | | | Flag-T2A-PAC |
| CD19 | 112614-B06 | 1755 | 3500 | CD8SP-FMC63(vL-vH)-Myc-z-P2A-FKBP-K13- |
| | | | | FLAG-T2A-EGFP |
| CD19 | 120314-J03 | 1756 | 3501 | CD8SP-FMC63(vL-vH)-Myc-z-P2A-FKBPx2-K13- |
| | | | | FLAG-T2A-EGFP |
| CD19 | 120314-N07 | 1757 | 3502 | CD8SP-FMC63(vL-vH)-Myc-z-P2A-Myr-FKBPx2- |
| | | | | K13-FLAG-T2A-EGFP |
| CD19 | 012315-O01 | 1758 | 3503 | CD8SP-FMC63(vL-vH)-Myc-BBz-P2A-FKBPx2- |
| | | | | HTLV2-Tax-RS-T2A-EGFP |
| CD19 | 033115-P06 | 1759 | 3504 | CD8SP-FMC63-(vL-vH)-Myc-CD28z-P2A-K13-Flag- |
| | | | | T2A-PAC |
| CD19 | 032415-Q03 | 1760 | 3505 | CD8SP-FMC63-(vL-vH)-Myc-CD28z-P2A-MC159- |
| | | | | Flag-T2A-PAC |
| CD19 | 022415-S03 | 1761 | 3506 | CD8SP-FMC63-(vL-vH)-Myc-CD28z-P2A-K13-Flag- |
| | | | | T2A-EGFP |
| CD19 | 011315-H06 | 1762 | 3507 | CD8SP-FMC63(vL-vH)-BBz-P2A-IgHSP-IL6- |
| | | | | 19A(vL-vH)-Flag-T2A-PAC |
| CD19 | 011315-K04 | 1763 | 3508 | CD8SP-FMC63(vL-vH)-BBz-P2A-IgHSP-IL6R- |
| | | | | M83(vL-vH)-Flag-T2A-PAC |
| CD19 | 012115-N04 | 1764 | 3509 | CD8SP-FMC63-(vL-vH)-BBz-P2A-IgHSP-Fx06-Flag- |
| | | | | T2A-PAC |
| CD19 | 091715-C01 | 1765 | 3510 | CD8SP-FMC63-(vL-vH)-Myc-z-P2A-HTLV2-TAX2- |
| | | | | FLAG-T2A-Pac |
| CD19 | 091715-D05 | 1766 | 3511 | CD8SP-FMC63-(vL-vH)-Myc-z-P2A-HTLV2-TAX- |
| | | | | RS-T2A-Pac |
| CD19 | 091715-L04 | 1767 | 3512 | CD8SP-FMC63-(vL-vH)-Myc-z-P2A-FLAG-HTLV2- |
| | | | | TAX-RS-T2A-Pac |
| CD19 | 091715-O04 | 1768 | 3513 | CD8SP-FMC63-(vL-vH)-MYC-z-P2A-HTLV2-TAX- |
| | | | | T2A-Pac |
| CD19 | 033115-T01 | 1769 | 3514 | CD8SP-FMC63-(vL-vH)-Myc-CD28z-T2A-PAC |
| CD19 | 112316-S06 | 1770 | 3515 | CD8SP-FMC63(vL-vH)-Myc-z-P2A-Myr-FKBPx2- |
| | | | | K13-FLAG-T2A-PAC |
| GRP78 | 031615-O05 | 1771 | 3516 | CD8SP-GRP78-GD4-(vL-vH)-MYC-CD28z-T2A-Pac |
| CD19 | 093015-D10 | 1772 | 3517 | CD8SP-hCD19-Bu12-(vL-vH)-MYC-CD28z-T2A-Pac |
| Lym1 | 031615-M03 | 1773 | 3518 | CD8SP-Lym1-(vL-vH)-Myc-CD28z-T2A-Pac |
| Lym2 | 031615-N03 | 1774 | 3519 | CD8SP-Lym2(vL-vH)-Myc-CD28z-T2A-Pac |
| GRP78 | 031615-P03 | 1775 | 3520 | CD8SP-GRP78-GC18-(vL-vH)-Myc-CD28z-T2A-Pac |
| FLT3 | 032415-L05 | 1776 | 3521 | CD8SP-FLT3-NC7-(vL-vH)-Myc-CD28z-T2A-Pac |
| CD79b | 031915-D05 | 1777 | 3522 | CD8SP-huMA79bv28-(vL-vH)-Myc-CD28z-T2A-Pac |
| CS1 | 031915-F03 | 1778 | 3523 | CD8SP-Luc90-(vL-vH)-MYC-CD28z-T2A-PAC |
| CD4 | 101415-O04 | 1779 | 3524 | SP-CD4-8-03F1-(vHH)-MYC-BBZ-T2A-Pac |
| CXCR4 | 101415-U01 | 1780 | 3525 | CD8SP-CXCR4-1-(vHH)-MYC-BBZ-T2A-Pac |
| KSHV- | 031615-W05 | 3534 | 3540 | CD8SP-4C3-(vL-vH)-Myc-CD28z-T2A-Pac |
| K8.1 | | | | |
| CD19 | 070814-D06 | 3535 | 3541 | CD8SP-FMC63-(vL-vH)-Myc-BBz-T2A-EGFP |
| MPL | 031615-B06 | 3536 | 3542 | CD8SP-MPL-VB22Bw4-(vL-vH)-Myc-CD28z-T2A- |
| | | | | PAC |
| KSHV- | 100814-K06 | 3537 | 3543 | CD8SP-4C3-(vL-vH)-Myc-BBz-T2A-EGFP |
| K8.1 | | | | |
| CD19 | 111214-D05 | 3538 | 3544 | CD8SP-FMC63-(vL-vH)-Myc-z-T2A-PAC |
| CD19 | 012315-M03 | 3539 | 3545 | CD8SP-FMC63(vL-vH)-Myc-BBz-P2A-FKBPx2- |
| | | | | FLAG-TAX2U2RS-T2A-eGFP |

TABLE 23
HLA-A2 restricted peptides used for generaton of CAR

| Protein | Fragment Name | Amino Acid Seq |
|---|---|---|
| gp100 | G9-209 | (IMDQVPFSV) |
| gp100 | G9-280 | (YLEPGPVTV) |
| gp100 | G9-154 | (KTWGQYWQV) |
| MUC1-A7 (130-138) | A7 | (NLTISDVSV) |
| MUC1-D6 (13-21) | D6 | (LLLTVLTVV) |
| TAX (11-19) | | (LLFGYPVYV) |
| hTERT(540-548) | T540 | (ILAKFLHWL) |
| hTERT (865-873) | T865 | (RLVDDFLLV) |
| HIV1 gag (77-85) | SL9 | (SLYNTVATL) |
| CMV-pp65(495-503) | | (NLVPMVATV) |
| MART (26-35) | | (EAAGIGILTV) |
| EBNA-3A (596-604) | | (SVRDRLARL) |
| EBNA-3c | | (LLDFVRFMGV) |
| WT1 | | (RMFPNAPYL) |
| PR1 | | (VLQELNVTV) |
| AFP | AFP-158 | (FMNKFIYEI) |
| HPV16-E7 | E7 (11-19) | (YMLDLQPET) |
| Tyrosinase | Tyr (369-377) | (YMDGTMSQV) |

### EXAMPLES

[0638] The following examples are not intended to limit the scope of the claims to the invention, but are rather intended to be exemplary of certain embodiments. Any variations in the exemplified methods which occur to the skilled artisan are intended to fall within the scope of the present invention.

### MPL (TPO Receptor) as Target for CAR-T Cell Therapy

[0639] Thrombopoietin and its cognate receptor, c-Mpl, are the primary molecular regulators of megakaryocytopoiesis (Zhan et al., Monoclonal antibodies in immunodiagnosis and immunotherapy 32:149-61, 2013). Binding of TPO to cell surface c-Mpl activates a cascade of signaling events that result in the proliferation and differentiation of megakaryocytic progenitor cells and ultimately platelet production. TPO and c-Mpl also regulate hematopoietic stem cell self-renewal. Consistent with these biological functions of TPO in the megakaryocytic lineage, c-Mpl expression is mostly restricted to non-lymphoid hematopoietic tissues. c-Mpl mRNA and cell surface protein have been identified in human CD34+ cells, megakaryocytes, platelets, primary leukemia samples of myeloid origin, and megakaryocytic and erythroid leukemia cell lines. c-Mpl mRNA has not been detected in most normal non-hematopoietic tissues or in lymphoid cell lines.

[0640] We examined the public gene expression databases for MPL expression. As shown in FIG. 2A-FIG. 2D, we confirmed extremely restrictive expression of MPL in normal tissues, with only one organ showing low level expression. In contrast, MPL was significantly expressed in most patient samples of Acute myeloid leukemia (AML), myelodysplastic syndrome (MDS) and chronic myeloid leukemia (CIVIL). These results suggest that MPL is an excellent therapeutic target for patients with myeloid malignancies, such as AML, MDS and CML, using chimeric antigen receptor modified T cells.

### Cell Lines and Cells

[0641] The cell lines used in this invention and their growth media are shown in the Table 24. Cells were cultured at 37° C., in a 5% CO2 humidified incubator. The cell lines were obtained from ATCC, NIH AIDS reagent program or were available in our laboratory or obtained from other laboratories.

TABLE 24
Cell lines and growth media

| Cell lines | Media | Cell lines | Media |
|---|---|---|---|
| BC-1 | RPMI, 20% FCS | THP-1 | RPMI, 10% FCS |
| BC-3 | RPMI, 20% FCS | U87MG | DMEM, 10% FCS |
| BCBL-1 | RPMI, 20% FCS | NCI-H540 | DMEM, 10% FCS |
| JSC-1 | RPMI, 20% FCS | LoVo | DMEM, 10% FCS |
| UMPEL-1 | RPMI, 20% FCS | SKOV-3 | DMEM, 10% FCS |
| MM1S | RPMI, 10% FCS | NCI-H1993 | DMEM, 10% FCS |
| U266 | RPMI, 10% FCS | Kasumi-1 | RPMI, 20% FCS |
| L363 | RPMI, 10% FCS | Jeko-1 | RPMI, 20% FCS |
| K562 | RPMI, 10% FCS | PC-3 | DMEM, 10% FCS |
| BV173 | RPMI, 10% FCS | HeLa | DMEM, 10% FCS |
| Nalm6 | RPMI, 10% FCS | NCI-H2452 | DMEM, 10% FCS |
| HL60 | RPMI, 10% FCS | LnCap | DMEM, 10% FCS |
| U937 | RPMI, 10% FCS | SNU-5 | RPMI, 20% FCS |
| RS: 411 | RPMI, 20% FCS | OVCAR-3 | DMEM, 10% FCS |
| MV: 411 | RPMI, 10% FCS | MEL-624 | DMEM, 10% FCS |
| Raji | RPMI, 10% FCS | LS174-T | DMEM, 10% FCS |
| HEL-92.1.7 | RPMI, 10% FCS | MEL-526 | DMEM, 10% FCS |
| Meg-01 | RPMI, 10% FCS | MDA- | DMEM, 10% FCS |
| Jurkat | RPMI, 10% FCS | MB231 | |
| MM1 | DMEM, 10% FCS | L1236 | RPMI, 20% FCS |
| Daudi | RPMI, 10% FCS | L428 | RPMI, 20% FCS |
| REC-1 | RPMI, 10% FCS | Molt-16 | RPMI, 20% FCS |
| U2932 | RPMI, 10% FCS | RPMI8402 | RPMI, 20% FCS |
| H929 | RPMI, 10% FCS | KN5-5F2 | RPMI, 20% FCS |
| | beta | CCRF-CEM | RPMI, 10% FCS |
| | Mercaptoethanol | (ATCC) | |
| | (BME) | MG-63 | DMEM, 10% FCS |
| KMS28 | RPMI, 10% FCS | Karpass-299 | RPMI, 20% FCS |
| EJM | RPMI, 10% FCS | MCF7 | DMEM, 10% FCS |
| MRC-5 | DMEM, 10% FCS | SUDHL-1 | RPMI, 10% FCS |
| CMK | RPMI, 20% FCS | AA-2 | RPMI, 10% FCS |
| TF-1 | RPMI, 10% | HL2/3 | DMEM, 10% FCS |
| | FCS + GMCSF | TF228.1.16 | DMEM, 10% FCS |
| ML-2 | RPMI, 20% FCS | MT-4 | RPMI, 10% FCS |
| A20 | RPMI, 10% | Sup-T1 | RPMI, 10% FCS |
| | FCS + BME | HuT-78 | RPMI, 10% FCS |
| KMS28BM | RPMI, 10% FCS | TT | DMEM, 10% FCS |
| KG-1 | RPMI, 20% FCS | DMS79 | RPMI, 10% FCS |
| CEM | RPMI, 10% FCS | LAN-5 | DMEM, 10% FCS |
| U937 | RPMI, 10% FCS | PEER1 | RPMI, 10% FCS |
| LAMA5 | RPMI, 10% FCS | SK-MEL-37 | DMEM, 10% FCS |
| A549 | DMEM, 10% FCS | Jurkat- | RPMI, 10% FCS |
| HT29 | DMEM, 10% FCS | NFAT-GFP | |
| Molm-13 | RPMI, 20% FCS | F9 | DMEM, 10% FCS |
| A431 | DMEM, 10% FCS | | |
| P19 | DMEM, 10% FCS | | |

[0642] Jurkat cell line (clone E6-1) engineered with a NFAT-dependent EGFP (or GFP) reporter gene was a gift from Dr. Arthur Weiss at University of California San Francisco and have been described to study CAR-signaling ((Wu, C Y et al., Science 350:293-302, 2015). Jurkat cells were maintained in RPMI-1640 medium supplemented with 10% FBS, penicillin and streptomycin.

### Generation of Lentiviral Vectors Encoding Chimeric Antigen Receptors Against MPL

[0643] The pLENTI-Blast vector was derived from pLenti6v5gw_lacz vector (Invitrogen; ThermoFisher Scientific) by removal of the LacZ gene. pLenti-MP2 was a gift from Pantelis Tsoulfas (Addgene plasmid #36097) and was used to generate pLenti-EF1a or pLenti-EF1a [SEQ ID NO:905] lentiviral vector by replacement of the CMV promoter with human EF1α promoter using standard molecular biology techniques. pLenti-EF1a-DWPRE [SEQ ID NO:906] was derived from the pLENTI-EF1a vector by deletion of WPRE sequence. The psPAX2 vector was a gift from Didier Trono (Addgene plasmid #12260). The pLP/VSVG envelope plasmid and 293FT cells were obtained from Invitrogen (ThermoFisher Scientific). The retroviral transfer vector MSCVneo, MSCVhygro, and MSCVpac and the packaging vector pKAT were obtained from Dr. Robert Illaria's laboratory. phRGTK Renilla Luciferase plasmid was from Promega.

[0644] Several monoclonal antibodies targeting human MPL have been described (US20120269814A1, U.S. Pat. No. 6,342,220 B1, EP1616881A1 and WO 02568109). The nucleotide sequences of the 1.6.1 monoclonal antibody described in US20120269814A1 was used for the synthesis of its corresponding scFV fragment consisting from 5′ to 3′ ends of a nucleotide sequences encoding a signal peptide derived from human CD8 molecule [SEQ ID NO: 1-4], the vL fragment, a (Gly4Ser)×3 linker and the vH fragment. The sequence of the scFV fragment was codon optimized using GeneArt™ software (Thermo Fisher Scientific) and gene-fragments encoding the optimized sequences synthesized by GeneArt™ or Integrated DNA Technologies (IDT). The gene fragment was used as templates in PCR reaction using custom primers containing NheI and MluI restriction enzyme sites and then cloned in a modified pLenti-EF1a vector containing the hinge, transmembrane and cytosolic domains of the CAR cassette by standard molecular biology techniques. The final CAR construct named CD8SP-161-(vL-vH)-Myc-CD8TM-BBz-T2A-EGFP(090814-C03)[SEQ ID NO:1732] consisted of human CD8 signal peptide (hCD8SP), fused in frame to the scFv (vL-vH) fragment derived from the monoclonal antibody 1.6.1 against human MPL [SEQ ID NO:730], a Myc epitope tag [SEQ ID NO:553], the hinge and transmembrane domain of human CD8 [SEQ ID NO:842], the cytosolic domain of human 41BB (CD137) receptor [SEQ ID NO:845], the cytosolic domain of human CD3z, [SEQ ID NO:846], a T2A ribosomal skip sequence [SEQ ID NO:832] and a cDNA encoding enhanced Green Fluorescent Protein (EGFP). The CAR construct CD8SP-MPL-161-(vL-vH)-Myc-BBz-T2A-PAC(021015-R07)[SEQ ID NO:1658] is nearly identical to the above except EGFP cDNA is replaced by cDNA encoding a variant of puromycin resistance gene (SEQ ID NO: 850). In the CAR construct CD8SP-161-(vL-vH)-Myc-CD28z-T2A-PAC(021715-Z07)[SEQ ID NO:1731], the hinge and transmembrane domain of human CD8 and the cytosolic domain of human 41BB (CD137) receptor are replaced by the human CD28-hinge, -transmembrane and -cytosolic domains (SEQ ID NO: 848). Essentially a similar approach was used to generate several additional CARs against multiple antigens in which the 161 scFv fragment was replaced by the scFv fragments of antibodies targeting different antigens. The SEQ ID NOs of the nucleotide and protein sequences of the different scFv fragments and the name of their target antigens are provided in Table 11. Additionally, two constructs targeting MPL were made in which the scFv region was replaced by the extracellular domains of human and mouse thrombopoietin (TPO) (SEQ ID NOs: 553 and 554). These constructs, hTPO-(1-187)-Myc-CD28z-T2A-PAC(031915-U04)[SEQ ID NO:1738] and mTPO-(1-187)-Myc-CD28z-T2A-PAC(031915-V03)[SEQ ID NO:1739], consisted of the extracellular receptor binding domains of human and mouse thrombopoietin (TPO) fused to the CD28-hinge, -transmembrane and -cytosolic domains and CD3z cytosolic domains. The SEQ ID NOs of the nucleotide and protein sequences of the different camelid vHH fragments, non-immunoglobulin binding scaffolds and ligands that can be used to generate CAR and the name of their target antigens are provided in Tables 7, 8 and 10.

[0645] In the CAR construct CD8SP-161-(vL-vH)-Myc-CD28z-P2A-K13-Flag-T2A-EGFP(022415-T02)[SEQ ID NO:1747], the cDNA encoding K13-vFLIP from the Kaposi's sarcoma associated herpesvirus containing a carboxy-terminal Flag epitope tag is inserted downstream of the nucleotide sequence encoding the CD8SP-161-(vL-vH)-Myc-CD28z CAR and is separated from it by nucleotide sequence encoding P2A cleavable linker. The CAR construct CD8SP-MPL-161-(vL-vH)-Myc-BBz-P2A-K13-Flag-T2A-PAC[SEQ ID NO:1388] is similar in design to SEQ ID NO: 1747 except that it contains the CD8 hinge and transmembrane domains and the 41BB costimulatory domain. Essentially, a similar approach was used to clone other accessory modules, such as MC159-vFLIP, cFLIP-L, HTLV1-Tax and HTLV2-Tax, in the CAR-encoding lentiviral vectors. The construct CD8SP-MPL-161-(vL-vH)-Myc-BBz-P2A-K13-Flag-T2A-PAC [SEQ ID NO:1388] comprises a CAR containing a 41BB costimulatory domain (BB) and a CD3z activation domain (z). This construct also co-expresses a Flag-epitope tagged K13-vFLIP downstream of the CAR-encoding sequence and separated from it by a P2A cleavable linker. The construct CD8SP-MPL-161-(vL-vH)-Myc-z-P2A-K13-Flag-T2A-PAC(111516-N05)[SEQ ID NO:1118] is similar in design to SEQ ID NO: 1388 except that it lacks the 41BB costimulatory domain. The SEQ ID NOs of the nucleotide and protein sequences of the different CAR constructs and the name of their target antigens are provided in Tables 19-22. All the CAR constructs were generated using standard molecular biology techniques and their sequences confirmed using automated sequencing.

### Lentivirus and Retrovirus Vectors

[0646] Lentiviruses were generated by calcium phosphate based transfection in 293FT cells essentially as described previously (Matta H et al, Cancer biology and therapy. 2(2):206-10. 2003). 293FT cells were grown in DMEM with 10% FCS 4 mM L-Glutamine, 0.1 mM MEM Non-Essential Amino Acids, and 1 mM MEM Sodium Pyruvate (hereby referred to as DMEM-10). For generation of lentivirus, 293FT cells were plated in 10 ml of DMEM-10 medium without antibiotics in a 10 cm tissue culture plate so that they will be approximately 80 confluent on the day of transfection. The following day, the cells were transfected by calcium phosphate transfection method using 10 μg of lentiviral expression plasmid encoding different genes, 7.5 μg of PSPAX2 plasmid and 2 μg of PLP/VSVG plasmid. Approximately 15-16 hours post-transfection, 9 ml of media was removed and replaced with 5 ml of fresh media. Approximately, 48 hours post-transfection, 5 ml of supernatant was collected (first collection) and replaced with fresh 5 ml media. Approximately 72 hrs post-transfection, all media was collected (second collection, usually around 6 ml). The collected supernatants were pooled and centrifuged at 1000 rpm for 1 minute to remove any cell debris and non-adherent cells. The cell-free supernatant was filtered through 0.45 μm syringe filter. In some cases, the supernatant was further concentrated by ultra-centrifugation at 18500 rpm for 2 hours at 4° C. The viral pellet was re-suspended in 1/10 of the initial volume in XVIVO medium. The virus was either used fresh to infect the target cells or stored frozen in aliquots at −80° C.

### Infection of T Cells and PBMC

[0647] Buffy coat cells were obtained from healthy de-identified adult donors from the Blood Bank at Children Hospital of Los Angeles and used to isolate peripheral blood mononuclear cells (PBMC) by Ficoll-Hypaque gradient centrifugation. PBMC were either used as such or used to isolate T cells using CD3 magnetic microbeads (Miltenyi Biotech) and following the manufacturer's instructions. PBMC or isolated T cells were re-suspended in XVIVO medium (Lonza) supplanted with 10 ng/ml CD3 antibody, 10 ng/ml CD28 antibody and 100 IU recombinant human-IL2. Cells were cultured at 37° C., in a 5% CO2 humidified incubator. Cells were activated in the above medium for 1 day prior to infection with lentiviral vectors. In general, primary cells (e.g. T cells) were infected in the morning using spin-infection (1800 rpm for 90 minutes at 37° C. with 300 μl of concentrated virus that had been re-suspended in XVIVO medium in the presence of 8 μg/ml of Polybrene® (Sigma, Catalog no. H9268). The media was changed in the evening and the infection was repeated for two more days for a total of 3 infections. After the 3rd infection, the cells were pelleted and resuspended in fresh XVIVO media containing 10 ng/ml CD3 antibody, 10 ng/ml CD28 antibody and 100 IU recombinant human-IL2 and supplemented with respective antibiotics (if indicated) and place in the cell culture flask for selection, unless indicated otherwise. Cells were cultured in the above medium for 10-15 days in case no drug selection was used and for 20-30 days in case drug-selection was used. In cases, where cells were infected with a lentivirus expressing EGFP, they were expanded without drug-selection or flow-sorted to enrich for EGFP-expressing cells. For infection of cancer cell lines, approximately 500,000 cells were infected with 2 ml of the un-concentrated viral supernatant in a total volume of 3 ml with Polybrene® (Sigma, Catalog no. H9268). Then next morning, the cells were pelleted and resuspended in the media with respective antibiotics and place in the cell culture flask for selection.

[0648] Essentially a similar procedure as described above for lentivirus vector production was used for generation of retroviral vectors with the exception that 293FT cells were generally transfected in 10 cm tissue culture plates in 10 ml of DMEM-10 medium using 10 μg of retroviral construct, 4 μg of pKAT and 2 μg of VSVG plasmid. The virus collection and infection of target cells was carried out essentially as described above for lentiviral vectors.

### Antibodies and Drugs

[0649] Blinatumomab was obtained from Amgen. Digitonin was purchased from Sigma (Cat. no D141) and a stock solution of 100 mg/ml was made in DMSO. A diluted stock of 1 mg/ml was made in PBS. Final concentration of digitonin used for cell lysis was 30 μg/ml unless indicated otherwise.

### ELISA

[0650] Human IL2, IFNγ, IL6 and TNFα were measured in the cell culture supernatant of CAR-expressing Jurkat-NFAT-GFP effector cells or T cells that had been co-cultured with the specific target cell lines for 24 to 96 hours using commercially available ELISA kits from R&D systems (Minneapolis, Minn.) and BD Biosciences and following the recommendations of the manufacturer.

### FACS Analysis for Detecting Expression of CAR

[0651] Mouse Anti-Human c-Myc APC-conjugated Monoclonal Antibody (Catalog # IC3696A) was from R&D Systems (Minneapolis, Minn.). Biotinylated protein L was purchased from GeneScript (Piscataway, N.J.), reconstituted in phosphate buffered saline (PBS) at 1 mg/ml and stored at 4° C. Streptavidin-APC (SA1005) was purchased from ThermoFisher Scientific.

[0652] For detection of CARs using Myc staining, 1×10⁶ cells were harvested and washed three times with 3 ml of ice-cold 1×PBS containing 4% bovine serum albumin (BSA) wash buffer. After wash, cells were resuspended in 0.1 ml of the ice-cold wash buffer containing 10 μl of APC-conjugated Myc antibody and incubated in dark for 1 hour followed by two washings with ice cold wash buffer.

[0653] For detection of CARs using Protein L staining, 1×10⁶ cells were harvested and washed three times with 3 ml of ice-cold 1×PBS containing 4% bovine serum albumin (BSA) wash buffer. After wash, cells were resuspended in 0.1 ml of the ice-cold wash buffer containing 1 μg of protein L at 4° C. for 1 hour. Cells were washed three times with ice-cold wash buffer, and then incubated (in the dark) with 10 μl of APC-conjugated streptavidin in 0.1 ml of the wash buffer for 30 minutes followed by two washings with ice cold wash buffer. FACS was done using FACSVerse analyzer from BD Biosciences.

### Cell Death Assay

[0654] To measure cell death, a novel assay based on ectopic cytosolic expression of Gluc, NLuc and other luciferases was utilized as described in U.S. provisional patent application 62/396,650 “A Non-Radioactive Cytotoxicity Assay”. The method involves expression of a reporter in a target cells in a manner so that it is preferentially retained within the healthy cells but is either released from dead and dying cells or whose activity can be preferentially measured in dead and dying cells. The preferred reporter for this assay are 1) non-secreted forms of luciferases from the copepods, such as Gaussia princeps, Pleuromamma abdominalis, Metridia pacifica, Metridia curticauda, Metridia asymmetrica, Metridia okhotensis, Metridia longa, Lucicutia ovaliformis, Heterorhabdus tanneri, and Pleuromamma scutullata 2) engineered luciferase reporters from deep sea shrimp, such as NanoLuc. The sequence of several such exemplary reporter vectors is provided in SEQ ID NO: 912 to SEQ ID NO: 918. The above vectors were used to generate retrovirus and lentiviruses which in turn were used to generate polyclonal population of several target cell lines stably expressing GLuc, NLuc, or TurboLuc following selection with appropriate antibiotics. Unless indicated otherwise, the target cells stably expressing the different luciferases were plated in triplicate in a 384 well plate in the media used for growing the target cells. Target cells which grow in suspension were generally plated at a concentration of 2-3×10⁴ per well, while target cells which grow as adherent monolayers were plated at a concentration of 1-2×10⁴ per well. Unless indicated otherwise, the target cells were cocultured with the genetically modified T cells (i.e. those expressing CAR) at an Effector: Target (E:T) ratio varying from 1:1 to 10:1 for 4 hours to 96 hours. In the case target cells grow as adherent cells (e.g., HeLa cells), they were allowed to attach to the bottom of the wells overnight before the T cells were added. T cells mediated induction of lysis of target cells was assayed by increase of luciferase activity as measured by BioTek synergy plate reader by directly injecting 0.5×CTZ assay buffer containing native coeloentrazine (Nanaolight) as described below.

### CTZ Assay

[0655] A 100× stock solution of native coelenterazine (CTZ; Nanolight, cat #303) was made by dissolving 1 mg of lyophilized CTZ powder in 1.1 ml of 100% Methanol supplemented with 30 μl of 6N HCl to avoid oxidation of CTZ with time. To make CTZ assay buffer, the 100× stock solution of CTZ was diluted to 0.5× concentration in PBS. Unless indicated otherwise, a total volume of 15p1 of the CTZ assay buffer (as prepared above) was added to each well of a 384-well white plate (Greiner, 384 well white plate cat #781075) containing cells expressing the non-secretory form of the luciferase in approximately 50-60 μl volume of medium and plates were read for luminescence in endpoint mode using BioTek synergyH4 plate reader. For 96 well plates, cells were plated in 200 μl of media and approximately 50 μl of 0.5×CTZ assay buffer was added. Unless indicated otherwise, the 0.5×CTZ assay buffer was used for assaying the activity of GLuc, TurboLuc16, and MLuc7. The CTZ assay buffer (diluted to 0.125× concentration) was also used for measurement of NLuc activity in some experiments (see below). In general, unless indicated otherwise, the volume of 0.5×CTZ assay buffer added was approximately ¼th of the volume of the liquid in the well containing the cells, although the assay also worked when the 0.5×CTZ assay was added to the media containing the cells in 1:1 volume. Gluc activity in wells containing media alone (Med) and in wells in which target cells were incubated with T cells that were not infected with any SIR construct (T-UI) were used as controls, where indicated.

### NLuc Assay:

[0656] Nano-Glo® Luciferase Assay System (Promega) was used for measurement of NLuc activity by following the manufacturer's instructions. Briefly, Nano-Glo Reagent was prepared by adding 5 μl of Nano-Glo substrate in 1 ml of Nano-Glo assay buffer (Promega). Unless indicated otherwise, 15 μl of Nano-Glo Reagent prepared above was manually added directly to each well of a 384-well white plate containing cells in 60 μl of media and plates. For 96 well plates, cells were plated in 200 μl of media and approximately 50 μl of assay buffer was added.

[0657] Plates were read for luminescence in endpoint mode using BioTek synergyH4 plate reader without prior cell lysis. In some experiments, NLuc activity was measured using CTZ assay buffer but here the buffer was diluted to final concentration of 0.125×. When CTZ assay buffer was used for measurement of NLuc activity, a total volume of approximately 15 μl (unless indicated otherwise) of the 0.125×CTZ assay buffer was added by injector to each well of a 384-well white plate (Greiner, 384 well white plate cat #781075) containing cells in approximately 50-60 μl volume of medium and plates were read for luminescence in endpoint mode using BioTek synergyH4 plate reader. For 96 well plates, cells were generally plated in 200 μl of media and approximately 50 μl of 0.125×CTZ assay buffer was added.

### Assay to Detect the Expression of Antigens on Target Cells

[0658] Both CD19 and MPL (also known as Thrombopoietin receptor or TPO-R) are expressed on hematopoietic cells but show differential expression in cells of different lineages. FMC63 is a well characterized mouse monoclonal antibody that specifically recognizes human CD19. Similarly, 161 (also designated as 1.6.1) is a monoclonal antibody that recognizes human MPL and is described in U.S. patent application US 2012/0269814 A1. We generated a FMC63 single chain Fv (scFv) fragment based on the known sequence of FMC63 vL and vH fragments. The cDNA encoding FMC63 scFv fragment consisted from 5′ to 3′ ends a nucleotide sequences encoding a signal peptide derived from human CD8 molecule, FMC63 vL fragment, a (Gly4Serz)×3 linker and FMC63-vH fragment. The cDNA encoding the FMC63 scFv fragment was then fused in-frame at its 3′ end to cDNA encoding AcV5-tagged NLuc through a Gly-Gly-Ser-Gly linker to generate FMC63-GGSG-NLuc. The resulting fragment was then cloned down-stream of the human EF1a promoter into the lentiviral vector pLenti-EF1a (SEQ ID NO: 905) to make the construct Plenti-EF1α-FMC63(vL-vH)-GGSG-NLuc-AcV5-U09. The DNA and PRT sequences of the insert fragment are provided in SEQ ID NO: 923 and SEQ ID NO: 2668, respectively. A construct encoding 161-GGSG-NLuc was similarly generated using the vL and vH fragment of 1.6.1 monoclonal antibody against MPL. The DNA and PRT sequences of the insert fragment are provided in SEQ ID NO: 924 and SEQ ID NO: 2669, respectively. The pLenti-EF1a-FMC 63 (vL-vH)-GGSG-NLuc-AcV5 and pLenti-EF1a-161(vL-vH)-GGSG-NLuc-AcV5 plasmids were transfected into 293FT cells by calcium phosphate co-precipitation method. Approximately 20h post-transfection, the cell culture media was replaced with XVIVO medium. The conditioned media containing the secreted FMC63(vL-vH)-GGSG-NLuc-AcV5 (also referred to as FMC63-GGSG-NLuc-AcV5) and 161(vL-vH)-GGSG-NLuc-AcV5 (also referred to as 161-GGSG-NLuc-AcV5) proteins was collected 48-72h later.

[0659] The supernatant containing FMC63-GGSG-NLuc-AcV5 and 161-GGSG-NLuc-AcV5 proteins were used to detect the expression of CD19 and MPL on the surface of Jurkat, K562, RAJI, RS-4-11 (RS411) and HEL 92.1.7 (HEL) cells that had been engineered to express a c-MPL cDNA by transducing these cells with a lentiviral vector expressing human c-MPL cDNA or an empty vector. The cells also expressed a humanized Gluc cDNA lacking its signal peptide. The vector- and MPL-expressing Jurkat-Gluc, K562-Gluc, HEL.92.1.7-Gluc, RAJI-Gluc and RS411-Gluc cells were incubated with the FMC63-GGSG-NLuc-AcV5 and 161-GGSG-NLuc-AcV5 supernatants at 4° C. for 1 h followed by extensive washings with cold PBS supplemented with 0.1% BSA. The cells were re-suspended in cold PBS and 30 μl of cell suspension was plated per well in a flat-bottom 384 well plate (Greiner, 384 well white plate cat. #781075) in triplicate. NLuc assay buffer containing native coelenterazine (CTZ) as NLuc substrate (30 μl/well of native coelenterazine diluted in PBS) was added to each well by an automatic dispenser in a well mode using a BioTek synergy H4 plate reader and light emission as a measure of NLuc activity was measured. FIG. 3A shows that strong binding with 161-GGSG-NLuc-AcV5 was observed on HEL 92.1.7-Gluc-vector cells suggesting significant expression of MPL endogenously. Ectopic expression of MPL in HEL.92.1.7-Gluc-MPL cells led to a modest increase in 161-GGSG-NLuc-AcV5 binding. In contrast, very weak binding with 161-GGSG-NLuc-AcV5 was observed on vector-expressing Jurkat, RAJI and RS411 cells and was only modestly increased upon ectopic expression of MPL. Finally, weak but stronger binding of 161-GGSG-NLuc-AcV5 was observed on K562-vector cells, and was significantly increased on K562-MPL cells. In contrast to 161-GGSG-NLuc-AcV5, the FMC63-GGSG-NLuc-AcV5 supernatant showed strongest binding on vector- and MPL-expressing RAJI cells, modestly strong binding on RS411 cells and very weak to negligible binding on the other cells.

### Assay to Detect the Expression of Chimeric Antigen Receptors Targeting CD19 and MPL (Thrombopoietin Receptor)

[0660] A frequent problem in the field of chimeric antigen receptors is lack of a sensitive and specific assay that can detect cells that express chimeric antigen receptors. To detect the expression of CAR targeting CD19 and MPL, we fused the extracellular domains (ECD) of human CD19 and human MPL, including their signal peptides, in frame with nucleotide sequence encoding a Gly-Gly-Ser-Gly linker, NLuc (without a secretory signal) and an AcV5 epitope tag. In the case of CD19 construct, a FLAG tag was inserted between the signal peptide and the beginning of the extracellular domain. The whole cassette was cloned downstream of the human EF1a promoter into the lentiviral vector pLenti-EF1 to make constructs pLenti-EF1-FLAG-CD19-ECD-GGSG-NLuc-AcV5 and pLenti-EF1-MPL-ECD-GGSG-NLuc-AcV5, respectively. The nucleic acid sequences of the insert fragments are provided in SEQ ID NO: 926 and SEQ ID NO: 925, respectively. The protein sequences of the insert fragments are provided in SEQ ID NO: 2671 and SEQ ID NO: 2670, respectively. The constructs were transfected into 293FT cells by calcium phosphate co-precipitation method. Approximately 20 h post-transfection, the cell culture media was replaced with fresh medium. The conditioned media containing the secreted FLAG-CD19-ECD-GGSG-NLuc-AcV5 (also referred to as CD19-GGSG-NLuc-AcV5) and MPL-ECD-GGSG-NLuc-AcV5 (also referred to as MPL-GGSG-NLuc-AcV5) proteins was collected 48-72 h later.

[0661] 293FT-cells were transiently transfected (in a 24-well plate, 500 μl volume) with lentiviral constructs expressing chimeric antigen receptors CD8SP-FMC63-(vL-vH)-Myc-BBz-T2A-PAC(112014-A13)[SEQ ID NO:1467], CD8SP-MPL-161-(vL-vH)-Myc-BBz-T2A-PAC(021015-R07)[SEQ ID NO:1658] or CD8SP-161-(vL-vH)-Myc-CD28z-T2A-PAC(021715-Z07)[SEQ ID NO:1731] using calcium phosphate co-transfection method or left untransfected. Next day morning, approximately 18 hours post-transfection, cells were collected by pipetting up and down in 1.5 ml tubes. The tubes were spun down at 1500 RPM for 5 minutes. Then the cells were washed once with wash buffer (1% FBS in PBS), followed by incubation with 100 μl of indicated secretory forms of GGS NLuc supernatants. The cells were incubated at 4° C. for 1 hour.

[0662] After the incubation, cells were washed 5 times with wash buffer (1 ml each wash). Finally the pellet was resuspended in 200 μl wash buffer. Resuspended cells were placed in a 384 well plate in triplicate (25 μl each). Luciferase activity was measured using a BioTek synergy H4 plate reader after addition of NLuc assay buffer (Promega) containing native coelenterazine (25 μl each well) directly to each well (one at a time).

[0663] As shown in the FIG. 4A, 293FT cells expressing the CAR CD8SP-FMC63-(vL-vH)-Myc-BBz-T2A-PAC(112014-A13)[SEQ ID NO:1467] that targets CD19 demonstrated strong binding to FLAG-CD19-ECD-GGSG-NLuc-AcV5[SEQ ID NO: 926] as measured by NLuc assay while very little binding was seen on uninfected T cells (UI) or those expressing the control CAR CD8SP-MPL-161-(vL-vH)-Myc-BBz-T2A-PAC(021015-R07)[SEQ ID NO:1658]. Similarly, 293FT cells expressing the CAR CD8SP-161-(vL-vH)-Myc-CD28z-T2A-PAC(021715-Z07)[SEQ ID NO:1731] showed strong binding with MPL-ECD-GGSG-NLuc-AcV5[SEQ ID NO: 925] supernatant as compared to un-transfected 293FT cells or those transfected with the CAR CD8SP-FMC63-(vL-vH)-Myc-BBz-T2A-PAC(112014-A13)[SEQ ID NO:1467] (FIG. 4B).

Assay to Detect the Expression of Chimeric Antigen Receptors Targeting MPL (Thrombopoietin Receptor) on 293FT Cells that had been Transfected with the Different CAR Constructs

[0664] The construct hTPO-(1-187)-Myc-CD28z-T2A-PAC(031915-U04)[SEQ ID NO:1738], mTPO-(1-187)-Myc-CD28z-T2A-PAC(031915-V03)[SEQ ID NO:1739], CD8SP-MPL-161-(vL-vH)-Myc-BBz-T2A-PAC(021015-R07)[SEQ ID NO:1658] and a control CAR construct containing a scFv derived from an irrelevant antibody were transiently transfected into 293FT cells and incubated with MPL-ECD-GGSG-NLuc-AcV5[SEQ ID NO: 925] supernatant essentially as described in the preceding example. FIG. 5 shows modest binding of MPL-ECD-GGSG-NLuc-AcV5 to 293FT cells transfected with hTPO-(1-187)-Myc-CD28z-T2A-PAC(031915-U04)[SEQ ID NO:1738] and mTPO-(1-187)-Myc-CD28z-T2A-PAC(031915-V03)[SEQ ID NO:1739] constructs and strong binding to 293FT cells transfected with CD8SP-MPL-161-(vL-vH)-Myc-BBz-T2A-PAC(021015-R07)[SEQ ID NO:1658] construct as compared to untransfected cells or cells that had been transfected with control CAR construct.

### MPL-CARs are Expressed on the Surface of T Cells

[0665] Purified T cells were infected with lentiviruses encoding the different Myc-tagged CAR constructs targeting MPL. The constructs also co-expressed EGFP. The expression of CAR on T cells was examined by EGFP fluorescence and immunofluorescence staining with an APC-conjugated Myc-antibody followed by FACS analysis on a BD verse flow cytometer.

[0666] FIG. 6 shows expression of MPL CARs on the surface of T cells as determined by increased EGFP fluorescence and increased staining with APC-Myc as compared to the uninfected T cells (UI).

### T Cells Expressing MPL CARs are Capable of Binding MPL-GGSG-NLuc Fusion Protein

[0667] T cells expressing the different MPL CAR constructs were incubated with MPL-GGSG-NLuc-AcV5 and CD19-GGSG-NLuc-AcV5 supernatants and after extensive washes assayed for NLuc activity essentially as described in the preceding example. FIG. 7 shows strong binding of T cells expressing CD8SP-MPL-161-(vL-vH)-Myc-BBz-T2A-PAC(021015-R07)[SEQ ID NO:1658], CD8SP-175-(vL-vH)-Myc-CD28z-T2A-PAC(031615-Q04)[SEQ ID NO:1733], CD8SP-MPL-VB22Bw4-(vL-vH)-Myc-CD28z-T2A-PAC(031615-B06)[SEQ ID NO:3536] CARs and modest binding of T cells expressing CD8SP-161-(vL-vH)-Myc-CD28z-T2A-PAC(021715-Z07)[SEQ ID NO:1731], CD8 SP-AB317-(vL-vH)-Myc-CD28z-T2A-PAC(031615-T04)[SEQ ID NO:1735] and CD8SP-12E10-(vL-vH)-Myc-CD28z-T2A-PAC(031615-503)[SEQ ID NO:1736] to MPL-GGSG-NLuc AcV5 supernatant, while no significant binding was observed on uninfected T cells or those expressing the control CAR CD8SP-4C3-(vL-vH)-Myc-CD28z-T2A-Pac(031615-W05)[SEQ ID NO:3534]. Similarly, no specific binding was observed on any MPL CAR-T cells with CD19-GGSG-NLuc-AcV5 supernatant, thereby demonstrating the specificity of the assay.

### MPL CARs Activate T Cell Signaling in Jurkat Cells Upon Antigen Stimulation.

[0668] Jurkat cells stably expressing an NFAT-EGFP reporter construct were stably transduced with lentiviral vectors expressing the different CAR constructs targeting MPL followed by selection with puromycin. Cells were subsequently co-cultured with MPL-expressing HEL.92.1.7 (HEL) cells. Co-culturing of MPL-CAR expressing Jurkat-NFAT-EGFP cells with HEL cells resulted in increase in EGFP expression as determined by FACS analysis, which was evident as early as 4 h after co-culture. The increase in EGFP expression was strongest in Jurkat-NFAT-EGFP cells expressing the CD8SP-MPL-161-(vL-vH)-Myc-BBz-T2A-PAC(021015-R07)[SEQ ID NO:1658], CD8SP-161-(vL-vH)-Myc-CD28z-T2A-PAC(021715-Z07)[SEQ ID NO:1731] and CD8SP-175-(vL-vH)-Myc-CD28z-T2A-PAC(031615-Q04)[SEQ ID NO:1733] constructs. In an independent experiment, significant EGFP induction was also observed upon culturing of Jurkat-NFAT-EGFP cells expressing the CD8SP-2-MPL-111-(vL-vH)-Myc-BBz-T2A-PAC(041316-A03)[SEQ ID NO:1660] CAR construct with HEL cells. The experiment was repeated by co-culturing the Jurkat-NFAT-EGFP cells with either RAJI cells, which have weak MPL expression, or with RAJI-MPL cells that were engineered to ectopically express human MPL receptor. Jurkat-NFAT-EGFP cells expressing CAR directed against MPL showed more increase in EGFP expression when incubated with RAJI-MPL cells as compared with RAJI-vector cells. The increase in EGFP expression was again strongest in Jurkat-NFAT-EGFP cells expressing the CD8SP-MPL-161-(vL-vH)-Myc-BBz-T2A-PAC(021015-R07)[SEQ ID NO:1658], CD8SP-161-(vL-vH)-Myc-CD28z-T2A-PAC(021715-Z07)[SEQ ID NO:1731] and CD8SP-175-(vL-vH)-Myc-CD28z-T2A-PAC(031615-Q04)[SEQ ID NO:1733] constructs.

TABLE 25
EGFP induction in Jurkat-NFAT-eGFP cells expressing
different CARs

| | | GFP induction (%) | | | |
|---|---|---|---|---|---|
| | | TARGET CELL LINE | | | |
| | | | | RAJI- | RAJI- |
| S. No. | Jurkat-NFAT-EGFP | NONE | HEL | vector | Mpl |
| 1 | Jurkat-NFAT-EGFP (Parental cells) | 3 | 1 | 3 | 3 |
| 2 | CD8SP-MPL-161-(vL-vH)-Myc-BBz-T2A- | 4 | 27 | 4 | 23 |
| | PAC(021015-R07)[SEQ ID NO: 1658] | | | | |
| 3 | CD8SP-161-(vL-vH)-Myc-CD28z-T2A-PAC(021715- | 4 | 14 | 5 | 11 |
| | Z07)[SEQ ID NO: 1731] | | | | |
| 4 | CD8SP-175-(vL-vH)-Myc-CD28z-T2A-PAC(031615- | 6 | 33 | 11 | 18 |
| | Q04)[SEQ ID NO: 1733] | | | | |
| 5 | CD8SP-178-(vL-vH)-Myc-CD28z-T2A-PAC(031615- | 4 | 2 | 4 | 3 |
| | R04)[SEQ ID NO: 1734] | | | | |
| 6 | CD8SP-12E10-(vL-vH)-Myc-CD28z-T2A- | 2 | 5 | 4 | 6 |
| | PAC(031615-S03)[SEQ ID NO: 1736] | | | | |
| 7 | CD8SP-AB317-(vL-vH)-Myc-CD28z-T2A- | 1 | 1 | 3 | 6 |
| | PAC(031615-T04)[SEQ ID NO: 1735] | | | | |

### T Cells Expressing MPL CAR Induce Cytotoxicity in MPL-Expressing Target Leukemia Cells

[0669] Human peripheral blood T cells isolated using CD3 magnetic beads were infected with lentiviruses expressing the CAR construct CD8SP-161-(vL-vH)-Myc-CD8TM-BBz-T2A-EGFP(090814-C03)[SEQ ID NO:1732] targeting MPL or left uninfected (UI). The indicated number of HEL cells stably expressing GLuc were cocultured with T cells expressing the CD8SP-161-(vL-vH)-Myc-CD8TM-BBz-T2A-EGFP(090814-C03)[SEQ ID NO:1732] in a 384 well plate at an Effector: Target (E:T) ratio of 1:1 for 4 hours. CAR-T cells mediated induction of lysis of target cells was assayed by increase of GLuc activity as measured by BioTek synergy plate reader by directly injecting 0.5×CTZ assay buffer containing native coeloentrazine (Nanaolight). FIG. 8 shows increase in GLuc activity following co-culture with T cells expressing MPL-specific CD8SP-161-(vL-vH)-Myc-CD8TM-BBz-T2A-EGFP(090814-C03)[SEQ ID NO:1732] CAR as compared to the uninfected T cells indicating lysis of target cells by the different MPL-CAR-T cells.

### PBMC Expressing MPL CAR Induce Lysis of Target Leukemia Cells Expressing MPL

[0670] The blood samples to isolate Peripheral blood mononuclear cells (PBMCs) were obtained from healthy de-identified adult donors. PBMC were isolated from buffy coats by Ficoll-Hypaque gradient centrifugation and re-suspended in XVIVO medium (Lonza) supplanted with 10 ng/ml soluble anti-CD3, 10 ng/ml soluble anti-CD28 and 100 IU recombinant human-IL2. PBMCs were engineered to express CD8SP-MPL-161-(vL-vH)-Myc-BBz-T2A-PAC(021015-R07)[SEQ ID NO:1658]CAR targeting MPL and CD8SP-FMC63-(vL-vH)-Myc-BBz-T2A-PAC(112014-A13)[SEQ ID NO:1467] targeting CD19 by infection with the respective lentiviral vectors followed by selection with puromycin. The PBMC expressing the indicated CARs and uninfected PBMC were co-cultured with HEL-GLuc target cells for 4 h and lysis of target cells measured by the single-step homogenous GLuc assay by injecting 0.5×CTZ assay buffer as described above. FIG. 9 shows increased killing of HEL-GLuc cells by CD8SP-MPL-161-(vL-vH)-Myc-BBz-T2A-PAC(021015-R07)[SEQ ID NO:1658] CAR-expressing PBMC as compared to the FMC63-(vL-vH)-Myc-BBz-T2A-PAC(112014-A13)[SEQ ID NO:1467]CAR-expressing PBMC or uninfected PBMC.

### PBMC Expressing MPL CAR Induce Lysis of Target Leukemia Cells Expressing MPL

[0671] The blood samples to isolate Peripheral blood mononuclear cells (PBMCs) were obtained from healthy de-identified adult donors. PBMC were isolated from buffy coats by Ficoll-Hypaque gradient centrifugation and re-suspended in XVIVO medium (Lonza) supplanted with 10 ng/ml soluble anti-CD3, 10 ng/ml soluble anti-CD28 and 100 IU recombinant human-IL2. PBMCs were engineered to express CD8SP-175-(vL-vH)-Myc-CD28z-T2A-PAC(031615-Q04)[SEQ ID NO:1733]CAR targeting MPL by infection with the lentiviral vector followed by selection with puromycin. The PBMCs expressing the indicated CAR and uninfected PBMCs were co-cultured with HEL-GLuc target cells for 4 h and lysis of target cells measured by the single-step homogenous GLuc assay by injecting 0.5×CTZ assay buffer as described above. FIG. 10 shows increased killing of HEL-GLuc cells by the CD8SP-175-(vL-vH)-Myc-CD28z-T2A-PAC(031615-Q04)[SEQ ID NO:1733] CAR expressing PBMC as compared to uninfected PBMC.

### T Cells Expressing MPL CARs Expressing CD28 Costimulatory Domain Induce Cytotoxicity in MPL-Expressing Target Leukemia Cells

[0672] Human peripheral blood T cells isolated using CD3 magnetic beads were infected with lentiviruses expressing the CAR constructs CD8SP-161-(vL-vH)-Myc-CD28z-T2A-PAC(021715-Z07)[SEQ ID NO:1731], CD8SP-175-(vL-vH)-Myc-CD28z-T2A-PAC(031615-Q04)[SEQ ID NO:1733], CD8SP-178-(vL-vH)-Myc-CD28z-T2A-PAC(031615-R04)[SEQ ID NO:1734], and CD8SP-AB317-(vL-vH)-Myc-CD28z-T2A-PAC(031615-T04)[SEQ ID NO:1735] targeting MPL. Cells were selected with puromycin and expanded. HEL cells stably expressing GLuc were cocultured with T cells expressing the CARs at an Effector: Target (E:T) ratio of 10:1 for 4 hours. CAR-T cells mediated induction of lysis of target cells was assayed by increase of GLuc activity. FIG. 11 shows increase in GLuc activity, indicating lysis of target cells, following co-culture with T cells expressing MPL-specific CARs, which was stronger with the CD8SP-161-(vL-vH)-Myc-CD28z-T2A-PAC(021715-Z07)[SEQ ID NO:1731], CD8SP-175-(vL-vH)-Myc-CD28z-T2A-PAC(031615-Q04)[SEQ ID NO:1733], and CD8SP-AB317-(vL-vH)-Myc-CD28z-T2A-PAC(031615-T04)[SEQ ID NO:1735] constructs and modest with the CD8SP-178-(vL-vH)-Myc-CD28z-T2A-PAC(031615-R04)[SEQ ID NO:1734] construct as compared to the uninfected T cells.

### T Cells Expressing MPL CARs Expressing CD28 Costimulatory Domain Induce Cytotoxicity in MPL-Expressing Target Leukemia Cells

[0673] Human peripheral blood T cells isolated using CD3 magnetic beads were infected with lentiviruses expressing the CAR constructs CD8SP-161-(vL-vH)-Myc-CD28z-T2A-PAC(021715-Z07)[SEQ ID NO:1731], CD8SP-175-(vL-vH)-Myc-CD28z-T2A-PAC(031615-Q04)[SEQ ID NO:1733], CD8SP-178-(vL-vH)-Myc-CD28z-T2A-PAC(031615-R04)[SEQ ID NO:1734], CD8SP-AB317-(vL-vH)-Myc-CD28z-T2A-PAC(031615-T04)[SEQ ID NO:1735], CD8SP-12E10-(vL-vH)-Myc-CD28z-T2A-PAC(031615-S03)[SEQ ID NO:1736] and CD8 SP-VB22Bw4-(vL-vH)-Myc-CD28z-T2A-PAC(031615-B06)[SEQ ID NO:3536] targeting MPL. Cells were selected with puromycin and expanded. Jurkat cells stably expressing MPL and GLuc were cocultured with T cells expressing the CARs at an Effector: Target (E:T) ratio of 10:1 for 4 hours. CAR-T cells mediated induction of lysis of target cells was assayed by increase of GLuc activity as measured by BioTek synergy plate reader by directly injecting 0.5×CTZ assay buffer containing native coeloentrazine (Nanaolight). FIG. 12 shows increase in GLuc activity, indicating lysis of target cells, following co-culture with T cells expressing MPL-specific CARs, which was stronger with the CD8SP-161-(vL-vH)-Myc-CD28z-T2A-PAC(021715-Z07)[SEQ ID NO:1731], CD8SP-175-(vL-vH)-Myc-CD28z-T2A-PAC(031615-Q04)[SEQ ID NO:1733], CD8SP-AB317-(vL-vH)-Myc-CD28z-T2A-PAC(031615-T04)[SEQ ID NO:1735], and CD8SP-12E10-(vL-vH)-Myc-CD28z-T2A-PAC(031615-S03)[SEQ ID NO:1736] constructs and modest with the CD8SP-178-(vL-vH)-Myc-CD28z-T2A-PAC(031615-R04)[SEQ ID NO:1734] and CD8 SP-VB22Bw4-(vL-vH)-Myc-CD28z-T2A-PAC(031615-B06)[SEQ ID NO:3536] constructs as compared to the uninfected T cells.

### NK92MI Cells Expressing MPL-Specific 161-CAR Induce Cytotoxicity in K562 and HEL.92.1.7 Cells

[0674] Natural Killer cell derived NK92MI (ATCC) cells were stably transduced with lentiviral vectors expressing the indicated CAR constructs targeting CD8SP-161-(vL-vH)-Myc-CD8TM-BBz-T2A-EGFP(090814-C03)[SEQ ID NO:1732] and CD8SP-FMC63-(vL-vH)-Myc-BBz-T2A-EGFP(070814-D06)[SEQ ID NO:3535]. Cells were subsequently co-cultured overnight with HEL 92.1.7 cells that had been engineered to express GLuc. CAR-expressing NK92MI cells-mediated induction of lysis of target cells was assayed by increase of GLuc activity as measured by directly injecting 0.5×CTZ assay buffer containing native coeloentrazine (Nanaolight). FIG. 13 shows increase in GLuc activity, indicating lysis of target cells, following co-culture with NK92MI cells expressing MPL-specific CD8SP-161-(vL-vH)-Myc-CD8TM-BBz-T2A-EGFP(090814-C03)[SEQ ID NO:1732]CAR.

### NK92MI Cells Expressing MPL-Specific CARs Induce Cytotoxicity in K562-MPL Cells

[0675] Natural Killer cell derived NK92MI (ATCC) cells were stably transduced with lentiviral vectors expressing the indicated CAR constructs targeting MPL followed by selection with puromycin. Cells were subsequently co-cultured overnight with K562 cells that had been engineered to express MPL and GLuc. The effector to target (E:T) ratio was 5:1. MPL-CAR-expressing NK92MI cells-mediated induction of lysis of target cells was assayed by increase of GLuc activity as measured by directly injecting 0.5×CTZ assay buffer containing native coeloentrazine (Nanaolight). FIG. 14 shows increase in GLuc activity, indicating lysis of target cells, following co-culture with NK92MI cells expressing MPL-specific CARs.

### Cytokine Production by T Cells Expressing MPL-Specific CAR Constructs on Exposure to Target Cells Expressing MPL

[0676] Human peripheral blood T cells isolated using CD3 magnetic beads were infected with lentiviruses expressing the CD8SP-MPL-161-(vL-vH)-Myc-BBz-T2A-PAC(021015-R07)[SEQ ID NO:1658] and CD8SP-161-(vL-vH)-Myc-CD28z-T2A-PAC(021715-Z07)[SEQ ID NO:1731] CAR constructs targeting MPL. Cells were selected with puromycin and expanded. HEL cells were co-cultured with T cells expressing the CARs for approximately 96 hours and secretion of TNFα in the supernatant measured by ELISA.

[0677] FIG. 15 shows increased secretion of TNFα upon co-culture of T cells expressing CAR targeting MPL with HEL cells as compared to uninfected T cells used as controls.

### In Vivo Efficacy of MPL CAR-Expressing Immune Effector Cells Against Leukemia

[0678] The in vivo efficacy of MPL CAR-expressing NK92MI cells against HEL leukemia cell line model was tested in NOD/SCID/γ^{-/-} (NSG) mouse model. On day 0, the NSG mice (Jackson Lab) were sub-lethally irradiated at a dose of 275 cGy. 24 hours post irradiation (day 1), mice were injected with 1×10⁶ HEL cells intravenously. On day 9 and day 19, the mice were treated with 2 million NK92MI cells expressing the indicated CAR constructs intravenously and followed for survival. FIG. 16 shows that the median survival of mice given CD8SP-161-(vL-vH)-Myc-CD8TM-BBz-T2A-EGFP(090814-C03)[SEQ ID NO:1732]-expressing NK92MI cells was 31.5 days, which was significantly higher than mice given unmodified NK92MI cells (28.5 days; p=0.03) or those given NK92MI cells expressing a control CAR CD8SP-4C3-(vL-vH)-Myc-BBz-T2A-EGFP(100814-K06)[SEQ ID NO:3537]; 28 days; p=0.04).

Chimeric Antigen Receptors Targeting CD19 with scFV Fragments Derived from a Humanized CD19 Antibody

[0679] The CD19 CARs in current clinical trials contain scFV fragments derived from murine monoclonal antibodies. The development of antibodies against the murine antibody fragments not only contributes to lack of persistence of T cells expressing such CARs but could also lead to allergic reactions, including anaphylaxis. To overcome this limitation, a CD19 CARs was generated containing an scFv fragment (SEQ ID NO: 566) derived from a humanized CD19 monoclonal antibody huCD19-Bu12 (or Bu12) described in PCT/US2008/080373. Another CAR was constructed containing an scFv (SEQ ID NO: 567) fragment derived from a murine antibody described in U.S. Pat. No. 7,112,324 and was designated CD19MM.

[0680] The scFV fragments based on CD19-Bu12 and CD19MM were designed consisting from 5′ to 3′ ends of a nucleotide sequences encoding a signal peptide derived from human CD8 molecule, the vL fragment, a (Gly₄Ser)×3 linker and the vH fragment. The sequence of the scFV fragments were codon-optimized using GeneArt™ software (Thermo Fisher Scientific) and gene-fragments encoding the optimized sequences synthesized using a commercial vendor. The gene fragments were used as templates in PCR reaction using custom primers and then cloned in a modified pLENTI-EF1a vector containing the hinge, transmembrane and cytosolic domains of the CAR cassette by standard molecular biology techniques. The final CAR construct CD8SP-2-CD19MM-(vL-vH)-Myc-BBz-T2A-PAC(062915-D03)[SEQ ID NO:1471] consisted of human CD8 signal peptide, fused in frame to the CD19MM scFv fragment (SEQ ID NO: 567), a Myc epitope tag, the hinge and transmembrane domain of human CD8 (SEQ ID NO: 842), the cytosolic domain of human 41BB (CD137) receptor (SEQ ID NO: 845), the cytosolic domain of human CD3z (SEQ ID NO: 846), a T2A ribosomal skip sequence (SEQ ID NO: 832) and a cDNA encoding a variant of puromycin resistance gene (SEQ ID NO: 850). A CAR construct CD8SP-CD19Bu12-(vL-vH)-Myc-BBz-T2A-PAC(082815-P08)[SEQ ID NO:1470] based on CD19Bu12 scFv fragment (SEQ ID NO: 566) was designed similarly. The CAR construct CD8SP-FMC63-(vL-vH)-Myc-BBz-T2A-PAC(112014-A13)[SEQ ID NO:1467] was designed based on the previously described CD19 CAR containing the scFV fragment (SEQ ID NO: 564) derived from mouse monoclonal antibody FMC63. Finally, the CAR construct CD8SP-KSHV-4C3-(vL-vH)-Myc-BBz-T2A-PAC(042315-N01)[SEQ ID NO:1643] contains an scFV fragment (SEQ ID NO: 718) derived from an antibody against a KSHV encoded K8.1 protein and was used as a negative control. Lentiviruses encoding the above CARs were generated using 293FT and used to infect T cells as described previously for MPL CARs.

### CD19-CARs are Expressed on the Surface of T Cells

[0681] Purified T cells were infected with lentiviruses encoding the different Myc-tagged CAR constructs targeting MPL (CD8SP-FMC63-(vL-vH)-Myc-BBz-T2A-PAC(112014-A13)[SEQ ID NO:1467], CD8 SP-CD19Bu12-(vL-vH)-Myc-BBz-T2A-PAC(082815-P08)[SEQ ID NO:1470], CD8SP-2-CD19MM-(vL-vH)-Myc-BBz-T2A-PAC(062915-D03)[SEQ ID NO:1471] and CD8SP-KSHV-4C3-(vL-vH)-Myc-BBz-T2A-PAC(042315-N01)[SEQ ID NO:1643]) and selected with puromycin. The expression of CAR on T cells (both puromycin selected and unselected) was examined by immunofluorescence staining with an APC-conjugated Myc-antibody followed by FACS analysis as described previously. FIG. 17 shows increased expression of the different CD19 CARs (shown with grey lines) on the surface of T cells as determined by staining with APC-Myc as compared to the uninfected T cells (UI; shown with dotted lines). The expression of the different CAR constructs was further increased following puromycin selection.

### Jurkat Cells Expressing CD19 CARs are Capable of Binding CD19-GGSG-NLuc Fusion Protein

[0682] Jurkat-NFAT-Luc cells were stably transduced with the different CD19 targeted CAR constructs and selected in puromycin. Cells were incubated with FLAG-CD19-ECD-GGSG-NLuc-AcV5 [SEQ ID NO:2671] supernatant and after extensive washes assayed for NLuc activity essentially as described previously. FIG. 18 shows strong binding of Jurkats expressing CD8SP-CD19Bu12-(vL-vH)-Myc-BBz-T2A-PAC(082815-P08)[SEQ ID NO:1470], CD8SP-2-CD19MM-(vL-vH)-Myc-BBz-T2A-PAC(062915-D03)[SEQ ID NO:1471] and CD8SP-FMC63-(vL-vH)-Myc-BBz-T2A-PAC(112014-A13)[SEQ ID NO:1467], and CD19Bu12(vL-vH)-Myc-BBz-PAC-P08 CAR constructs to FLAG-CD19-ECD-GGSG-NLuc-AcV5 [SEQ ID NO:2671] supernatant, while no significant binding was observed on parental cells or those expressing CD8SP-KSHV-4C3-(vL-vH)-Myc-BBz-T2A-PAC(042315-N01)[SEQ ID NO:1643] control CAR.

### T Cells Expressing CD19 CARs are Capable of Binding CD19-GGSG-NLuc Fusion Protein

[0683] Purified T cells were stably transduced with the different CD19-targeted CAR constructs and selected in puromycin. Cells were incubated with FLAG-CD19-ECD-GGSG-NLuc-AcV5 [SEQ ID NO:2671] supernatant and after extensive washes assayed for NLuc activity essentially as described previously. FIG. 19 shows strong binding of T cells expressing CD8SP-CD19Bu12-(vL-vH)-Myc-BBz-T2A-PAC(082815-P08)[SEQ ID NO:1470], CD8SP-2-CD19MM-(vL-vH)-Myc-BBz-T2A-PAC(062915-D03)[SEQ ID NO:1471] and CD8SP-FMC63-(vL-vH)-Myc-BBz-T2A-PAC(112014-A13)[SEQ ID NO:1467], and CD19Bu12(vL-vH)-Myc-BBz-PAC-P08 CAR constructs to FLAG-CD19-ECD-GGSG-NLuc-AcV5 [SEQ ID NO:2671] supernatant, while no significant binding was observed on uninfected T cells (UI) or those expressing CD8SP-KSHV-4C3-(vL-vH)-Myc-BBz-T2A-PAC(042315-N01)[SEQ ID NO:1643] control CAR.

### T Cells Expressing CD19 CARs Induce Cytotoxicity in CD19-Expressing RAJI Lymphoma Cells

[0684] Human peripheral blood T cells isolated using CD3 magnetic beads were infected with lentiviruses expressing the indicated CAR constructs targeting CD19. Cells were left unselected or selected with puromycin and expanded. RAJI cells stably expressing GLuc were cocultured with T cells expressing the CARs at an Effector: Target (E:T) ratio of 10:1 for 96 hours. CAR-T cells mediated induction of lysis of target cells was assayed by increase of GLuc activity. FIG. 20 shows increase in GLuc activity, indicating lysis of target cells, following co-culture with T cells expressing CD19-specific CARs as compared to uninfected T cells (T-UI) or those expressing the control CAR 4C3. The increased cell death was seen in CD19 CAR-expressing T cells that had been selected with puromycin as well as those that had not been selected.

### T Cells Expressing CD19 CARs Induce Cytotoxicity in CD19-Expressing RAJI Lymphoma Cells

[0685] Human peripheral blood T cells isolated using CD3 magnetic beads were infected with lentiviruses expressing the indicated CAR constructs targeting CD19. Cells were left unselected or selected with puromycin and expanded. RAJI cells stably expressing GLuc were cocultured with T cells expressing the CARs at the indicated Effector: Target (E:T) ratios for 4 hours. CAR-T cells mediated induction of lysis of target cells was assayed by increase of GLuc activity. FIG. 21 shows increase in GLuc activity, indicating lysis of target cells, following co-culture with T cells expressing CD19-specific CARs as compared to uninfected T cells (T-UI) or those expressing the control 4C3 CAR. In contrast to the results in the preceding section, the increased cell death was seen primarily in CD19 CAR-expressing T cells that had been selected with puromycin. This could be attributable to the fact that cell death was measured after 96 h of co-culture in the preceding example while it was measured after only 4 h in the current example.

### In Vivo Efficacy of CD19MM-BBz and CD19Bu12-BBz CAR T Cells

[0686] Human peripheral blood T cells isolated using CD3 magnetic beads were infected with lentiviruses expressing the indicated CAR constructs targeting CD19 or the control CAR (4C3) and expanded in vitro with (with puro) or without (No puro) puromycin selection. NSG mice (Jackson Lab) were sub-lethally irradiated at a dose of 175 cGy. 24 hours post irradiation (day2), mice were injected with 2.5×10⁴ RAJI cells via tail-vein. On day3, the mice (n=5 for each group) were treated with 1 million T cells that had been infected with the CD8SP-CD19Bu12-(vL-vH)-Myc-BBz-T2A-PAC(082815-P08)[SEQ ID NO:1470], CD8SP-2-CD19MM-(vL-vH)-Myc-BBz-T2A-PAC(062915-D03)[SEQ ID NO:1471] encoding lentiviruses and either selected with puromycin (with puro) or left unselected (No puro). Control mice (n=5) were injected with 1 million T cells expressing the CD8SP-KSHV-4C3-(vL-vH)-Myc-BBz-T2A-PAC(042315-N01)[SEQ ID NO:1643] CAR or given no T cells. FIG. 22 shows the survival of mice in each group. The median survival of mice given RAJI cells alone and CD8SP-KSHV-4C3-(vL-vH)-Myc-BBz-T2A-PAC(042315-N01)[SEQ ID NO:1643]CAR-T cells were 17 days and 21 days respectively. In contrast, the median survival of mice which received CD8SP-2-CD19MM-(vL-vH)-Myc-BBz-T2A-PAC(062915-D03)[SEQ ID NO:1471] CAR-T cells with and without puromycin selection were 26 and 30 days, respectively. Similarly, the median survival of mice which received CD8SP-CD19Bu12-(vL-vH)-Myc-BBz-T2A-PAC(082815-P08)[SEQ ID NO:1470] CAR-T cells with and without puromycin selection were 30 and 31 days, respectively. Thus, infusion of T cells expressing CD8SP-CD19Bu12-(vL-vH)-Myc-BBz-T2A-PAC(082815-P08)[SEQ ID NO:1470], CD8SP-2-CD19MM-(vL-vH)-Myc-BBz-T2A-PAC(062915-D03)[SEQ ID NO:1471] CARs lead to statistically significant improvement in survival of mice in this RAJI xenograft model of lymphoma as compared to mice given no T cells or those given T cells expressing the CD8SP-KSHV-4C3-(vL-vH)-Myc-BBz-T2A-PAC(042315-N01)[SEQ ID NO:1643] control CAR.

Applications of Anti-CD19 Humanized CAR Constructs when Used Alone or in Combination with Other Strategies

[0687] The humanized CARs of this invention can be expressed in the following way to enhance their safety and efficacy:

[0688] Although we have used lentiviral methods for expression of the humanized CARs, alternate methods such as use of mRNA/DNA transfection by electroporation or by transient perturbation in cell membrane can be used to express them in the target cells. The mRNA transfection may involve natural or stabilizing nucleotides to enhance the longevity of expression. Alternate methods for gene delivery, such as use of retroviral, adenoviral and adeno-associated viral vectors have been well described in the literature and are known to those skilled in the art. Alternate promoters for expression of the humanized CAR including CMV, MSCV etc. have been described in the literature.

[0689] The CARs of the present invention could be also expressed with suitable selection markers, such as extracellular domain sequences of EGFR, tEGFR, CD19, BCMA (SEQ ID NOs: 853-856), to positively select CAR-expressing cells and to reduce the clonal diversity of the final T cell product before it is used for infusion into the patient. Reduction in clonal-diversity of the CAR-T cell product will lead to reduction in the incidence and severity of Graft versus Host Disease (GVHD) as it will reduce the probability and number of host-reactive T cell clones in the product. Alternate resistance gene, such as CNB30 (SEQ ID NO: 852), which confers resistance to calcineurin inhibitors, can be included to positively select CAR-expressing cells and to reduce the clonal diversity of the final T cell product before it is used for infusion into the patient to reduce the incidence of GVHD.

[0690] One of the limitations of CD19 CAR-T cell therapy is long-term depletion of normal B cells, which also express CD19 antigen. To circumvent this problem, CD19 CAR-T cell therapy can be combined with knock-out or mutation of endogenous CD19 in normal hematopoietic stem cells using CRIPS/Cas9, TALONS or other suitable gene editing methods which are known in the art. The epitope of CD19 bound by the CD19 CAR-T cells in current clinical use has been mapped to exons 2-4. Thus, missense or nonsense mutations can be generated in exon 2 (or other suitable exons/regions that are recognized by CD19Bu12 and CD19MM CAR T-cells) of autologous or allogeneic hematopoietic stem cells using CRISP/Cas9, Zn finger nucleases, Talons or other methods known in the art. The patient can be given CD19 CAR-T cells infusion to control his/her disease and an autologous or allogeneic transplant using CD19 deleted/mutated hematopoietic stem cells. As the B cells that will originate from the modified stem cells will not be targeted by CD19-CAR-T cells, the patient will escape B cell aplasia which is a common side effect of CD19 CAR-T cells.

[0691] The CD19 targeted humanized CARs of the present invention can be also combined with CAR targeting other antigens, such as CD22 and CD20, to overcome resistance due to loss of CD19 antigens. Such bispecific CARs have been described in the literature and are known to one skilled in the art.

[0692] The humanized CAR constructs of the present invention can be expressed not only in T cells but in defined subsets of T cells such as CD4 and CD8 T cells, central memory T cells, naïve T cells and regulatory T cells. They can be also expressed in NK cells, NK92 cell line, hematopoietic stem cells, and iPSC derived stem cells.

[0693] To control their activity, the humanized CAR of the current invention can be expressed in an inducible fashion as is known in the art (Roybal et al., Cell 164:770-9, 2016; Wu et al., Curr Opin Immunol 35:123-30, 2015; Wu et al., Science 350:aab4077, 2015)). Alternatively, suicide genes (such as icaspase 9), can be used to control the activity of CAR-T cells in vivo.

[0694] The activity of the CAR-T cells of this invention can be further modulated by use of inhibitors of various signaling pathways, such as mTOR and PI3-AKT pathways. Furthermore, various cytokines, chemokines and their receptors, and costimulatory ligands (e.g. 41BB) and their receptor (e.g. 41BB-receptor or CD137) can be coexpressed with the humanized CAR of the current invention. Novel Chimeric Antigen Receptors expressing viral and cellular signaling proteins

[0695] As discussed previously, the CAR constructs in clinical trials include one or more costimulatory domains derived from 41BB, CD28 or both. These costimulatory domains are generally derived from the cytosolic signaling domains of TNF (Tumor Necrosis Factor) family receptors and are believed to activate signaling pathways, such as NF-κB and AKT, which are believed to contribute to increased proliferation and survival of CAR-T cells, resulting in their expansion and persistence in vivo. However, tonic signaling through these costimulatory domains when expressed as part of an artificial receptor, such as a CAR, is not physiological and is not under the control of feedback regulatory mechanisms that are normally present to control signaling via the TNF family receptors from which they are derived. Therefore, it is conceivable that robust and persistent activation of signaling pathways by the costimulatory domains present in the current CAR constructs contributes to the cytokine release syndrome and neurological toxicity, which re a major side effect of current CAR-T cells based therapies. It is important to note in this context that cytokine release syndrome was a major side effect in human clinical trials of a CD28 super-agonist antibody.

[0696] The present invention circumvents the above limitation of the current CAR vectors by deleting the costimulatory domains. The costimulatory function instead is provided by viral and cellular proteins that are known to constitutively activate various pro-survival signaling pathways and/or block cell death. The viral proteins suitable for this purpose include viral FLICE Inhibitory Protein (vFLIP) K13 encoded by the Kaposi's sarcoma associated herpesvirus (also known as human herpesvirus 8), vFLIP MC159 and MC160 from the molluscum contagiosum virus (MCV), E8 from the equine herpesvirus 2 (EHV2), vFLIP encoded by the bovine herpesvirus 4, vFLIP encoded by herpesvirus mecaca, vFLIP encoded by herpesvirus saimiri, cFLIP-L isoform or MRIT-α, cFLIP-p22 deletion mutant or MRIT-p22, HTLV1-Tax, HTLV2-Tax and HTLV2-Tax-RS mutant (Jeang, Cytokine Growth Factor Rev 12:207-17., 2001; Sieburg et al., J Virol 78:10399-409, 2004). In contrast to artificial and non-physiological nature of the pro-survival signal provided by the costimulatory domains that are components of the CAR constructs in common use today, these signaling proteins have evolved to provide constitutive pro-survival signals to the cells in which they are expressed.

### KSHV-Encoded Viral FLICE Inhibitory Protein K13 Immortalizes T Cells

[0697] vFLIP K13 was originally believed to protect KSHV-infected cells from death receptor-induced apoptosis (Bertin et al., Proc Natl Acad Sci USA 94:1172-6, 1997; Hu et al., J Biol Chem 272:9621-4, 1997; Thome et al., Nature 386:517-21, 1997)). However, it was subsequently reported that K13 selectively activates the NF-κB pathway (Chaudhary et al., Oncogene 18:5738-46, 1999; Chugh et al., Proc Natl Acad Sci USA 102:12885-90, 2005) by interacting with a ˜700 kDa IκB kinases (IKK) complex which consists of IKK1/IKKα, IKK2/IKKβ and NEMO/IKKγ (Chaudhary et al., Oncogene 18:5738-46, 1999; Liu et al., J Biol Chem 277:13745-51., 2002). HTLV1-encoded Tax protein is also known to activate the NF-κB pathway by binding to NEMO/IKKγ. Tax has been also shown to immortalize T cells (Ren et al., J Biol Chem 287:34683-93, 2012; Robek and Ratner, J Virol 73:4856-65, 1999).

[0698] Human peripheral blood mononuclear cells (PBMC), CD3+ve T cells and CD3-ve cells (designated B cells) were cultured in XVIVO medium (Lonza) supplanted with 10 ng/ml soluble anti-CD3, 10 ng/ml soluble anti-CD28 and 100 IU recombinant human-IL2. Cells were cultured at 37° C., in a 5% CO2 humidified incubator, and after 1 day infected with an empty lentiviral vector (pLENTI) carrying blasticidin resistance gene and lentiviral vectors expressing C-terminal Flag-Tagged K13 (pLENTI-K13-FLAG), a deletion mutant of K13 (pLENTI-K13Δ45-48-FLAG) that is known to lack NF-κB activity (Matta et al., Oncogene 27:5243-53, 2008), and HTLV1-Tax protein (pLENTI-Tax). The nucleotide and protein sequences of K13 are provided in SEQ ID NOs: 866 and 2629, respectively. Approximately 1 day post-infection, cells were selected with blasticidin. After selection, the cells were grown in XVIVO medium and IL2 withdrawn. Table 26 shows that both PBMC and T cells infected with K13-Flag and HTLV1-Tax encoding vectors continued to proliferate in culture long after IL2 withdrawal, while no long term proliferating cells were obtained with cultures infected with empty lentiviral vector or those infected with K13445-48-FLAG encoding vector. These results demonstrate that similar to HTLV1-Tax, K13 can promote long term proliferation and immortalization of primary T cells and PBMC and its NF-κB activity is essential for this process.

TABLE 26
Table: K13-induced immortalization
of primary lymphocytes.

| | PBMCs | T-cells | B-cells |
|---|---|---|---|
| Vector | − | − | − |
| K13 | + | + | − |
| K13-Δ45-48 | − | − | − |
| HTLV-Tax | + | + | − |

[0699] Expression of K13-FLAG in the surviving culture of T cells was examined by immunofluorescence staining with FITC-conjugated FLAG antibody followed by FACS analysis. FIG. 23 shows increased staining with FITC-FLAG antibody in K13-expressing T cells as compared to uninfected T cells. The immunophenotype of K13 immortalized T cells was examined by staining with CD4 and CD8 antibodies. FIG. 23 shows that K13 immortalized T cells are CD8+/CD4− (49%), CD8−/CD4+(21%) and CD8+/CD4+(29%). In contrast, a majority of uninfected T cells persisting in culture were CD8+/CD4− (94%). There was no significant difference in the expression of CD69 between uninfected and K13-immortalized T cells.

### FMC63 CAR Expressing K13 Retain the Capacity to Induce Lysis of RS4; 11 Target Cells

[0700] T cells were infected with lentiviral vectors encoding GFP, CD8SP-FMC63-(vL-vH)-Myc-BBz-T2A-EGFP(070814-D06)[SEQ ID NO:3535], CD8SP-FMC63-(vL-vH)-Myc-BBz-T2A-PAC(112014-A13)[SEQ ID NO:1467], and CD8SP-FMC63-(vL-vH)-Myc-BBz-P2A-K13-Flag-T2A-PAC(111014-Y11)[SEQ ID NO:1197]. The cells infected with PAC containing vectors were selected with puromycin or left unselected. FIG. 24 shows that CD8SP-FMC63-(vL-vH)-Myc-BBz-T2A-PAC(112014-A13)[SEQ ID NO:1467], and CD8SP-FMC63-(vL-vH)-Myc-BBz-P2A-K13-Flag-T2A-PAC(111014-Y11)[SEQ ID NO:1197]-expressing T cells that have been selected with puromycin induce specific lysis of RS411 cells as measured by Gluc assay.

### T Cells Expressing CAR Containing K13, MC159 or Tax2 Induce Specific Lysis of RAJI-Gluc Cells

[0701] Human peripheral blood T cells isolated using CD3 magnetic beads were infected with lentiviruses expressing the following constructs targeting CD19. The features of the constructs are as follows:

[0702] CD8SP-FMC63-(vL-vH)-Myc-BBz-T2A-PAC(112014-A13)[SEQ ID NO:1467]: A standard FMC63 based conventional CAR II containing a 41BB costimulatory domain and a CD3z domain separated by a T2A sequence from a Puromycin resistance gene.

[0703] CD8SP-FMC63-(vL-vH)-Myc-z-T2A-PAC(111214-D05)[SEQ ID NO:3538]: A FMC63-based conventional CAR I that lacks a 41BB co-stimulatory domain and contains a CD3z activation domain.

[0704] CD8SP-FMC63-(vL-vH)-Myc-BBz-P2A-K13-Flag-T2A-PAC(111014-Y11)[SEQ ID NO:1197]: A standard FMC63 based conventional CAR II containing a 41BB costimulatory domain and a CD3z domain, a P2A cleavable linker, a K13-Flag sequence, a T2A cleavable linker, and a Puromycin resistance gene.

[0705] CD8SP-FMC63-(vL-vH)-Myc-z-P2A-K13-Flag-T2A-PAC(111614-B05)[SEQ ID NO:927]: A standard FMC63 based conventional CAR I containing a CD3z domain, a P2A cleavable linker, a K13-Flag sequence, a T2A cleavable linker, and a Puromycin resistance gene.

[0706] CD8SP-FMC63(vL-vH)-Myc-BBz-P2A-MC159-Flag-T2A-PAC(111014-Z13)[SEQ ID NO:1751]: A standard FMC63 based conventional CAR II containing a 41BB costimulatory domain and a CD3z domain, a P2A cleavable linker, a MC159-Flag sequence, a T2A cleavable linker, and a Puromycin resistance gene.

[0707] CD8SP-FMC63(vL-vH)-Myc-z-P2A-MC159-Flag-T2A-PAC(112614-006)[SEQ ID NO:1750] A standard FMC63 based conventional CAR I containing a CD3z domain, a P2A cleavable linker, a MC159-Flag sequence, a T2A cleavable linker, and a Puromycin resistance gene.

[0708] CD8SP-FMC63(vL-vH)-Myc-BBz-P2A-Flag-HTLV2-TAX-RS-T2A-PAC(010100-N01)[SEQ ID NO:1752]: A standard FMC63 based conventional CAR II containing a 41BB costimulatory domain and a CD3z domain, a P2A cleavable linker, an RS mutant of HTLV2-encoded TAX, a T2A cleavable linker, and a Puromycin resistance gene.

[0709] Cells were left unselected or selected with puromycin and expanded. RAJI cells stably expressing Gluc were cocultured with T cells expressing the CARs at the Effector: Target (E:T) ratio of 10:1 for 4 hours. CAR-T cells mediated induction of lysis of target cells was assayed by increase of GLuc activity. FIG. 25 shows increase in GLuc activity, indicating lysis of target cells, following co-culture with T cells expressing CD19-specific CARs as compared to uninfected T cells (T-UI) or those expressing the control CAR targeting 4C3 (SEQ ID NO: 1643). These results demonstrate that incorporation of K13, MC159 or HTLV2-Tax (Tax2) does not negatively impact the killing ability of CARs with or without the presence of 41BB domain.

[0710] The above experiment was repeated at E:T ratio of 1:1 and cell death was assayed after 48h. FIG. 26 confirms that incorporation of K13, MC159 or HTLV2-Tax (Tax2) does not negatively impact the killing ability of CARs with or without the presence of 41BB domain.

[0711] The experiment was repeated with cells that had been selected with puromycin and were in culture for approximately 2 months. FIG. 27 shows that the T cells expressing CAR containing MC159 and HTLV2-Tax continue to exert cytotoxicity after 2 months in culture while the T cells expressing the other CARs lost this ability.

In Vivo Efficacy of CAR T Cells Containing vFLIPs and Tax

[0712] Human peripheral blood T cells isolated using CD3 magnetic beads were infected with lentiviruses expressing the indicated CAR constructs targeting CD19. NSG mice (Jackson Lab) were sub-lethally irradiated at a dose of 175 cGy. 24 hours post irradiation (day2), mice were injected with 2.5×10⁴ RAJI cells via tail-vein. On day3, the mice (n=3 for each group) were treated with 1 million T cells that had been infected with the CAR encoding lentiviruses. Table 27 shows the survival of mice in each group. These results demonstrate that highest survival (38 days) is observed in mice injected with T cells expressing FMC63 based CAR CD8SP-FMC63-(vL-vH)-Myc-z-P2A-K13-Flag-T2A-PAC(111614-B05)[SEQ ID NO:927] that lacks 41BB costimulatory domain but expresses K13.

TABLE 27

| | Median |
|---|---|
| CAR | Survival |
| CD8SP-FMC63-(vL-vH)-Myc-BBz-T2A-PAC(112014-A13) | 32 |
| [SEQ ID NO: 1467] | |
| CD8SP-FMC63-(vL-vH)-Myc-z-T2A-PAC(111214-D05) | 32 |
| [SEQ ID NO: 3538] | |
| CD8SP-FMC63-(vL-vH)-Myc-BBz-P2A-K13-Flag-T2A- | 32 |
| PAC(111014-Y11)[SEQ ID NO: 1197] | |
| CD8SP-FMC63-(vL-vH)-Myc-z-P2A-K13-Flag-T2A-PAC | 38 |
| (111614-B05)[SEQ ID NO: 927] | |
| CD8SP-FMC63(vL-vH)-Myc-BBz-P2A-MC159-Flag-T2A- | 24 |
| PAC(111014-Z13)[SEQ ID NO: 1751] | |
| CD8SP-FMC63(vL-vH)-Myc-z-P2A-MC159-Flag-T2A- | 20 |
| PAC(112614-C06)[SEQ ID NO: 1750] | |
| CD8SP-FMC63(vL-vH)-Myc-BBz-P2A-Flag-HTLV2-TAX- | 25 |
| RS-T2A-PAC(010100-N01)[SEQ ID NO: 1752] | |
| Control | 20 |

Inducible Expression of K13 by Fusion with FKBP

[0713] To control the expression of K13, different vectors were generated expressing K13 in fusion with one or two copies of N-terminal FKBP-based switch or dimerization domains. In addition, a construct was constructed in which 2 copies of FKBP domain were fused at the N-terminal with a myrisotylation signal and at C-terminus with K13. The above constructs of K13 were either expressed alone or in constructs expressing different CAR constructs.

[0714] NF-κB reporter assay was carried out essentially as described (Chaudhary et al., Oncogene 18:5738-46, 1999). The indicated constructs were transiently transfected in 293FT cells along with a luciferase reporter construct driven by 4 copies of NF-κB binding site and a RSV-LacZ reporter construct. Cells were left untreated or treated with AP20187, which dimerizes the FKBP domains, resulting in activation of K13 signaling. Approximately 24 hr later, cells were lysed and NF-κB-Luc and LacZ activities measured in cell lysates. NF-κB-Luc activity was normalized relative to LacZ activity to control for difference in transfection efficiency. As shown in FIG. 28A, treatment with AP20187 (100 nM) led to increase in K13-induced NF-κB-Luc activity in all constructs in which K13 was expressed in fusion with FKBP. Essentially similar results were obtained when RS mutant of HTLV2 encoded Tax was expressed in fusion with FKBP (FIG. 28B). Thus, activity of K13 and Tax can be controlled by fusion with FKBP and subsequent administration of AP20187 when they are expressed alone or as part of CAR constructs.

Activation of K13 Activity by AP20187 does not Impair the Ability of CARs to Induce Cell Death

[0715] Human peripheral blood T cells isolated using CD3 magnetic beads were infected with lentiviruses expressing the constructs CD8SP-FMC63(vL-vH)-Myc-z-P2A-FKBP-K13-FLAG-T2A-PAC(112316-S06)[SEQ ID NO:1770] and CD8SP-161-(vL-vH)-Myc-z-P2A-FKBP-K13-FLAG-T2A-PAC(112916-U06)[SEQ ID NO: 1741] and selected with puromycin as described previously. RAJI and HEL cells stably expressing Gluc were cocultured with uninfected T cells (UI) or T cells expressing the indicated constructs [SEQ ID NO:1770] and [SEQ ID NO: 1741], respectively, at the Effector: Target (E:T) ratio of 10:1 for 4 hours in the absence and presence of 100 nM AP20187 (AP) compound. CAR-T cells mediated induction of lysis of target cells was assayed by increase of GLuc activity. FIGS. 29A and 29B show that activation of K13-mediated NF-κB activity by addition of AP20187 does not adversely affect cell killing induced by the two CAR constructs that coexpress FKBP-K13.

### Cytotoxic Activity of CARs I and II Coexpressing K13, MC159, HTLV2-Tax and HTLV2-Tax RS Mutant

[0716] Human peripheral blood T cells isolated using CD3 magnetic beads were infected with lentiviruses expressing the indicated constructs expressing CAR I and II targeting MPL and coexpressing different accessory modules (FIG. 30A). Cells were selected with puromycin as described previously. HEL cells stably expressing Gluc were cocultured with uninfected T cells (UI) or T cells expressing the indicated constructs at the Effector: Target (E:T) ratio of 10:1 for 4 hours. CAR-T cells mediated induction of lysis of target cells was assayed by increase of GLuc. FIG. 30A shows induction of target cell death by different MPL-directed CAR constructs that coexpress K13, MC159, HTLV2-Tax and HTLV2-Tax RS mutant.

[0717] Essentially a similar experiment was conducted with a construct (SEQ ID NO: 983) expressing CAR I targeting CD32 and coexpressing K13. FIG. 30B shows effective induction of HEL cell death by T cells expressing this construct as measured by Gluc assay.

### Cytotoxic Activity of Backbone 1 Constructs Comprising a Conventional CARs I Targeting TROP2 and Coexpressing K13

[0718] Human peripheral blood T cells isolated using CD3 magnetic beads were infected with lentiviruses expressing the construct CD8 SP-TROP2-h7E6-SVG-(vL-vH)-Myc-z-P2A-K13-Flag-T2A-PAC(052616-D04)[SEQ ID NO:1166] targeting TROP2 and selected with puromycin and tested for the ability to kill PC3 (prostate cancer) cells expressing GLuc using the assay described previously. FIG. 31 shows effective killing of PC3 cells by T cells expressing the CD8SP-TROP2-h7E6-SVG-(vL-vH)-Myc-z-P2A-K13-Flag-T2A-PAC(052616-D04)[SEQ ID NO:1166] construct.

### Cytotoxic Activity of Backbone 1 Constructs Comprising a Conventional CARs I Targeting LAMP1 and Coexpressing K13

[0719] Human peripheral blood T cells isolated using CD3 magnetic beads were infected with lentiviruses expressing the indicated constructs targeting LAMP1 and selected with puromycin. Cells were tested for the ability to kill L363 and U266 cells expressing GLuc using the assay described previously. FIGS. 32A and 32B shows effective killing of L363 and U266 cells by T cells expressing the CD8SP-LAMP1-humab1-2-(vL-vH)-Myc-z-P2A-K13-Flag-T2A-PAC(051716-T05)[SEQ ID NO:1104] and CD8SP-LAMP1-Mb4-(vL-vH)-Myc-z-P2A-K13-Flag-T2A-PAC(051916-B07)[SEQ ID NO:1105] constructs.

### Activation of K13 Signaling by Addition of AP20187 in Jurkat Cells Expressing a CD19-Directed CAR and Coexpressing FKBP-K13 Fusion Protein

[0720] The effect of induction of K13 induced NF-κB activity on CAR-induced NFAT signaling was studied by stably expressing the construct CD8SP-FMC63(vL-vH)-Myc-z-P2A-FKBP-K13-FLAG-T2A-PAC(112316-S06)[SEQ ID NO:1770], which encodes a conventional CAR I targeting CD19 and expresses an FKBP-K13-FLAG fusion protein, in Jurkat-NFAT-GFP cells (JP). The parental Jurkat-NFAT-GFP cells (JP) cells and those expressing the construct CD8SP-FMC63(vL-vH)-Myc-z-P2A-FKBP-K13-FLAG-T2A-PAC(112316-S06)[SEQ ID NO:1770] were cocultured with RAJI cells in the absence and presence of 100 nM AP20187 for approximately 18 hours and induction of NFAT-driven GFP expression examined by FACS analysis as described previously. FIG. 33 shows effective induction of GFP expression in Jurkat cells expressing the CD8SP-FMC63(vL-vH)-Myc-z-P2A-FKBP-K13-FLAG-T2A-PAC(112316-S06)[SEQ ID NO:1770] construct upon coculture with RAJI cells in the absence (38.7% GFP-expressing cells) and presence (45.85% GFP expressing cells) of AP20187 compound. In contrast, no significant GFP induction was observed upon co-culture of parental Jurkat-NFAT-GFP cells (JP) cells with RAJI cells either in the absence or presence of the AP20187 compound. These results demonstrate that activation of K13 signaling in T cells expressing the FKBP-K13 fusion protein by addition of AP20187 compound does not adversely affect activation of CAR-induced NFAT signaling.

Generation of K13 Mutants with Varying Level of NF-κB Activity

[0721] It would be useful to have novel mutants of K13 with varying levels of NF-κB activity for the purpose of adoptive cellular therapy and other applications. Site-directed mutagenesis was conducted using Quickchange site-directed kit (Stratagene) to generate several point mutants of K13 in which the different amino acids of K13 (SEQ ID NO:2629) were mutated. For example, in the mutant K19A the amino acid Lysine at position 19 is mutated to alanine. The wild type and the various mutant constructs were transfected in 293FT cells along with a luciferase reporter construct driven by 4 copies of NF-κB binding site and a RSV-LacZ reporter construct essentially as described (Chaudhary et al., Oncogene 18:5738-46, 1999). Approximately 24 hr later, cells were lysed and NF-κB-Luc and LacZ activities measured in cell lysates. NF-κB-Luc activity was normalized relative to LacZ activity to control for difference in transfection efficiency (Chaudhary et al., Oncogene 18:5738-46, 1999). FIG. 34 shows that many mutants have either increase (e.g. E48A mutant) or decrease (e.g., E47A mutant) in NF-κB activity as compared to the wild-type K13. These mutants will have application in adoptive cellular therapy and other applications where varying level of NF-κB activities are required. Thus, mutant E48A can be coexpressed in CAR constructs where strong NF-κB activity is desirable while mutant R50A can be coexpressed in CAR constructs where only modest NF-κB activity is desirable. The activity of these mutants can be also controlled by fusing them with FKBP domains (SEQ ID NOs: 2621 and 2622) as described above for wild-type K13.

A Method of Controlling the Activity of CAR-T Cells, Bispecific T Cell Engagers (BiTEs) and DARTs (Dual Affinity Re-Targeting Proteins) with Src Inhibitors Dasatinib, Ponatinib and A-770041

### CAR

[0722] CARs are synthetic receptors which combine antibody binding specificity with T cell functionality. CARs are generated by fusing a single chain antibody (scFv) that dictates the specific recognition of desired tumor antigen with the intracellular signaling components of CD3z chain of T cell receptor to enable activation of T cell effector function. The HLA-independent recognition of TAA by CAR not only minimize tolerance induction mechanisms, but also allow the versatile design of CARs recognizing virtually any antigen including non-protein moieties on cell surface. Although CARs activate T cells via the CD3z chain, signaling via CARs is different from signaling via the normal T cell receptor (TCR) as they do not engage all the components of the TCR complex. For example, signaling via a normal TCR results in engagement of several molecules, such as TCRα, TCRβ, CD3γ, CD3δ, CD3ε, CD3ζ, and CD4 or CD8 as well as their associated downstream signaling proteins, such as Lck, LAT, ZAP70 and SLP-76 (Chakraborty, A K and Weiss, A Nat Immunol 15:798-807, 2014). It is unclear if any of these receptors and signaling intermediates are involved in signaling via a chimeric antigen receptor (CAR). The notion that signaling via CAR is distinct from signaling via a normal TCR is evident from the side effects observed following the infusion of CAR versus those observed after infusion of TCR in patients. While cytokine release syndrome (CSR) and neurological complications are frequently observed following the infusion of CAR-T cells, they are not seen following the infusion of tumor infiltrating lymphocytes or after infusion of T cells that had been engineered to express a TCR against a particular antigen, such as NY-ESO (Brentjens, Blood 118:4817-28, 2011; Rapoport et al., Nat Med 21:914-21, 2015; Robbins et al., Clin Cancer Res 21:1019-27, 2015; Sadelain et al., Curr. Opin. Immunol. 21:215-23, 2009; Turtle et al., Curr. Opin. Immunol. 24:633-39, 2012).

### Bispecific T Cell Engager (BiTE)

[0723] Bispecific T cell engager (BiTE®) antibody constructs are a type of immunotherapy being investigated for fighting cancer by helping the body's immune system to detect and target malignant cells. The modified antibodies are designed to engage two different targets simultaneously, thereby juxtaposing T cells (a type of white blood cell capable of killing other cells perceived as threats) to cancer cells. BiTE® antibody constructs help place the T cells within reach of the targeted cell, with the intent of allowing T cells to inject toxins and trigger the cancer cell to die (apoptosis). BiTE® antibody constructs are currently being investigated for their potential to treat a wide variety of cancers. BLINCYTO (Blinatumomab) is a bispecific CD19-directed CD3 T cell engager (BiTE®) antibody construct that binds specifically to CD19 expressed on the surface of cells of B-lineage origin and CD3 expressed on the surface of T cells. Although BiTEs, such as Blinatumomab, activate T cells, they bind to the CD3 chain of TCR rather than TCRα and TCRβ chains, and therefore signaling through BiTEs is not physiological and is not identical to signaling via the normal T cells.

### Limitation of CAR T Cells and Bispecific Antibodies

[0724] In majority of patients who respond to engineered CAR T cells and Blinatumomab, excessive release of proinflammatory cytokines causes symptoms that include fevers, hypotension, hypoxemia, cardiac dysfunction, kidney failure and electrolyte abnormalities, collectively termed as “Cytokine release syndrome’ (CRS). A number of these patients require admission to intensive care units for pressure support and artificial ventilation. In significant number of cases (up to 50%), CAR T cells and Blinatumomab therapy can lead to neurologic symptoms including tremor, seizures and can be fatal. For example, approximately 50% of patients receiving Blinatumomab in clinical trials experienced neurological toxicities. Severe, life-threatening, or fatal neurological toxicities occurred in approximately 15% of patients, including encephalopathy, convulsions, speech disorders, disturbances in consciousness, confusion and disorientation, and coordination and balance disorders. Strategies to counteract CRS include treatment with immunosuppressive agents and antibodies to cytokines to block cytokine release and/or activity. Nevertheless, treatment-related deaths have occurred at many institutions. Therefore, there is an unmet and urgent need for new drugs/agents to control the activity of CAR T cells and Blinatumomab.

### Dasatinib as an Inhibitor of Physiological T Cell and NK Function

[0725] The dual BCR-ABL/Src kinase inhibitor dasatinib is FDA approved for the treatment of chronic myeloid leukemia and Ph+ acute lymphoblastic leukemia. Src kinases are known to play an important role in physiological T-cell activation. Consistent with this, dasatinib has been shown to profoundly inhibit antigen specific physiological T-cell activation, proliferation, cytokine production, and degranulation in a dose-dependent manner (Schade et al., Blood 111:1366-77, 2008; Weichsel et al., Clin Cancer Res 14:2484-91, 2008). Dasatinib has been also shown to inhibit the activation of NK cells. However, since the CAR modified T cells and BiTE do not engage the physiological T cell receptor (see above), it is not clear whether dasatinib can be used to modulate the activity of CAR-T cells and T cells activated via BiTE.

[0726] Human peripheral blood T cells isolated using CD3 magnetic beads were infected with lentiviruses expressing the indicated CAR construct targeting CD8SP-2-CD19MM-(vL-vH)-Myc-BBz-T2A-PAC(062915-D03)[SEQ ID NO:1471] and selected with puromycin. CAR-T cells were pre-incubated with the indicated concentrations of Dasatinib and Imatinib for approximately 30 min at 37° C. The drug-treated and untreated T cells were plated in a white 384-cell plate. RAJI cells stably expressing GLuc were added to the wells containing the T cells at a concentration of 30K cells/30W/well to give an E:T ratio was 5:1. Dasatinib (Das) and Imatinib (Imat) were added to the wells to maintain the final concentrations as indicated. After 4 h of co-culture, CAR-T cells mediated induction of lysis of target cells was assayed by increase of GLuc activity by directly injecting 0.5×CTZ assay buffer containing native coeloentrazine. FIG. 35 shows inhibition of CAR CD8SP-2-CD19MM-(vL-vH)-Myc-BBz-T2A-PAC(062915-D03)[SEQ ID NO:1471]-induced cell death by 50 nM and 100 nM Dasatinib, while Imatinib has no effect.

### Effect of Different Tyrosine Kinase Inhibitors on Cell Death Induced by CAR Modified T Cells

[0727] Human peripheral blood T cells isolated using CD3 magnetic beads were infected with lentiviruses expressing the indicated CAR constructs targeting human and CD8SP-FMC63-(vL-vH)-Myc-BBz-T2A-PAC(112014-A13)[SEQ ID NO:1467] and CD8SP-2-CD19MM-(vL-vH)-Myc-BBz-T2A-PAC(062915-D03)[SEQ ID NO:1471]). RAJI cells stably expressing GLuc were co-cultured for approximately 4 h with T cells expressing the CARs in the presence and absence of indicated concentrations of the tyrosine kinase inhibitors (TKI) Dasatinib, Imatinib, Nilotinib, Ponatinib and Axitinib essentially as described above. Among these inhibitors, Dasatinib and Ponatinib have been reported to have activity against Src kinase, while the others lack this activity. CAR-T cells mediated induction of lysis of target cells was assayed by increase of GLuc activity as measured by BioTek synergy plate reader by directly injecting 0.5×CTZ assay buffer containing native coeloentrazine (Nanolight). For measurement of maximum cell death, cells were treated with 30 μl of digitonin (final concentration 30 μg/ml) for approximately 90 min prior to measurement of Gluc activity. The % specific lysis was calculated by taking digitonin-induced cell death as 100% and untreated cells as 0%. The formula for % specific lysis calculation is: % Specific lysis=100×[(experimental data)−(spontaneous cell death))]/[(maximum cell death)−spontaneous cell death)]. FIG. 36 shows increase in GLuc activity following co-culture with T cells expressing CD19-specific CARs CD8SP-FMC63-(vL-vH)-Myc-BBz-T2A-PAC(112014-A13)[SEQ ID NO:1467] and CD8SP-2-CD19MM-(vL-vH)-Myc-BBz-T2A-PAC(062915-D03)[SEQ ID NO:1471]as compared to the uninfected T cells (T-UI) indicating lysis of target cells by the different CD19-CAR-T cells. However, CD19-CAR-T cells induced cell death was partially blocked by treatment with 50 nM Dasatinib and completely blocked by treatment with 100 nM Dasatinib. Similarly, CD19-CAR-T cells-induced cell death was partially blocked by treatment with 100 nM Ponatinib. However, treatment with the indicated doses of Imatinib (50 nM and 500 nM), Nilotinib (10 nM and 100 nM), and Axitinib (1 μM and 10 μM) had no effect on CAR-T cell induced cell death. These results demonstrate that TKI with activity against Src can effectively block CAR-T cell induced cell death. It is also possible that treatment with higher doses of Imatinib and Nilotinib than those used in the above study could block CAR-T cell-induced cell death.

### Dasatinib Blocks Cell Death Induced by CAR Targeting CD22

[0728] Human peripheral blood T cells isolated using CD3 magnetic beads were infected with lentivirus expressing the a CAR construct targeting human CD22 (CD8SP-CD22-m971-(vL-vH)-Myc-BBz-T2A-PAC(091515-A02)[SEQ ID NO:1519]) and selected with puromycin. The effect of dasatinib on puromycin selected CD22 CAR-T cells induced death of RAJI-GLuc cells was examined after 96 h of co-culture of effector and target cells. FIG. 37 shows that Dasatinib effectively blocks killing of RAJI-GLuc cells by T cells expressing the CD8SP-CD22-m971-(vL-vH)-Myc-BBz-T2A-PAC(091515-A02)[SEQ ID NO:1519] CAR as determined by GLuc assay.

### Dasatinib Blocks Cytotoxicity Induced by Parental NK92MI Cells and Those Modified to Express a CAR

[0729] NK92 cells are under clinical development for the treatment of a number of cancers. To test if Dasatinib can block the activity of NK92 cells, NK92MI cells (a derivative of NK92 cells expressing IL2) were co-cultured with K562-Gluc cells in the absence and presence of indicated concentrations of Dasatinib. The target cells were plated a concentration of 100K cells/100μ/well in a black 96-cell plate and either left untreated or treated with two different doses of Dasatinib (50 nM and 100 nM) for 30 min followed by co-culture of target cells with NK92MIMI effector cells at an E:T ratio of 0.5:1 for 4 h. FIG. 38A shows that Dasatinib blocks NK92 cells mediated death of K562 cells as determined by Gluc assay.

[0730] To test if Dasatinib would also block cell death induced by NK92 cells which have been engineered to express a CAR, NK92MI cells were engineered to express CAR CD8SP-FMC63-(vL-vH)-Myc-BBz-T2A-EGFP(070814-D06)[SEQ ID NO:3535] targeting CD19. NK92MI cells expressing the CD8SP-FMC63-(vL-vH)-Myc-BBz-T2A-EGFP(070814-D06)[SEQ ID NO:3535] CAR were co-cultured with CD19 positive RAJI-GLuc target cells in the absence and presence of Dasatinib for 4 h and cell death measured by GLuc assay. FIG. 38B shows that Dasatinib blocks death of RAJI-GLuc cells by CD8SP-FMC63-(vL-vH)-Myc-BBz-T2A-EGFP(070814-D06)[SEQ ID NO:3535] CAR-expressing NK92MI cells as determined by Gluc assay.

### Dasatinib Blocks Blinatumomab (Blincyto) Induced Cell Death and Cytokine Production

[0731] Effector T-cells (isolated by CD3 microbeads from Miltenyi Biotech) were left untreated or preincubated with 50 nM or 100 nM Dasatinib for 1 hour at 37° C. followed by plating cells in a U-bottom 96-well plates. RAJI-MSCVhygro-Gluc target cells were incubated with a bispecific antibody (Blinatumomab or BLINCYTO; AMGEN) at 100 ng/10⁶ cells for 30 min at 37° C. in PBS/2% FBS. Next, Blinatumomab-treated RAJI-Gluc or untreated (control) RAJI-Gluc cells were washed three times in PBS, re-suspended in XVIVO medium and 100 μl (100K) cells were plated per well of a 96-well U-bottom plate (Effector:Target ratio of 1:1) in the absence and presence of indicated concentrations of Dasatinib. Total volume in each well was adjusted to 200 μl with medium. Plates were quickly centrifuged to settle cells, and incubated at 37° C. in a 5% CO₂ incubator for 96 hours. For maximum cell death, one hour prior to doing GLuc cell death assay, a total volume of 6 μl of Digitonin (stock 1 mg/ml, Sigma) was added to wells containing target cells alone to achieve a final concentration of 30 μg/ml of Digitonin. The plates were centrifuge at 1,000 rpm for 5 min and 50 μl of supernatants were transferred to a Greiner 384-well flat bottom white opaque plate. The luciferase activity was measured by BioTek synergy plate reader by directly injecting 0.5×CTZ assay buffer containing native coeloentrazine (Nanaolight) into the 384 well plates in a well mode. FIG. 39A shows that treatment with Blinatumomab in the presence of T cells result in strong induction of death of RAJI-GLuc cells which is effectively blocked by 100 nM Dasatinib. The supernatant from the above experiment was also assayed for measurement of IFNγ production by ELISA. FIG. 39B shows that co-culture of RAJI-GLuc cells with Blinatumomab in the presence of T cells result in strong induction of IFNγ production which is effectively blocked by 100 nM Dasatinib.

### Effect of Ruxolitinib, Fosatamatinib and Alisertib on CAR T Cells and Blinatumomab Induced Cell Death

[0732] The effect of Ruxolitinib (JAK-1/2 inhibitor), Fosatamatinib (syk inhibitor) and Ali sertib (Aurara Kinase inhibitor) on CD8SP-CD19Bu12-(vL-vH)-Myc-BBz-T2A-PAC(082815-P08)[SEQ ID NO:1470]-expressing CAR T cells- and Blinatumomab-induced death of RAJI-pLenti-GLuc cells was studied using the assay as described above. FIG. 40A shows no significant toxic effect of the various drugs on RAJI-pLenti-Gluc cells that had not been co-cultured with CAR T cells. FIG. 40B shows significant induction of cell death, as measured by increase in Gluc activity, when RAJI--pLenti-Gluc cells are incubated with the CAR-T cells. FIG. 40B also shows mild to modest inhibition of -CAR-T cell-induced death of RAJI-pLenti-GLuc cells by Ruxolitinib, Fosatamatinib and Alisertib as compared to cells treated with media (Med) alone. Dasatinib was used as a positive control and led to significant inhibition of CAR-T cell-induced death of RAJI cells. FIG. 40C shows that the above compound have only a minimal effect on Blinatumomab induced cell death mediated by T cells at the indicated concentrations.

### Effect of A-770041, Saracatinib, Avasimibe on CAR T Cells- and Blinatumomab-Induced Cell Death

[0733] A-770041 is a selective small molecule inhibitor of LCK, one of the 8 members of the src family, that is required for T cell activation and IL2 production (Burchat et al., Bioorg Med Chem Lett 16:118-22, 2006). A770041 is a 147 nM inhibitor of Lck (1 mM ATP) and is 300 fold selective against Fyn, the other src family kinase involved in T cell signaling. Saracatinib (AZD0530) is a src family that can be administered orally. Avasimibe is an inhibitor of ACAT1, a key cholesterol esterification enzyme that has been shown to augment anti-tumor response of CD8 cells.

[0734] The effect of A-770041, Saracatinib and Avasimibe on CD19Bu12(vL-vH)-BBz-Pac-P08 expressing CAR T cells- and Blinatumomab-induced death of RAJI-pLenti-GLuc cells was studied next using the assay as described above. FIG. 41A shows the release of Gluc in cells treated with the indicated drugs in the presence of media alone without any CAR-T cells. FIG. 41B shows near complete inhibition of CD8SP-CD19Bu12-(vL-vH)-Myc-BBz-T2A-PAC(082815-P08)[SEQ ID NO:1470] CAR-T cells induced death of RAJI-pLenti-GLuc cells by A-770041 at 100 nM and 200 nM while Saracatinib had no significant effect. Dasatinib was used as a positive control in the above experiment and as expected blocked CAR-T cells induced cell death. Avasimibe had no significant effect on CAR-T cells induced cell death at 100 nM but completely blocked it at 1 μM. FIG. 41C shows that treatment with 100 nM A770041 partially blocked cell death induced by combination of Blinatumomab with T cells while treatment with 200 nM A770041 led to complete inhibition. Similarly, treatment with 1 μM Avasimibe blocked Blinatumomab induced cell death mediated by T cells. Collectively, the above studies demonstrate that inhibitors of LCK kinase can block the effect of CAR-T cells and Blinatumomab and therefore can be used for the treatment of cytokine release syndrome and neurological complications associated with treatment with CAR-T cells and Blinatumomab.

Generation of CAR Constructs Coexpressing scFv Targeting IL6R and IL6R

[0735] One of the major limitations of CAR therapy is cytokine release syndrome (CRS). One approach currently being used in clinical practice to control CRS is administration of anti-IL-6R monoclonal antibody tocilizumab. To control CRS associated with CAR, we constructed exemplary CARs against CD19 (CD8SP-FMC63(vL-vH)-BBz-P2A-IgHSP-IL6R-M83(vL-vH)-Flag-T2A-PAC(011315-K04)[SEQ ID NO: 1763])) and MPL (CD8SP-161(vL-vH)-BBz-P2A-IgHSP-IL6R-M83(vL-vH)-Flag-T2A-EGFP(012015-I29)[SEQ ID NO:1746])) which expresses a scFv against IL6R, designated M83, along with a C-terminal Flag tag. To control CRS, we also constructed exemplary CARs against CD19 (CD8SP-FMC63(vL-vH)-BBz-P2A-IgHSP-IL6-19A(vL-vH)-Flag-T2A-PAC(011315-H06)[SEQ ID NO:1762]) and MPL (CD8SP-161(vL-vH)-BBz-P2A-IgHSP-IL6-19A(vL-vH)-Flag-T2A-EGFP(011315-F02)[SEQ ID NO:1745]) which co-expresses an scFv against IL6, designated IL6-19A. The scFv fragments in these constructs are separated from the CAR fragment by a P2A cleavable linker. Jurkat-NFAT-EGFP (J-N-G) cells were stably transduced with the lentivirus encoding the CAR constructs CD8SP-FMC63(vL-vH)-BBz-P2A-IgHSP-IL6-19A(vL-vH)-Flag-T2A-PAC(011315-H06)[SEQ ID NO:1762] and CD8SP-FMC63 (vL-vH)-BBz-P2A-IgHSP-IL6R-M83 (vL-vH)-Flag-T2A-PAC(011315-K04)[SEQ ID NO:1763]. The parental and CAR-expressing Jurkats were subsequently cocultured with RAJI cells and induction of EGFP expression monitored by FACS analysis after 4 h. FIG. 42A shows that coculturing of Jurkat cells expressing CD8SP-FMC63(vL-vH)-BBz-P2A-IgHSP-IL6-19A(vL-vH)-Flag-T2A-PAC(011315-H06)[SEQ ID NO:1762] with RAJI led to increase in EGFP expression as compared to cells that had not been exposed to RAJI cells. Essentially similar results were obtained with Jurkats expressing the CAR construct CD8SP-FMC63 (vL-vH)-BBz-P2A-IgHSP-IL6R-M83 (vL-vH)-Flag-T2A-PAC(011315-K04)[SEQ ID NO:1763]. No increase in EGFP expression was observed in parental Jurkats (J-N-G-P) without or with culturing with RAJI (FIG. 42B). Thus, a CAR can be coexpressed with a scFV against IL6 and IL6R from a single vector without loss of activity.

[0736] Due to their small size, one of the limitations of the scFv is their short half-life due to their rapid clearance by the kidneys. Therefore, we also constructed a CAR against MPL (161) that expresses a bispecific antibody consisting of a camel-derived IL6R single chain antibody (vHH) designated 304 which is fused via a (GGGGS)×3 linker to a single chain camel-derived antibody (vHH) against human serum albumin (Alb8). The IL6R-Alb8 cassette carries a human IgH signal peptide at the N-terminus and a Flag epitope tag at the C-terminus. The secreted bispecific IL6R-304-A1b8 antibody will bind to human serum albumin through its Alb8 region, which will prevent its excretion via the kidneys and thereby prolong its half-life.

### CAR Expressing Fx06 Peptide to Block Increased Vascular Leakiness During CRS

[0737] Capillary leak syndrome is another major complication of CARs. A natural plasmin digest product of fibrin, peptide BB15-42 (also called FX06), has been shown to significantly reduce vascular leak (Groger et al., PLoS ONE 4:e5391, 2009). We generated vectors that coexpress CARs targeting CD19 or MPL with FX06 peptide. To facilitate extracellular secretion of FX06, a signal peptide derived from human IgH was fused to its N-terminus. The coexpression of FX06 peptide with CARs will help ameliorate the capillary leak syndrome seen as part of cytokine release syndrome following infusion of CAR modified T cells.

[0738] Jurkat-NFAT-EGFP cells were stably transduced with the lentivirus CD8SP-FMC63-(vL-vH)-BBz-P2A-IgHSP-Fx06-Flag-T2A-PAC(012115-N04)[SEQ ID NO:1764] that expresses FMC63 CAR against CD19 along with FX06. The parental and CAR expressing Jurkats were subsequently cocultured with RAJI cells and induction of EGFP expression monitored by flow cytometry. Coculturing of Jurkat-NFAT-EGFP cells expressing CD8 SP-FMC63-(vL-vH)-BBz-P2A-IgHSP-Fx06-Flag-T2A-PAC(012115-N04)[SEQ ID NO:1764] with RAJI led to increase in EGFP expression as compared to cells that had not been exposed to RAJI cells. Essentially similar results were obtained upon culture with Bv173 and NALM6 cells. Thus, a CAR can be expressed along with FX06 from a single vector without loss of activity.

### CARs Targeting Multiple Diverse Antigens

[0739] We next generated lentiviral constructs encoding for CARs targeting many diverse antigens that are overexpressed in cancer and other diseased causing or disease associated cells. The lentiviruses were generated and used to infect the Jurkat-NFAT-EGFP reporter cell line. The Jurkat-NFAT-GFP cells were engineered to express the different CARs and backbone targeting the different antigens and were tested for their ability to activate NFAT-dependent EGFP reporter upon coculture with the target cells expressing their respective target antigen. The Jurkat-NFAT-EGFP (parental) cells were used as control. The results with different CARs are summarized in the following summary Table 28. A CAR is considered positive in the assay in case the CAR-expressing Jurkat-NFAT-GFP cells show greater % GFP positive cells when cultured with the target cell line as compared to parental Jurkat-NFAT-GFP cells. Thus, the Jurkat-NFAT-GFP cells expressing the CAR CD8SP-FMC63(vL-vH)-Myc-BBz-P2A-cFLIP-L-Flag-T2A-PAC(092215-A06)[SEQ ID NO:1754] showed greater induction of EGFP expression when co-cultured with RAJI cell as compared to EGFP expression induced in parental Jurkat-NFAT-EGFP cells upon co-culture with RAJI cells. These results also demonstrate that cFLIP-L, an agent known to block activation induced cell death, can be co-expressed with a CAR without adversely affecting its signaling activity. The results in Table 28 demonstrate the functional activity of several conventional CAR II constructs comprising 41BB costimualatory domain and CD3z activation domain and targeting novel antigens, such as PTK7, DLL3, cMET, TSHR, CD22, Muc1/MHC class I complex, tyrosinase/MHC class I complex. The data in Table 28 also demonstrate the functional activity of several backbone 1 constructs comprising a conventional CAR I and K13-vFLIP and targeting novel antigens, such as CD34, CD179b, CLEC5A, CSF2RA, CD200R, LAMP1, TROP2, TnAg, CDH6, CDH17, CDH19, GD3, GFRalpha4, Her2, IL11Ra, IL13Ra2, NYBR-1, Slea, and TGFBR2. Additionally, several bispecific constructs, such as those targeting EGFR and CEA and those targeting cMet and Her3 were positive in this assay. Essentially a similar experimental approach can be used to test the functional activity of other CARs and backbones described in Tables 19-22.

TABLE 28
Exemplary CARs positive on Jurkat-NFAT-GFP Assay

| | | | Positive Cell Line on |
|---|---|---|---|
| No. | Target | SEQUENCE NAME | co-culture assay |
| 1 | CD34 | CD8SP-CD34-hu4C7-(vL-vH)-Myc-z-P2A-K13-Flag- | HL60 |
| | | T2A-PAC(051616-I02)[SEQ ID NO: 992] | |
| 2 | CD179b | CD8SP-CD179b-(vL-vH)-Myc-z-P2A-K13-Flag-T2A- | HL60 |
| | | PAC(051716-N05)[SEQ ID NO: 1012] | |
| 3 | CD200R | CD8SP-CD200R-huDx182-(vL-vH)-Myc-z-P2A-K13- | HEL |
| | | Flag-T2A-PAC(051716-W05)[SEQ ID NO: 1190] | |
| 4 | CDH6 | CD8SP-CDH6-NOV710-(vL-vH)-Myc-z-P2A-K13- | SKOV3 |
| | | Flag-T2A-PAC(051716-I05)[SEQ ID NO: 1016] | |
| 5 | CDH7 | CD8SP-CDH6-NOV712-(vL-vH)-Myc-z-P2A-K13- | SKOV3 |
| | | Flag-T2A-PAC(051716-J05)[SEQ ID NO: 1017] | |
| 6 | CDH17 | CD8SP-CDH17-PTA001A4-(vL-vH)-Myc-z-P2A-K13- | LoVo |
| | | Flag-T2A-PAC(051716-M06)[SEQ ID NO: 1018] | |
| 7 | CDH19 | CD8SP-CDH19-4B10-(vL-vH)-Myc-z-P2A-K13-Flag- | MEL624 |
| | | T2A-PAC(051716-U05)[SEQ ID NO: 1180] | |
| 8 | CLEC5A | CD8SP-CLEC5A-3E12A2-(vL-vH)-Myc-z-P2A-K13- | Kasumi |
| | | Flag-T2A-PAC(051016-F06)[SEQ ID NO: 1022] | |
| 9 | CSF2RA | CD8SP-CSF2RA-Ab1-(vL-vH)-Myc-z-P2A-K13-Flag- | THP1 |
| | | T2A-PAC(051616-G01)[SEQ ID NO: 1041] | |
| 10 | CSF2RA | CD8SP-CSF2RA-Ab6-(vL-vH)-Myc-z-P2A-K13-Flag- | THP1 |
| | | T2A-PAC(051616-H05)[SEQ ID NO: 1040] | |
| 11 | EGFR & CEA | CD8SP-EGFR1-vHH-Gly-Ser-Linker-CEA1-vHH- | Hela |
| | | Myc-z-P2A-K13-Flag-T2A-PAC(040716-O08)[SEQ | |
| | | ID NO: 1049] | |
| 12 | GD3 | CD8SP-GD3-KM-641-(vL-vH)-Myc-z-P2A-K13-Flag- | MEL624 |
| | | T2A-PAC(051016-D04)[SEQ ID NO: 1065] | |
| 13 | GFRa4 | CD8SP-GFRa4-P4-10-(vL-vH)-Myc-z-P2A-K13-Flag- | LAN5 |
| | | T2A-PAC(051316-L02)[SEQ ID NO: 1067] | |
| 14 | GFRa4 | CD8SP-GFRa4-P4-10-(vL-vH)-Myc-z-P2A-K13-Flag- | LAN5, TT |
| | | T2A-PAC(051716-L05)[SEQ ID NO: 1067] | |
| 15 | Her2 | CD8SP-Her2-Hu4D5-(vL-vH)-Myc-z-P2A-K13-Flag- | MCF7 |
| | | T2A-PAC(050516-I03)[SEQ ID NO: 1084] | |
| 16 | IL11Ra | CD8SP-IL11Ra-8E2-Ts107-(vL-vH)-Myc-z-P2A-K13- | K562 |
| | | Flag-T2A-PAC(050516-D01)[SEQ ID NO: 1099] | |
| 17 | IL13Ra | CD8SP-IL13Ra2-Hu108-(vL-vH)-Myc-z-P2A-K13- | U87MG |
| | | F1ag-T2A-PAC(050516-F04)[SEQ ID NO: 1102] | |
| 18 | LAMP1 | CD8SP-LAMP1-humab1-2-(vL-vH)-Myc-z-P2A-K13- | L363, U266 |
| | | Flag-T2A-PAC(051716-T05)[SEQ ID NO: 1104] | |
| 19 | cMET-Her3 | CD8SP-cMET-171-vHH-Gly-Ser-Linker-Her3-21F06- | U266; MCF7 |
| | | vHH-Myc-z-P2A-K13-Flag-T2A-PAC(041116- | |
| | | B05)[SEQ ID NO: 1116] | |
| 20 | MPL | CD8SP-2-MPL-111-(vL-vH)-Myc-z-P2A-K13-Flag- | HEL |
| | | T2A-PAC(040716-M02)[SEQ ID NO: 1120] | |
| 21 | NYBR1 | CD8SP-NYBR1-(vL-vH)-Myc-z-P2A-K13-Flag-T2A- | L363 |
| | | PAC(051716-Q05)[SEQ ID NO: 1131] | |
| 22 | Slea | CD8SP-SLea-5B1-(vL-vH)-Myc-z-P2A-K13-Flag- | LAN5 |
| | | T2A-PAC(051716-X05)[SEQ ID NO: 1149] | |
| 23 | TGFBetaR2 | CD8SP-TGFBR2-Ab1-(vL-vH)-Myc-z-P2A-K13-Flag- | NALM6 |
| | | T2A-PAC(051716-O06)[SEQ ID NO: 1158] | |
| 24 | Tim1 | CD8SP-TIM1-HVCR1-ARD5-(vL-vH)-Myc-z-P2A- | A549; SKOV3 |
| | | K13-Flag-T2A-PAC(051716-P05)[SEQ ID NO: 1161] | |
| 25 | TnAg | CD8SP-TnAg-(vL-vH)-Myc-z-P2A-K13-Flag-T2A- | K562 |
| | | PAC(051616-F05)[SEQ ID NO: 1162] | |
| 26 | TROP2 | CD8SP-TROP2-ARA47-HV3KV3-(vL-vH)-Myc-z- | PC3 |
| | | P2A-K13-F1ag-T2A-PAC(051716-G05)[SEQ ID | |
| | | NO: 1165] | |
| 27 | CD23 | CD8SP-CD23-p5E8-(vL-vH)-Myc-BBz-T2A- | L1236 |
| | | PAC[SEQ ID NO: 1727] | |
| 27 | CD19 | CD8SP-FMC63-(vL-vH)-Myc-BBz-T2A-PAC(112014- | RAJI, NALM6 |
| | | A13)[SEQ ID NO: 1467] | |
| 27 | CD19 | CD8SP-FMC63(vL-vH)-BBz-P2A-IgHSP-IL6- | RAJI |
| | | 19A(vL-vH)-Flag-T2A-PAC(011315-H06)[SEQ ID | |
| | | NO: 1762] | |
| 27 | CD19 | CD8SP-FMC63(vL-vH)-Myc-BBz-P2A-cFLIP-L-Flag- | RAJI, NALM6, Jeko1, |
| | | T2A-PAC(092215-A06)[SEQ ID NO: 1754] | MOLM13 |
| 27 | CD19 | CD8SP-FMC63-(vL-vH)-BBz-P2A-IgHSP-Fx06-Flag- | RAJI, Bv173, NALM6 |
| | | T2A-PAC(012115-N04)[SEQ ID NO: 1764] | |
| 27 | CD19 | CD8SP-FMC63(vL-vH)-BBz-P2A-IgHSP-IL6R- | RAJI, NALM6, U266 |
| | | M83(vL-vH)-Flag-T2A-PAC(011315-K04)[SEQ ID | |
| | | NO: 1763] | |
| 27 | CD19 | CD8SP-FMC63(vL-vH)-BBz-P2A-IgHSP-IL6- | RAJI, NALM6 |
| | | 19A(vL-vH)-Flag-T2A-PAC(011315-H06)[SEQ ID | |
| | | NO: 1762] | |
| 27 | CD22 | CD8SP-CD22-m971-(vL-vH)-Myc-BBz-T2A- | RAJI, NALM6 |
| | | PAC(091515-A02)[SEQ ID NO: 1519] | |
| 27 | CD324 | CD8SP-CD324-hSC10-17-(vL-vH)-Myc-BBz-T2A- | MDAMB-231 |
| | | PAC(052516-A07)[SEQ ID NO: 1555] | |
| 27 | DLL3 | CD8SP-DLL3-hSC16-56-(vL-vH)-Myc-BBz-T2A- | SKMEL31, SKMEL37, |
| | | PAC(052516-C07)[SEQ ID NO: 1585] | LAN5 |
| 27 | DLL3 | CD8SP-DLL3-hSC16-13-(vL-vH)-Myc-BBz-T2A- | LAN5, SKMEL31, |
| | | PAC(052516-D07)[SEQ ID NO: 1584] | SKMEL317 |
| 27 | GCC | CD8SP-GCC-5F9-(vL-vH)-Myc-BBz-T2A-PAC[SEQ | HCT116 |
| | | ID NO: 1728] | |
| 27 | MPL | CD8SP-MPL-161-(vL-vH)-Myc-BBz-T2A- | HEL, RAJI-MPL |
| | | PAC(021015-R07)[SEQ ID NO: 1658] | |
| 27 | MPL | CD8SP-2-MPL-111-(vL-vH)-Myc-BBz-T2A- | HEL |
| | | PAC[SEQ ID NO: 1660] | |
| 27 | Muc1/MHC | CD8SP-Muc1-D6-M3B8-(vL-vH)-Myc-BBz-T2A- | SKOV3 |
| | class I | PAC(052316 A02)[SEQ ID NO: 1665] | |
| 27 | PTK7 | CD8SP-PTK76-10-2-(vL-vH)-Myc-BBz-T2A- | LAN5 |
| | | PAC(052516-E07)[SEQ ID NO: 1684] | |
| 27 | TSHR | CD8SP-TSHR-KB1-(vL-vH)-Myc-BBz-T2A- | RAJI |
| | | PAC(052616-E05)[SEQ ID NO: 1709] | |
| 27 | Tyrosinase | CD8SP-Tyros-TA2-(vL-vH)-Myc-BBz-T2A-PAC[SEQ | MEL624 |
| | | ID NO: 1714] | |

### Use of PI3K Inhibitors to Expand T Cells Expressing Conventional CARs and Backbones 1-62

[0740] Human peripheral blood T cells will be isolated using CD3 magnetic beads and infected with lentiviruses expressing the CAR constructs (SEQ ID NO: 111614-B05) targeting CD19. Cells will be left unselected or selected with puromycin and expanded using the standard protocol described previously using CD3/CD28 beads and IL2 but in the absence or presence of dual PI3K/mTOR inhibitor PF-04691502 (0.10 μM to 0.5 μM). NSG mice (Jackson Lab) will be sub-lethally irradiated at a dose of 175 cGy. 24 hours post irradiation (day2), mice will be injected with 2.5×10⁴ RAJI cells via tail-vein. On day 3, the mice (n=5 for each group) will be treated with 5 million T cells that had been infected with the indicated CAR encoding lentiviruses and expanded in the absence or presence of PF-04691502. Control mice (n=5) will be injected with 5 million uninfected T cells. Mice are given human IL2 (400 IU i.p.) on alternate days till the death of all mice in control group. The median survival of mice which received CAR-T cells expanded in the presence of PI3K/AKT inhibitor is expected to be higher than the mice which received CAR-T cells that had been expanded in the absence of PI3K/AKT inhibitors.

Use of IL7 Along with CAR-T Cells

[0741] The study will be conducted as described in the preceding example with the exception that starting 1 day after the infusion of CAR-T cells, mice will be administered exogenous recombinant human IL-7 at a dosage of 200 ng/mouse by intraperitoneal injection three times, while the control mice receive normal saline. The mice that receive IL-7 are expected to reject their tumor and survive longer than the control mice.

### Use of Autologous CAR-T Cells for Adoptive Cell Therapy

[0742] CAR-T cells of the invention can be used for adoptive cell therapy. As an example, patients with relapsed Acute lymphocytic Leukemia, chronic lymphocytic leukemia, or high-risk intermediate grade B-cell lymphomas may receive immunotherapy with adoptively transferred autologous CAR-T cells targeting CD19. A leukapheresis product collected from each patient will undergo selection of CD3-positive T lymphocytes using the CliniMACS Prodigy® System from Miltenyi Biotec and following the manufacturer's recommendations. Cells will be transduced with clinical-grade CD8SP-CD19Bu12-(vL-vH)-Myc-BBz-T2A-PAC(082815-P08)[SEQ ID NO:1470]. Alternatively, clinical grade CD8SP-CD19Bu12-(vL-vH)-Myc-z-P2A-K13-Flag-T2A-PAC[SEQ ID NO:930] virus will be used. The selection and expansion of the CAR-T cells will occur in a closed system. After the resulting cell products has undergone quality control testing (including sterility and tumor specific cytotoxicity tests), they will be cryopreserved. Meanwhile, following leukapheresis, study participants will commence with lymphodepletive chemotherapy (30 mg/m²/day fludarabine plus 500 mg/m²/day cyclophosphamide x 3 days). One day after completion of their lymphodepleting regimen, the previously stored CAR-T cell product will be transported, thawed and infused at the patient's bedside. The study participant may also receive CAR-transduced lymphocytes infused intravenously followed by high-dose (720,000 IU/kg) IL-2 (Aldesleukin; Prometheus, San Diego, Calif.) every 8 hours to tolerance. The dose of CAR-T product will vary from 1×10⁴ CAR+ve CD3 cells/kg to 5×10⁹ CAR+ve CD3 cells/kg as per the study protocol. The CAR-T product may be administered in a single infusion or split infusions. Research participants will be pre-medicated at least 30 minutes prior to T cell infusion with 15 mg/kg of acetaminophen P.O. (max. 650 mg.) and diphenhydramine 0.5-1 mg/kg I.V. (max dose 50 mg). The study participant will optionally receive daily injections of human IL-2. Clinical and laboratory correlative follow-up studies will then be performed at the physician's discretion, and may include quantitative RT-PCR studies for the presence of CD19-expressing ALL/lymphoma cells and/or the adoptively transferred T cells; FDG-PET and/or CT scans; bone marrow examination for disease specific pathologic evaluation; lymph node biopsy; and/or long-term follow up per the guidelines set forth by the FDA's Biologic Response Modifiers Advisory Committee that apply to gene transfer studies. Essentially a similar approach will be used to treat other diseases using autologous immune cells (e.g., T cells) that have been engineered to express the conventional CARs of the invention or conventional CARs with accessory module (i.e. backbones 1-62) where the CAR targets an antigen or antigens expressed on the disease causing or disease-associated cells.

### Use of Autologous T Cells Expressing Conventional CARs and Backbones 1-62 Targeting Multiple Antigens for Adoptive Cell Therapy

[0743] Patients with many different diseases, including infectious diseases (e.g., HIV1, EBB, CMV, HTLV1, etc), degenerative diseases (e.g., Alzheimer's disease), allergic diseases (e.g., chronic idiopathic urticarial) and multiple cancers will be enrolled in an IRB approved phase I clinical trial of immunotherapy with adoptively transferred autologous CAR-T cells coexpressing K13-vFLIP (backbone 1) targeting different disease-causing or disease-associated antigens. The CAR for different diseases will be selected based on the known expression of their target antigen in the disease-causing or disease-associated cells. Where possible, the expression of the CAR target on the disease causing or disease associated cells will be confirmed by binding with Antigen binding domain-GGS-NLuc fusion protein in which the antigen binding domain of the CAR is fused to non-secretory form of NLuc protein via a flexible linker. Alternatively, immunohistochemistry or flow cytometry using commercially available antibodies will be used to confirm the expression of the target antigen of the CAR on disease-causing or disease-associated cells. T cells will be collected from the subjects using leukopheresis, transduced with the appropriate lentivirus vectors and expanded ex vivo using CD3/CD28 beads in a closed system. After the resulting cell products have undergone quality control testing (including sterility and tumor specific cytotoxicity tests), they will be cryopreserved. CAR-T cell products will be administered to the subjects as described in the preceding example. Clinical and laboratory correlative follow-up studies can then be performed at the physician's discretion.

Use of an mTOR Inhibitor RAD001 in Combination with T Cells Expressing Conventional CARs and Backbones 1-62

[0744] The study is conducted as described in the preceding examples with the exception that starting 1 day after the infusion of CAR-T cells, study participants will be administered an mTOR inhibitor, e.g., an allosteric inhibitor, e.g., RAD001, at a dosage that provides a target trough level 0.1 to 3 ng/ml, where the trough level” refers to the concentration of a drug in plasma just before the next dose, or the minimum drug concentration between two doses.

Use of Ibrutinib in Combination with T Cells Expressing Conventional CARs and Backbones 1-62

[0745] The study will be conducted as described in the preceding examples with the exception that starting 1 day after the infusion of CAR-T cells, study participants will be administered oral ibrutinib at dose of 140 mg/d to 420 mg/d. It is expected that the study participant receiving ibrutinib will have lower incidence of severe cytokine release syndrome as compared to participants who received CAR-T cells without ibrutinib.

### CAR-T Cell Hepatic Arterial Infusion

[0746] In addition to intravenous infusion, T cells expressing the conventional CARs and backbones 1-62 described in this invention can be infused intra-arterially to provide high concentration of CAR-T cells in a local area or organ involved with a disease. In the following example, this approach is used in case of a patient with hepatic metastases from a gastrointestinal cancer which expresses Folate Receptor alpha (FR1). Essentially a similar approach can be used for intra-arterial infusion of T cells expressing conventional CARs and backbones 1-62 targeting other tumor antigens.

[0747] A mapping angiogram will be performed via a right common femoral artery approach at baseline. The gastroduodenal and right gastric arteries, in addition to other potential sources of extrahepatic perfusion, will be embolized with microcoils. The same arterial access procedure will be carried out for administration of T cells expressing the construct CD8SP-FR1-huMov19-(vL-vH)-Myc-z-P2A-K13-Flag-T2A-PAC[SEQ ID NO:1060]. The T cells will be collected from the patient on day 0 and will be infected with lentivirus encoding the construct CD8SP-FR1-huMov19-(vL-vH)-Myc-z-P2A-K13-Flag-T2A-PAC[SEQ ID NO:1060] and expanded as described in the previous examples. The CAR-T cells will be given in a dose escalating fashion on day 14 (10⁷ CAR-T cells), day 28 (10⁸ CAR-T cells) and day 44 (10⁹ CAR-T cells). The CAR-T cells will be injected manually via a 60 cc syringe at a rate of <2 cc/second. The total volume of infusion will be approximately 100 cc. Angiography with calibrated contrast rate will be performed after the first infusion of 50 cc and at completion of the CAR-T infusion to confirm preserved arterial flow. Infusions will be delivered into the proper hepatic artery when possible. Certain patients may have aberrant hepatic arterial anatomy, where either the right or left hepatic artery does not arise from the proper hepatic artery. In such cases the dose of CAR-T cells will be split based upon lobar volume calculations. In such cases, split doses will be delivered separately into the right and left hepatic arteries to ensure proportionate CAR-T delivery to both hepatic lobes.

### Intraperitoneal Administration of CAR-T Cells

[0748] CAR-T cells can also be administered intraperitoneally, essentially as described in Koneru M et al (Journal of Translational Medicine; 2015; 13:102). In the following example, this approach is used in patients with peritoneal involvement with ovarian cancer which expresses Folate Receptor alpha (FR1). Essentially a similar approach can be used for intra-peritoneal infusion of CAR-T cells targeting other tumor antigens.

[0749] A screening informed consent will be offered to patients with recurrent high-grade serous ovarian cancer to test their cancer for the expression of FR1. After expression of FR1 is confirmed by immunohistochemistry, then patients will have a leukapheresis product obtained from peripheral blood. Excess platelet and red blood cell contamination will be removed from the leukapheresis product and the product will be frozen. In the treatment phase of the study, the leukapheresis product will be thawed and washed. Subsequently, CD3+ T cells will be isolated from the thawed leukapheresis product by magnetic separation using CD3/CD28 beads. Activated T cells will be lentivirally transduced with the CD8SP-FR1-huMov19-(vL-vH)-Myc-z-P2A-K13-Flag-T2A-PAC[SEQ ID NO:1060] construct and further expanded using CD3/CD28 bead expansion protocol.

[0750] Patients with recurrent high-grade serous ovarian, primary peritoneal or fallopian tube carcinoma shown to express FR1 antigen confirmed by immunohistochemistry (IHC) analysis of banked (paraffin embedded) or freshly biopsied tumor will potentially be eligible for the study.

[0751] The phase I dose-escalation dosing will be used in the trial. Cohorts of 3-6 patients will be infused with escalating doses of modified T cells to establish the maximum tolerated dose (MTD). There will be four planned dose levels: 3×10⁵, 1×10⁶, 3×10⁶, and 1×10⁷ CAR-T cells/kg. Cohorts I and II will be treated with 3×10⁵ CAR-T cells/kg but patients in cohort II will also receive lymphodepleting cyclophosphamide. Cohorts II-V will receive escalating doses of the modified T cells following pretreatment with cyclophosphamide. Lymphodepleting cyclophosphamide dosed at 750 mg/m² will be administered 2-4 days prior to the initial T cell infusion. A standard 3+3 dose escalation schema will be followed.

[0752] An IP catheter will be placed prior to T cell infusion. Patients will be admitted to the inpatient unit of the hospital prior to their first infusion of CAR T cells and will remain hospitalized until at least 3 days after the second infusion of CAR T cells. The first cohort of patients to be treated, and the first patient treated in each subsequent cohort, will be admitted to the intensive care unit (ICU); subsequent patients may be admitted to the medical oncology inpatient service (subject to the clinical judgment of the treating physician).

[0753] Patients will receive a single dose of lymphodepleting cyclophosphamide (750 mg/m² IV) chemotherapy 2 to 4 days prior to initiating treatment with CAR-modified T cells. The transduced T cells will be quality tested for number, purity, viability, and sterility prior to infusion. All patients will receive 50% of the genetically modified T cell dose intravenously. Patients will be closely monitored for toxicities. One to 3 days later, the remaining dose of T cells will be administered as an IP infusion. At least 3 patients will be treated at dose level 1, with an accrual of no more than 2 patients per month within each dose level. All patients treated in the preceding cohort will be observed for a minimum of 4 weeks from the day of the initial T cell infusion before escalation to the next cohort occurs. Blood samples will be obtained from all patients prior to and following treatment to assess toxicity, therapeutic effects, and survival of the genetically modified T cells.

### Use of CAR-T Cells for Intratumoral Injection

[0754] CAR-T cells can also be administered intra-tumorally, essentially as described in Brown C E, et al, Clin Cancer Res. 2015 September 15; 21(18): 4062-4072. In the following example, this approach will be used in case of patients with recurrent glioblastoma (GBM) which expresses IL13Ra2. Essentially a similar approach can be used for intra-tumoral injection of T cells expressing conventional CARs or conventional CARs expressing accessory modules (backbones 1-62) targeting other tumor antigens.

[0755] A pilot safety and feasibility study will be conducted to test CD8SP-IL13Ra2-Hu108-(vL-vH)-Myc-z-P2A-K13-Flag-T2A-PAC(050516-F04)[SEQ ID NO:1102] expressing T cells in recurrent GBM. All participating patients will be required to give written informed consent. The clinical protocol will be approved by the University of Southern California Institutional Review Board and conducted under an Investigational New Drug Application, and registered at ClinicalTrials.gov. Eligible patients will include adults (18-70 yrs) with recurrent or refractory unifocal supratentorial grade III or IV glioma whose tumors do not show communication with ventricles/CSF pathways and are amenable to resection. Participation in this trial will be independent of IL13Ra2 (or IL13Ra2) tumor antigen status. Patients will be enrolled following initial diagnosis of high-grade glioma (WHO grade III or IV), at which time they will undergo leukapheresis for collection of peripheral blood mononuclear cells (PBMC). These cells will be used to engineer T cells to express the construct CD8SP-IL13Ra2-Hu108-(vL-vH)-Myc-z-P2A-K13-Flag-T2A-PAC(050516-F04)[SEQ ID NO:1102] containing the puromycin resistance gene (PAC) following infection with the corresponding lentiviral vector as described in the previous examples. Alternatively, the CAR-T cells could be generated following infection with a retroviral vector or using sleeping beauty transposon or by transfection of IVT mRNA. Subsequently, the release tested therapeutic CAR-T cells will be cryopreserved and stored for later use. At the time of first recurrence of the tumor, the research participant will undergo resection of tumor along with placement of a Rickham reservoir/catheter. Concurrently, the therapeutic CAR-T cells will be thawed, re-expanded in vitro using CD3/CD28 beads based rapid expansion protocol. Following recovery from surgery and post baseline MR imaging, the CAR-T cells will be administered directly into the resection cavity via the indwelling catheter, essentially as described (Brown C E, et al, Clin Cancer Res. 2015 21(18): 4062-4072). Cells will be manually injected into the Rickham reservoir using a 21 gauge butterfly needle to deliver a 2 mL volume over 5-10 minutes, followed by 2 mL flush with preservative free normal saline over 5 minutes. The protocol treatment plan will specify an intra-patient dose escalation schedule with a target of 12 CAR T cell doses administered intracranially over a 5 week period comprised of weekly treatment cycles. During cycles 1, 2, 4 and 5, T cell infusions will be performed on days 1, 3 and 5 of the cycle week, and week 3 will be a rest cycle. For safety, in cycle 1 an intrapatient dose escalation strategy, with CAR T cell doses of 10⁷, 5×10⁷ and 10⁸ cells per infusion administered on days 1, 3 and 5 respectively, will be used and this will be followed by 9 additional CAR T cell infusions of 10⁸ cells over 4 weeks. Imaging to assess response will be performed during the week 3 rest cycle and after week 5. The guidelines provided in the NCI Common Toxicity Criteria version 2.0 (https://ctep.ifo.nih.gov/1) will be followed for the monitoring of toxicity and adverse event reporting

### Use of CAR-T Cells for Ex-Vivo Purging of Bone Marrow or Peripheral Blood Stem Cell Preparation Prior to Transplant

[0756] CAR T cells can be used to purge the bone marrow or peripheral blood stem cell preparation of cancer cells prior to stem cell transplant. In the following example, CD8SP-CS1-HuLuc64-(vL-vH)-Myc-z-P2A-K13-Flag-T2A-PAC [SEQ ID NO:1032] expressing T cells will be used to purge bone marrow or peripheral blood stem cells obtained from a patient with multiple myeloma prior to autologous stem cell (or bone marrow) transplant.

[0757] Patient will undergo leukopheresis to collect peripheral blood mononuclear cells (PBMC). T cells will be purified using CD3 beads. These cells will be used to engineer T cells to express the CD8SP-CS1-HuLuc64-(vL-vH)-Myc-z-P2A-K13-Flag-T2A-PAC[SEQ ID NO:1032] CAR following infection with the corresponding lentiviral vector as described in the previous examples. Subsequently, the release-tested therapeutic CAR-T cells will be cryopreserved and stored for later use or used fresh. Bone marrow cells and peripheral blood progenitor cell products will be collected from a patient with multiple myeloma following standard procedures. For mobilization of peripheral blood stem cells, patients will receive cyclophosphamide, 3 gm/m² followed by G-CSF, 10 μg/kg subcutaneously each day beginning 24 h after cyclophosphamide until pheresis is complete. Peripheral blood stem cells will be collected once the peripheral blood CD34+-cell count is 15 cells/μl. The collection goal will be to process three blood volumes per day until a minimum of 2.0 times 10⁶ CD34+ cells/kg are reached after processing. The bone marrow and peripheral blood stem cell products will be optionally depleted of Red Blood Cells and/or enriched for CD34 expressing cells using CliniMACS Prodigy® System from Miltenyi Biotec and following the manufacturer's recommendations. The products will be used for ex-vivo purging fresh or cryopreserved. For purging, the bone marrow or peripheral blood stem cell products will be cocultured with thawed CAR-T cells at an effector to target ratio ranging from 5:1 to 30:1 for 4 to 24 hours in XVIVO medium (Lonza) supplanted with 100 IU recombinant human-IL2. Cells will be cultured at 37° C., in a 5% CO2 humidified incubator. At the end of the coculture period, an aliquot of the cells will be taken for sterility and quality testing (including measurement of CFU-GM and flow cytometry for CD34 and CD138 positive cells). The remaining sample will be administered intravenously to the patient who has previously received myeloablative chemotherapy (e.g., high dose Melphalan in two divided doses of 70 mg/m² for a total dose of 140 mg/m²).

### REFERENCES

[0758] 1. Bertin, J., et al. (1997), Death effector domain-containing herpesvirus and poxvirus proteins inhibit both Fas- and TNFR1-induced apoptosis, Proc Natl Acad Sci USA, 94(4), 1172-6.
[0759] 2. Brentjens, R. J. (2011), Safety and persistence of adoptively transferred autologous CD19-targeted T cells in patients with relapsed or chemotherapy refractory B-cell leukemias, Blood, 118, 4817-28.
[0760] 3. Burchat, A., D. W. Borhani, D. J. Calderwood, G. C. Hirst, B. Li, and R. F. Stachlewitz (2006), Discovery of A-770041, a src-family selective orally active lck inhibitor that prevents organ allograft rejection, Bioorg Med Chem Lett, 16(1), 118-22.
[0761] 4. Chaudhary, P. M., A. Jasmin, M. T. Eby, and L. Hood (1999), Modulation of the NF-kappa B pathway by virally encoded death effector domains-containing proteins, Oncogene, 18(42), 5738-46.
[0762] 5. Chugh, P., H. Matta, S. Schamus, S. Zachariah, A. Kumar, J. A. Richardson, A. L. Smith, and P. M. Chaudhary (2005), Constitutive NF-kappaB activation, normal Fas-induced apoptosis, and increased incidence of lymphoma in human herpes virus 8 K13 transgenic mice, Proc Natl Acad Sci USA, 102(36), 12885-90.
[0763] 6. Groger, M., et al. (2009), Peptide Bbeta(15-42) preserves endothelial barrier function in shock, PLoS ONE, 4(4), e5391.
[0764] 7. Hu, S., C. Vincenz, M. Buller, and V. M. Dixit (1997), A novel family of viral death effector domain-containing molecules that inhibit both CD-95- and tumor necrosis factor receptor-1-induced apoptosis, J Biol Chem, 272(15), 9621-4.
[0765] 8. Jeang, K. T. (2001), Functional activities of the human T-cell leukemia virus type I Tax oncoprotein: cellular signaling through NF-kappa B, Cytokine Growth Factor Rev, 12(2-3), 207-17.
[0766] 9. Liu, L., M. T. Eby, N. Rathore, S. K. Sinha, A. Kumar, and P. M. Chaudhary (2002), The Human Herpes Virus 8-encoded Viral FLICE Inhibitory Protein Physically Associates with and Persistently Activates the Ikappa B Kinase Complex, J Biol Chem, 277(16), 13745-51.
[0767] 10. Matta, H., V. Punj, S. Schamus, L. Mazzacurati, A. M. Chen, R. Song, T. Yang, and P. M. Chaudhary (2008), A nuclear role for Kaposi's sarcoma-associated herpesvirus-encoded K13 protein in gene regulation, Oncogene, 27(39), 5243-53.
[0768] 11. Rapoport, A. P., et al. (2015), NY-ESO-1-specific TCR-engineered T cells mediate sustained antigen-specific antitumor effects in myeloma, Nat Med, 21(8), 914-21.
[0769] 12. Ren, T., W. Dong, Y. Takahashi, D. Xiang, Y. Yuan, X. Liu, T. P. Loughran, Jr., S. C. Sun, H. G. Wang, and H. Cheng (2012), HTLV-2 Tax immortalizes human CD4+ memory T lymphocytes by oncogenic activation and dysregulation of autophagy, J Biol Chem, 287(41), 34683-93.
[0770] 13. Robbins, P. F., et al. (2015), A pilot trial using lymphocytes genetically engineered with an NY-ESO-1-reactive T-cell receptor: long-term follow-up and correlates with response, Clin Cancer Res, 21(5), 1019-27.
[0771] 14. Robek, M. D., and L. Ratner (1999), Immortalization of CD4(+) and CD8(+) T lymphocytes by human T-cell leukemia virus type 1 Tax mutants expressed in a functional molecular clone, J Virol, 73(6), 4856-65.
[0772] 15. Roybal, K. T., L. J. Rupp, L. Morsut, W. J. Walker, K. A. McNally, J. S. Park, and W. A. Lim (2016), Precision Tumor Recognition by T Cells With Combinatorial Antigen-Sensing Circuits, Cell, 164(4), 770-9.
[0773] 16. Sadelain, M., R. Brentjens, and I. Riviere (2009), The promise and pitfalls of chimeric antigen receptors, Curr. Opin. Immunol., 21, 215-23.
[0774] 17. Schade, A. E., G. L. Schieven, R. Townsend, A. M. Jankowska, V. Susulic, R. Zhang, H. Szpurka, and J. P. Maciejewski (2008), Dasatinib, a small-molecule protein tyrosine kinase inhibitor, inhibits T-cell activation and proliferation, Blood, 111(3), 1366-77.
[0775] 18. Sieburg, M., A. Tripp, J. W. Ma, and G. Feuer (2004), Human T-cell leukemia virus type 1 (HTLV-1) and HTLV-2 tax oncoproteins modulate cell cycle progression and apoptosis, J Virol, 78(19), 10399-409.
[0776] 19. Thome, M., et al. (1997), Viral FLICE-inhibitory proteins (FLIPs) prevent apoptosis induced by death receptors, Nature, 386(6624), 517-21.
[0777] 20. Turtle, C. J., M. Hudecek, M. C. Jensen, and S. R. Riddell (2012), Engineered T cells for anti-cancer therapy, Curr. Opin. Immunol., 24, 633-39.
[0778] 21. Weichsel, R., et al. (2008), Profound inhibition of antigen-specific T-cell effector functions by dasatinib, Clin Cancer Res, 14(8), 2484-91.
[0779] 22. Wu, C. Y., L. J. Rupp, K. T. Roybal, and W. A. Lim (2015), Synthetic biology approaches to engineer T cells, Curr Opin Immunol, 35, 123-30.
[0780] 23. Wu, C. Y., K. T. Roybal, E. M. Puchner, J. Onuffer, and W. A. Lim (2015), Remote control of therapeutic T cells through a small molecule-gated chimeric receptor, Science, 350(6258), aab4077.
[0781] 24. Zhan, J., B. Felder, A. R. Ellison, A. Winters, H. Salimi-Moosavi, S. Scully, J. R. Turk, and P. Wei (2013), Novel anti-c-Mpl monoclonal antibodies identified multiple differentially glycosylated human c-Mpl proteins in megakaryocytic cells but not in human solid tumors, Monoclonal antibodies in immunodiagnosis and immunotherapy, 32(3), 149-61.

[0782] The various methods and techniques described above provide a number of ways to carry out the application. Of course, it is to be understood that not necessarily all objectives or advantages described can be achieved in accordance with any particular embodiment described herein. Thus, for example, those skilled in the art will recognize that the methods can be performed in a manner that achieves or optimizes one advantage or group of advantages as taught herein without necessarily achieving other objectives or advantages as taught or suggested herein. A variety of alternatives are mentioned herein. It is to be understood that some preferred embodiments specifically include one, another, or several features, while others specifically exclude one, another, or several features, while still others mitigate a particular feature by inclusion of one, another, or several advantageous features.

[0783] Furthermore, the skilled artisan will recognize the applicability of various features from different embodiments. Similarly, the various elements, features and steps discussed above, as well as other known equivalents for each such element, feature or step, can be employed in various combinations by one of ordinary skill in this art to perform methods in accordance with the principles described herein. Among the various elements, features, and steps some will be specifically included and others specifically excluded in diverse embodiments.

[0784] Although the application has been disclosed in the context of certain embodiments and examples, it will be understood by those skilled in the art that the embodiments of the application extend beyond the specifically disclosed embodiments to other alternative embodiments and/or uses and modifications and equivalents thereof.

[0785] Preferred embodiments of this application are described herein, including the best mode known to the inventors for carrying out the application. Variations on those preferred embodiments will become apparent to those of ordinary skill in the art upon reading the foregoing description. It is contemplated that skilled artisans can employ such variations as appropriate, and the application can be practiced otherwise than specifically described herein. Accordingly, many embodiments of this application include all modifications and equivalents of the subject matter recited in the claims appended hereto as permitted by applicable law. Moreover, any combination of the above-described elements in all possible variations thereof is encompassed by the application unless otherwise indicated herein or otherwise clearly contradicted by context.

[0786] All patents, patent applications, publications of patent applications, and other material, such as articles, books, specifications, publications, documents, things, and/or the like, referenced herein are hereby incorporated herein by this reference in their entirety for all purposes, excepting any prosecution file history associated with same, any of same that is inconsistent with or in conflict with the present document, or any of same that may have a limiting affect as to the broadest scope of the claims now or later associated with the present document. By way of example, should there be any inconsistency or conflict between the description, definition, and/or the use of a term associated with any of the incorporated material and that associated with the present document, the description, definition, and/or the use of the term in the present document shall prevail.

[0787] It is to be understood that the embodiments of the application disclosed herein are illustrative of the principles of the embodiments of the application. Other modifications that can be employed can be within the scope of the application. Thus, by way of example, but not of limitation, alternative configurations of the embodiments of the application can be utilized in accordance with the teachings herein. Accordingly, embodiments of the present application are not limited to that precisely as shown and described.

[0788] Various embodiments of the invention are described above in the Detailed Description. While these descriptions directly describe the above embodiments, it is understood that those skilled in the art may conceive modifications and/or variations to the specific embodiments shown and described herein. Any such modifications or variations that fall within the purview of this description are intended to be included therein as well. Unless specifically noted, it is the intention of the inventors that the words and phrases in the specification and claims be given the ordinary and accustomed meanings to those of ordinary skill in the applicable art(s).

[0789] The foregoing description of various embodiments of the invention known to the applicant at this time of filing the application has been presented and is intended for the purposes of illustration and description. The present description is not intended to be exhaustive nor limit the invention to the precise form disclosed and many modifications and variations are possible in the light of the above teachings. The embodiments described serve to explain the principles of the invention and its practical application and to enable others skilled in the art to utilize the invention in various embodiments and with various modifications as are suited to the particular use contemplated. Therefore, it is intended that the invention not be limited to the particular embodiments disclosed for carrying out the invention.

[0790] While particular embodiments of the present invention have been shown and described, it will be obvious to those skilled in the art that, based upon the teachings herein, changes and modifications may be made without departing from this invention and its broader aspects and, therefore, the appended claims are to encompass within their scope all such changes and modifications as are within the true spirit and scope of this invention.

[0791] The present application and invention further includes the subject matter of the following numbered clauses.

[0792] 1. A chimeric antigen receptor comprising: an antigen-specific targeting domain; a hinge region; a transmembrane domain; and an intracellular signaling domain, wherein each antigen-specific targeting region comprises an antigen-specific single chain Fv (scFv) fragment or an antigen specific ligand.

[0793] 2. The chimeric antigen receptor of clause1, further comprising one or more co-stimulatory domains.

[0794] 3. The chimeric antigen receptor of clause 1, wherein the antigen-specific targeting domain targets any one or more of MPL receptor, CD19, GRP-78, CD79b, Lym-1, Lym-2, FLT3 or combinations thereof.

[0795] 4. The chimeric antigen receptor of clause 1, wherein the hinge region comprises any one or more of human CD8 hinge region, an Fc fragment of an antibody or a functional equivalent, fragment or derivative thereof, a hinge region of an antibody or a functional equivalent, fragment or derivative thereof, a CH2 region of an antibody, a CH3 region of an antibody, an artificial spacer sequence and combinations thereof.

[0796] 5. The chimeric antigen receptor of clause 4, wherein the hinge region comprises any one or more of (i) a hinge, CH2 and CH3 region of IgG4, (ii) a hinge region of IgG4, (iii) a hinge and CH2 region of IgG4, (iv) a hinge region of CD8a, (v) a hinge, CH2 and CH3 region of IgG1, (vi) a hinge region of IgG1, (vi) a hinge and CH2 region of IgG1, or (vii) combinations thereof.

[0797] 6. The chimeric antigen receptor of clause 1, wherein the transmembrane domain comprises any one or more of a transmembrane domain of a zeta chain of a T cell receptor complex, CD28, CD8a, and combinations thereof.

[0798] 7. The chimeric antigen receptor of clause 2, wherein the co-stimulatory domain comprises a signaling domain from any one or more of CD28, CD137 (4-1BB), CD134 (OX40), Dap10, CD27, CD2, CDS, ICAM-1, LFA-1, Lck, TNFR-I, TNFR-II, Fas, CD30, CD40 and combinations thereof.

[0799] 8. The chimeric antigen receptor of clause 1, wherein the intracellular signaling domain comprises a signaling domain of one or more of a human CD3 zeta chain, FcgRIII, FceRI, a cytoplasmic tail of a Fc receptor, an immunoreceptor tyrosine-based activation motif (ITAM) bearing cytoplasmic receptors, and combinations thereof.

[0800] 9. The chimeric antigen receptor of clause 1, further coexpressed with scFv or vHH or bispecific antibody specific for cytokines or cytokine receptor.

[0801] 10. The chimeric antigen receptor of clause 9, wherein the coexpressed cytokines or cytokine receptor are any one or more of, IL-6, IL6R, IFNγ, TNFα or combinations thereof.

[0802] 11. The chimeric antigen receptor of clause 1, further coexpressing the peptide FX06 so as to mitigate capillary leak associated with CAR therapy.

[0803] 12. The chimeric antigen receptor of clause 1, further coexpressing a viral or cellular signaling protein to stimulate T cell activation, proliferation and/or to block T cell activation induced cell death.

[0804] 13. The chimeric antigen receptor of clause 12, wherein the signaling protein is any one or more of vFLIP K13, vFLIP MC159, vFLIP MC160, vFLIP E8, HSV vFLIP, BHV vFLIP, Herpes virus Mecaca vFLIP, cFLIP/MRITα, cFLIP-p22, HTLV1 Tax, HTLV2 Tax, HTLV1-Tax RS mutant, HTLV2 Tax RS mutant, Tio, StpC, Tip or mutants or combinations thereof.

[0805] 14. The chimeric antigen receptor of clause 12, wherein the signaling protein is expressed in a constitutive or inducible manner.

[0806] 15. The chimeric antigen receptor of clause 12, where activity of the signaling protein is controlled at the post-translational level by administration of a compound.

[0807] 16. The chimeric antigen receptor of clause 12, where the signaling protein is expressed in fusion with one or more copies of FKBP domain.

[0808] 17. The chimeric antigen receptor clause 16, where the activity of the protein is controlled at the post-translational level by administration of therapeutically effective amount of a chemical compound that induces dimerization of the FKBP domain.

[0809] 18. A chimeric antigen receptor of clauses 1 or 3, where the antigen specific targeting domain targeting MPL comprises a scFV fragment of 161, 175, 178, AB317, 12E10, or VB22 or human TPO or mouse TPO or mutants thereof.

[0810] 19. A chimeric antigen receptor of clauses 1 or 3, where the antigen specific targeting domain targeting CD19 comprises a scFV fragment of CD19Bu12 or CD19MM or mutants thereof.

[0811] 20. A chimeric antigen receptor of clauses 1 or 3, where the antigen specific targeting domain targeting CD79b comprises a scFV fragment of huMA79bv28 or CD79b-2F2 or mutants thereof.

[0812] 21. A chimeric antigen receptor of clauses 1 or 3, wherein the antigen specific targeting domain targeting FLT3 comprises a scFV fragment of NC7 or mutants thereof.

[0813] 22. A chimeric antigen receptor of clauses 1 or 3, wherein the antigen specific targeting domain targeting Lym1 antigen comprises a scFV fragment of Lym1 or mutants thereof.

[0814] 23. A chimeric antigen receptor of clauses 1 or 3, wherein the antigen specific targeting domain targeting Lym2 antigen comprises a scFV fragment of Lym2 or mutants thereof.

[0815] 24. A chimeric antigen receptor of clauses 1 or 3, wherein the antigen specific targeting domain targeting GRP-78 comprises a scFV fragment of GRP78-GC18 or mutants thereof.

[0816] 25. A polynucleotide encoding the chimeric antigen receptor of any one of clauses 1, 12 and 18-24.

[0817] 26. A polypeptide encoding the polynucleotide of clause 25.

[0818] 27. A vector comprising the polynucleotide of clause 25.

[0819] 28. A virus comprising the polynucleotide of clause 25.

[0820] 29. The virus of clause 25, wherein the virus is a retrovirus, an adenovirus, an adeno-associated virus, a lentivirus, a pox virus or a herpes virus.

[0821] 30. A genetically engineered cell, comprising the polynucleotide of clause 25 or the chimeric antigen receptor of clause 1.

[0822] 31. The genetically engineered cell of clause 30, wherein the cell is a T-lymphocyte (T-cell).

[0823] 32. The genetically engineered cell of clause 31, wherein the cell is a naïve T cells, a central memory T cells, an effector memory T cell, Treg or a combination thereof.

[0824] 33. The genetically engineered cell of clause 21, wherein the cell is a natural killer (NK) cell, a hematopoietic stem cell (HSC), an embryonic stem cell, or a pluripotent stem cell.

[0825] 34. A pharmaceutical composition comprising: any one or more of the chimeric antigen receptor of clause 1, the polynucleotide of clause 25, the polypeptide of clause 26, the vector of clause 27, the virus of clause 28, the genetically engineered cell of clause 30 and combination thereof; and a pharmaceutically acceptable carrier.

[0826] 35. A method for treating cancer comprising: providing the composition of clause 34; and administering a therapeutically effective amount of the composition to the subject so as to treat cancer.

[0827] 36. The method of clause 35, wherein the cancer is blood cancer.

[0828] 37. The method of clause 36, wherein the blood cancer is any one or more of acute myeloid leukemia, chronic myeloid leukemia, myelodysplastic syndrome, lymphoma, multiple myleoma and acute lymphocytic leukemia.

[0829] 38. A method of controlling the activity of T cells expressing the CAR of clause 1, comprising administering a therapeutically effective amount of an inhibitor of tyrosine kinases wherein the kinase are selected from the src family of kinases.

[0830] 39. A method of treating CRS associated with treatment with CAR-T cells comprising administering a therapeutically effective amount of an inhibitor of tyrosine kinases wherein the kinase are selected from the src family of kinases.

[0831] 40. A method of treating neurological complications associated with treatment with CAR-T cells comprising administering a therapeutically effective amount of an inhibitor of tyrosine kinases wherein the kinase are selected from the src family of kinases.

[0832] 41. The method of clauses 38, 39 or 40, wherein the inhibitor inhibits the src kinase Lck.

[0833] 42. The method of clause 41, wherein the inhibitor is Dasatinib.

[0834] 43. The method of clause 41, wherein the inhibitor is Ponatinib.

[0835] 44. The method of clause 41, wherein the inhibitor is A-770041.

[0836] 45. A method of controlling the activity of T cells activated by a BiTE comprising administering a therapeutically effective amount of an inhibitor of tyrosine kinases wherein the kinase are selected from the src family of kinases.

[0837] 46. A method of treating CRS caused by treatment with BiTE comprising administering a therapeutically effective amount of an inhibitor of tyrosine kinases wherein the kinase are selected from the src family of kinases.

[0838] 47. A method of treating neurological complications caused by treatment with BiTE comprising administering a therapeutically effective amount of an inhibitor of tyrosine kinases wherein the kinase are selected from the src family of kinases.

[0839] 48. The method of clauses 45, 46 or 47, wherein the BiTE is Blinatumomab (Blincyto).

[0840] 49. The method clauses 45, 46 or 47, wherein the inhibitor inhibits the src kinase Lck.

[0841] 50. The method of clause 49, wherein the inhibitor is Dasatinib.

[0842] 51. The method of clause 49, wherein the inhibitor is Ponatinib.

[0843] 52. The method of clause 49, wherein the inhibitor is A-770041.

[0844] 53. A method of treating complications of CAR and BiTE comprising administering a therapeutically effective amount of an inhibitor of tyrosine kinases wherein the kinase are selected from the src family of kinases.

[0845] 54. The method of clause 53, wherein the BiTE is Blinatumomab (Blincyto).

[0846] 55. The method of clause 53, wherein the inhibitor inhibits the src kinase Lck.

[0847] 56. The method of clause 55, wherein the inhibitor is Dasatinib.

[0848] 57. The method of clause 55, wherein the inhibitor is Ponatinib.

[0849] 58. The method of clause 55, wherein the inhibitor is A-77041.

[0850] 59. A method of treating CRS, neurological complications and other complications of CAR-T cells and BiTE by administration of therapeutic effective amount of Avasimibe.

[0851] 60. A method of immortalizing human peripheral blood mononuclear cells and T cells by expressing vFLIP K13 in the cells.

[0852] 61. The method clause 60, wherein vFLIP K13 is expressed constitutively.

[0853] 62. The method clause 60, wherein vFLIP K13 is expressed in a manner that allows control of its activity at the transcriptional or post-translational level.

[0854] 63. The method clause 60, wherein vFLIP K13 is expressed in fusion with one or more domains of FKBP.

[0855] 64. The method of clause 63, where FKBP-vFLIP-K13 fusion protein further comprises an N-terminal Myristoylation sequence.

[0856] 65. The method of clause 64, wherein the activity of FKBP-vFLIP-K13 fusion protein is controlled by a chemical that induces dimerization of FKBP domain and activation of K13 induced NF-kB signaling.

[0857] 66. The method of clause 65, wherein the peripheral blood mononuclear cells and/or T cells expressing K13 or FKBP-K13 fusion protein are administered to a patient.

[0858] 67. The method of clause 65, wherein the peripheral blood mononuclear cells and/or T cells expressing K13 or FKBP-K13 fusion protein also co-express a chimeric antigen receptor, a native T cell receptor or an artificial T cell receptor.

[0859] 68. A method of immortalizing human peripheral blood mononuclear cells and T cells by expressing HTLV2 Tax protein in the cells.

[0860] 69. A method of immortalizing human peripheral blood mononuclear cells and T cells by expressing HTLV2 Tax RS mutant protein in the cells.

[0861] 70. The method clauses 68 or 69, wherein the HTLV2 Tax and its RS mutants are expressed in fusion with one or more domains of FKBP.

[0862] 71. A method of clause 70, wherein FKBP-Tax fusion proteins further comprises an N-terminal Myristoylation sequence.

[0863] 72. The method of clause 71, wherein the activity of FKBP-Tax and FKBP-Tax-RS fusion proteins is controlled by a chemical that induces dimerization of FKBP domain and activation of Tax induced NF-kB signaling.

[0864] 73. The method of clause72, wherein the peripheral blood mononuclear cells and/or T cells expressing HTLV2 Tax HTLV2 Tax-RS mutant, FKBP-Tax, or FKBP-Tax-RS mutant proteins are administered to a patient.

[0865] 74. The method of clause 72, wherein the peripheral blood mononuclear cells and/or T cells expressing HTLV-Tax or FKBP-Tax fusion protein further co-express a chimeric antigen receptor, a native T cell receptor or an artificial T cell receptor.

The application's sequence listing, which the Patent Office published only in electronic form, follows.

SEQUENCE LISTING (3545 sequences)

SEQ ID NO: 1 - DNA, 63 bp, Artificial Sequence
  Synthetic Polynucleotides
atggccttaccagtgaccgccttgctcctgccgctggccttgctgctccacgccgccaggccg

SEQ ID NO: 2 - DNA, 63 bp, Artificial Sequence
  Synthetic Polynucleotide
atggccctgcccgtgacagccctgctgctgcctctggctctgctgctgcacgccgccagaccc

SEQ ID NO: 3 - DNA, 63 bp, Artificial Sequence
  Synthetic Polynucleotide
atggcccttccagtcactgccttgctgttgcctctggcgctcctgctccacgccgctagaccg

SEQ ID NO: 4 - DNA, 63 bp, Artificial Sequence
  Synthetic Polynucleotide
atggccctgcctgtgacagctctgctgctgcctctggcactgctgctgcacgccgccagacct

SEQ ID NO: 5 - DNA, 57 bp, Artificial Sequence
  Synthetic Polynucleotide
atggattggatatggaggatactttttctcgtgggggcagcaaccggggctcattcc

SEQ ID NO: 6 - DNA, 57 bp, Artificial Sequence
  Synthetic Polynucleotide
atggactggatttggcgcatccttttccttgtcggcgctgctaccggcgcgcattcc

SEQ ID NO: 7 - DNA, 57 bp, Artificial Sequence
  Synthetic Polynucleotide
atggactggatttggcgcatccttttccttgtcggcgctgctaccggcgcgcattct

SEQ ID NO: 8 - DNA, 57 bp, Artificial Sequence
  Synthetic Polynucleotide
atggactggatttggcgcatccttttccttgtcggcgctgctaccggcgcccattcc

SEQ ID NO: 9 - DNA, 60 bp, Artificial Sequence
  Synthetic Polynucleotide
atgaggctccctgctcagctcctggggctgctaatgctctgggtctctggaagcagtggg

SEQ ID NO: 10 - DNA, 60 bp, Artificial Sequence
  Synthetic Polynucleotide
atgccacctcctcgcctcctcttcttcctcctcttcctcacccccatggaagtcaggccc

SEQ ID NO: 11 - DNA, 333 bp, Artificial Sequence
  Synthetic Polynucleotides
cagtctgtgctgacacagcctgcctctgtgtctggctctcctggccagagcatcaccatcagctgtaccggcaccagctctgatgtcggcggctacaattacgtgtcctggtatcagcagcaccccggcaaggcccctaagctgatgatctacgacgtgaacaacagacccagcgaggtgtccaacagattcagcggcagcaagagcggcaataccgccagcctgacaatctctggactgcaagccgaggacgaggccgactactactgtagcagctacaccacaggcagcagagccgtttttggcggaggcaccaaactgacagtgcttgga

SEQ ID NO: 12 - DNA, 330 bp, Artificial Sequence
  Synthetic Polynucleotides
cagtctgtggtcacacagcctccatccgtgtctgctgcccctggacagaaagtgaccatctcctgtagcggcagcagcagcaacatcggcaacaactacgtgtcctggtatcagcagctccccggcacagctcccaaactgctgatctacgacaacaacaagcggcccagcggcatccccgatagattttctggcagcaagagcggcaccagcgccacactgggaattaccggacttcagacaggcgacgaggccgactactactgtggcacatgggatggcagcctgtacaccatgcttttcggcggaggcaccaagctgacagtgctt

SEQ ID NO: 13 - DNA, 339 bp, Artificial Sequence
  Synthetic Polynucleotides
cagtctgtgctgacacagcctcctagtgtgtctggcgctcctggacagagagtgaccatctcttgtaccggcagcagcagcaatatcggagccggctatgacgtgcactggtatcagcagctccctggcacagcccctaaactgctgatcttcggcaacagcaacagacccagcggcgtgcccgatagattcagcggctttaagagcggcacaagcgccagcctggctatcactggactgcaagccgaggacgaggccgactacttctgccagagctacgatagcagcctgagcggcagcggagtgtttggcacaggcaccaaagtgacagtgcttggc

SEQ ID NO: 14 - DNA, 333 bp, Artificial Sequence
  Synthetic Polynucleotides
gacgtgcagatgatccagacccccgatagcctggccgtgtccctgggacagagagccaccatctcttgcagagccagcgagagcgtggacaactacggcatcagcttcatgcactggtatcagcagaagcccggccagagccccaagctgctgatctacagagcctccaacctggaaagcggcatccccgccagattttccggcagcggcagcagaaccgacttcaccctgaccatcaaccccgtggaaaccgacgacgtggcaacctactactgccagcagaacaacaaggacccccccacctttggcggaggcaccaagctggaaatcaag

SEQ ID NO: 15 - DNA, 321 bp, Artificial Sequence
  Synthetic Polynucleotides
gacgtgcagatgatccagacccccagcagcctgtctgccagcctgggcgatagagtgaccatcagctgtcgggccagccaggacatcggcaactacctgaactggtatcagcagaaacccgacggcaccgtgaagctgctgatctactacaccagcagactgcacagcggcgtgcccagcagattttctggcagcggctctggcaccgagtacagcctgaccatctccaacctggaacaggaagatattgctacctacttctgtcagcaaggcagcgccctgccccctacatttggcggcggaacaaagctggaaatcaac

SEQ ID NO: 16 - DNA, 336 bp, Artificial Sequence
  Synthetic Polynucleotides
gatgttgtgatgactcagtctccactctccctgcccgtcacccctggagcgccggcctccatctcctgcagatccagtcagagcattgtacatagtaatggaaacacctatttagagtggtatcttcaaaagccagggcagtctccaaagctcctgatctataaagtttccaaccgattttctggagtccctgacaggttcagtggaagtggatcaggcacagattttacactgagaatcagcagagtggaggctgaggatgttggaatttattactgctttcaaggttcacatgttcctccgacgttcggccctgggaccaaattggaaatcaaa

SEQ ID NO: 17 - DNA, 336 bp, Artificial Sequence
  Synthetic Polynucleotides
cagtctgtgctgacacagcctcctagtgtgtctggcgctcctggacagagagtgaccatcagctgtacaggcagcagcagcaatatcggagccggctttgacgtgcactggtatcagcagctgcctggcacagcccctaaactgctgatctacggcaacagcaacagacccagcggcgtgcccgatagattttccggctctaagagcggcacaagcgccagcctggctattactggactccaggccgaggacgaggccgactactactgtcagagctacgacagcagcctgagcggctacgttttcggcaccggcaccaaagtgacagtgcttggt

SEQ ID NO: 18 - DNA, 333 bp, Artificial Sequence
  Synthetic Polynucleotides
caggctgttctgacacagcctccatctgcctctggcacacctggacagagagtgaccatctcctgtagcggcagcagcagcaacatcggcagctacaccgtgtcctggtatcagcagctccctggaacagcccctaagttcctgatctacagcaacaaccagcggcctagcggcgtgcccgatagattttctggcagcaagagcggcacaagcgccagcctggctatttctggactccagtctgaggacgaggccgactactattgtgccgcctgggacgatagcctgaacggctatgtgtttggcaccggcaccaaagtgacagtgcttggt

SEQ ID NO: 19 - DNA, 336 bp, Artificial Sequence
  Synthetic Polynucleotides
gacatcgtgctgacacagagccctgccaccctgtctctgagccctggcgatagagccaccatcagctgtagagccagcgagagcgtgaccatcctgggcagccacctgatctactggtatcagcagaagcccggccagccccccagactgctgattcagctggcctccaatgtgcagaccggcgtgccagccagattttccggcagcggcagcagaaccgacttcaccctgaccatcagcagcgtggaacccgaggacttcgccgtgtactactgcctccagagccggaccatccccagaacattcggccagggcaccaagctggaaatcaagaga

SEQ ID NO: 20 - DNA, 324 bp, Artificial Sequence
  Synthetic Polynucleotides
gacatccagatgacccagagccctagctcactgagcgccagcgtgggcgacagggtgaccattacctgctccgccagccaggacatcagcaactacctgaactggtaccagcagaagcccggcaaggcccccaagctgctgatctactacacctccaacctgcactccggcgtgcccagcaggttcagcggaagcggcagcggcaccgatttcaccctgaccatctccagcctgcagcccgaggacttcgccacctactactgccagcagtacaggaagctcccctggactttcggccagggcaccaaactggagatcaagcgt

SEQ ID NO: 21 - DNA, 342 bp, Artificial Sequence
  Synthetic Polynucleotides
ctgcctgttctgacacagcctccatctgcctctggcacacctggacagagagtgaccatcagctgtagcggcagaagcagcaacatcggcagcaacagcgtgaactggtacagacagcttcctggcgctgcccctaagctgctgatctacagcaacaaccagcggcctcctggcgtgccagtcagattttctggcagcaagagcggcacaagcgccagcctggctatttctggactccagtctgaggacgaggccacctactactgtgccacctgggacgacaacctgaacgtgcactacgtgttcggcaccggcaccaaagtgacagtgcttggaagtaga

SEQ ID NO: 22 - DNA, 333 bp, Artificial Sequence
  Synthetic Polynucleotides
gacatcgtgctgacacagagccctgcttctctggccgtgtctctgggagagagagccaccatcaactgtagagccagcgagagcgtgtccgtgattggagcccacctgatccactggtatcagcagaagcctggacagcctcctaagctgctgatctacctggcctccaacctggaaacaggcgtgccagccagattttctggcagcggctctggcaccgatttcaccctgacaatcagcagcctccaggccgaagatgccgccatctactactgcctccagagccggatcttccccagaacctttggacagggcaccaagctggaaatcaaa

SEQ ID NO: 23 - DNA, 336 bp, Artificial Sequence
  Synthetic Polynucleotides
gacatcgtgctgacacagtctcccgccacactgtcactgagccctggcgatagagccacactgagctgtagagccagcgagagcgtgacaatcctgggcagccacctgatctactggtatcagcagaagcccggacaggcccctagactgctgattcagctcgccagcaatgtgcagacaggcatccctgccagattttccggcagcggcagcagaaccgatttcaccctgaccataagcagcctggaacctgaggacttcgccgtgtactactgcctccagagccggacaatccccagaacctttggacagggcaccaagctggaaatcaagaga

SEQ ID NO: 24 - DNA, 336 bp, Artificial Sequence
  Synthetic Polynucleotides
gacatcgtgatgacccagagccccgatagcctggccgtgtctctgggagagagagccaccatcaactgcaagagcagccagagcatcctgtacagcagcaaccagaagaactacctggcctggtatcagcagaagcccggccagagccctaagctgctgatctactgggccagcaccagagaaagcggcgtgcccgatagattcagcggcagcggctctggcaccgacttcaccctgaccatcagttctcttcaggccgaggacgtggccgtgtactactgccaccagtacatcagctcctacaccttcggccagggcaccaagctggaaatcaag

SEQ ID NO: 25 - DNA, 342 bp, Artificial Sequence
  Synthetic Polynucleotides
gacatcgtgatgacccagagccccgatagcctggccgtgtctctgggagagagagccaccatcaactgcgagagcagccagagcctgctgaacagcggcaaccagaagaactacctgacctggtatcagcagaagcccggccagccccccaagcccctgatctattgggccagcaccagagaaagcggcgtgcccgatagattcagcggcagcggaagcggcaccgacttcaccctgaccatcagttctcttcaggccgaggacgtggccgtgtactactgccagaacgactacagctacccctacaccttcggccagggcaccaagctggaaatcaagaga

SEQ ID NO: 26 - DNA, 333 bp, Artificial Sequence
  Synthetic Polynucleotides
gacatcgtgctgacacagagccctgcttctctggccgtgtctctgggacagagagccaccatcagctgtagagccagcgagagcgtggacaactacggcaacaccttcatgcactggtatcagcagaagcccggccagcctcctaagctgctgatctacagagccagcaacctggaaagcggcatccccgccagattttctggcagcggcagcagaaccgacttcaccctgaccatcaatcccgtggaagccgacgacgtggcaacctactactgccagcagagcaacgaggaccctcctacatttggagccggcaccaagctggaactgaaa

SEQ ID NO: 27 - DNA, 339 bp, Artificial Sequence
  Synthetic Polynucleotides
gacttcgtgatgacacagagccctgatagcctggccgtgtctctcggcgagcgagtgaccatgagctgcaagtctagccagagcctgctgaacagcggcaaccagaagaactacctgacctggtatcagcagaagcccggccagcctcctaagctgctgatctactgggccagcaccagagaaagcggcgtgcccgatagattttctggctctggcagcggcaccgacttcaccctgacaatttctagcctgcaagccgaggacgtggccgtgtactactgccagaacgactacagctacccctacaccttcggccagggcaccaagctggaaatcaaa

SEQ ID NO: 28 - DNA, 339 bp, Artificial Sequence; identical to SEQ ID NO: 27
  Synthetic Polynucleotides

SEQ ID NO: 29 - DNA, 327 bp, Artificial Sequence
  Synthetic Polynucleotides
gagatcgtgctgacacagagccctggcacactgtcactgtctccaggcgaaagagccacactgagctgtagagccagccagagcgtgtccagctcttacctggcttggtatcagcagaagcccggacaggctcccagactgctgatctacggtgcctctagcagagccacaggcatccccgatagattttctggcagcggctccggcaccgacttcaccctgacaatcagcagactggaacccgaggacttcgccgtgtactactgccagcaggactacggcttcccttggacctttggacagggcaccaaggtggaaatcaagaga

SEQ ID NO: 30 - DNA, 333 bp, Artificial Sequence
  Synthetic Polynucleotides
cagttcgtgctgacacagcctccaagcgtgtccaccaatcctggcagcacagtgaagctgagctgcaagagaaacaccggcaacatcggcagcaactacgtgaactggtatcagcagaagcccggacagagccccaccaccatgatctacagagatgacaagaggcccgacggcgtgcccgatagattttccggctctatcgacagaagcagcaacagcgccctgctgaccatcaacaacgtgcagacagaggacgaggccgactacttctgccagagctacagcagcggcatcaacatcatcttcggcggaggcaccaagctgacagttctt

SEQ ID NO: 31 - DNA, 321 bp, Artificial Sequence
  Synthetic Polynucleotides
gacatccagatgacacagtctccagccagcctgtctgcctctctgggagagacagtgaccatcgagtgcagacccagcgaggacatccacagcaacgtggcctggtatcagcagaagcccggcaattctccccagctgctgatctacgacgccagcaatctggctgatggcgtgcccagcagattttctggcagcggctctggcacacagtacagcctgaagatcaacagcctccagagcgaggacgtggcctcctacttctgccaccagtacaacatctacccctacaccttcggcagcggcaccaagctggaacttaaa

SEQ ID NO: 32 - DNA, 324 bp, Artificial Sequence
  Synthetic Polynucleotides
gagatcgtgctgacacagtctcccgccacactgtcactgtctccaggcgaaagagccacactgagctgtagagccagccagagcgtgtcctcttacctggcctggtatcagcagaagcctggacaggctccccggctgctgatctacgatgccagcaatagagccacaggcatccccgccagattttctggctctggcagcggcaccgatttcaccctgaccataagcagcctggaacctgaggacttcgccgtgtactactgccagcagagaagcaactggcccctgacctttggacagggcaccaaggtggaaatcaagaga

SEQ ID NO: 33 - DNA, 324 bp, Artificial Sequence
  Synthetic Polynucleotides
gacgtgcagatcacacagagccctagctacctggctgcctctcctggcgagacaatcaccatcaactgtcgggccagcaagagcatcagcaaggacctggcctggtatcaagagaagcccggcaagaccaacaagctgctgatctacagcggcagcacactccagtctggcatccccagcagattttccggctctggcagcggcaccgatttcaccctgaccataagcagcctggaacctgaggacttcgccatgtactactgccagcagcacaacaagtacccctacacctttggcggaggcaccaagctggaaatcaagaga

SEQ ID NO: 34 - DNA, 321 bp, Artificial Sequence
  Synthetic Polynucleotides
gacatccagatgacacagtctccagccagcctgtctgcctctctgggagagacagtgaccatcgagtgccggaccagcaaggacatctacagcaacctggcctggttccagcaagagcccggcaattctcctcagctcctgatctacgacgccagcaatctggctgatggcgtgcccagcagattttctggcagcggctctggcacacagtacagcctccagatcaacaacctccagagcgaggacgtggcctcctacttctgccaccagtacaacaactacccctacaccttcggcaccggcaccaagctggaacttaaa

SEQ ID NO: 35 - DNA, 318 bp, Artificial Sequence
  Synthetic Polynucleotides
gagatcgtgctgacacagagccctaccagcatgacagcctctccaggcgagcaagtgaccatcacctgtagagccagcagcagcatcaactacatgcactggtatcagcagaagcctggcgcaagccccagaccttggatctacgagacaagcaagctggcctccggcgtgcccgatagattttctggatctgccagcggcaccagctacagcctgaccatcaacaacatggaagccgaggacgccgccacctactactgccagcagtggaattacccctcctggacctttggcggaggcaccaagctggaacttaaa

SEQ ID NO: 36 - DNA, 339 bp, Artificial Sequence
  Synthetic Polynucleotides
gacatcgtgatgacacagagcccttctagcctggccgtgtctgagggcgagacagtgaccatcaactgcaagagcagccagagcttcctgtctagcggcgacggcaagaattacgtggcctggtatcagtacaagcccggacagagccccaagctgctgatctactgggccagcacaagacagagcggcgtgcccgatagattcatcggctctggcagcggcaccgacttcaccctgacaatctctacagtgcaggccgaggacctggctatctactactgccagcagtattacgacacccctctgacctttggctccggcaccaagctggaaatcaaa

SEQ ID NO: 37 - DNA, 339 bp, Artificial Sequence
  Synthetic Polynucleotides
gacgtgctgatgacccagacacctgtgtctctgccagtgtctctcggaggccaggtgtccatctcctgtagaagcagccagagcctggtgcactccgacggcgatacctacctgcactggtatctccagaagcctggacagagccctcagctcctgatctaccgggtgtccaacagattcagcggcgtgcccgatagattttccggcagcggctctggcaccgacttcaccctgaagatcagcagagtggaacccgaggacctgggcctgtactactgtctccagaccacacacttcccaccttggacctttggcggaggcaccaagctggaaatgaaa

SEQ ID NO: 38 - DNA, 321 bp, Artificial Sequence
  Synthetic Polynucleotides
gacatccagatgacccagtctaccagttccctgagtgcatccctcggagacagggtgacgatcagttgcagcgcaagccaagggatcaataactatctgaactggtatcagcagaaaccggacggaacagtcgaactcctgatttattacaccagcacccttcagagtggcgtcccttcccggttcagtggctccggaagcgggaccgattactccctgaccatttctaatctggagccagaggacataggaacgtattattgccagcagtatagtaaactgccacgaacttttggaggggggacgaaactggagatcaaa

SEQ ID NO: 39 - DNA, 318 bp, Artificial Sequence
  Synthetic Polynucleotides
gacatccagatgacccagagccctgccagcctgtccgtgtctgtgggcgagacagtgaccatcacctgtcgggccagcgagaacatctacagcaacctggcctggtatcagcagaagcagggcaagagcccccaactgctggtgtacgccgccaccaatctggccgatggcgtgcccagcagattttccggctctggcagcggcacccagtacagcctgaagatcaacagcctccagagcgaggacttcggcagctactactgccagcacttctggggcacctggacctttggaggaggcaccaccctggaaatcaag

SEQ ID NO: 40 - DNA, 339 bp, Artificial Sequence
  Synthetic Polynucleotides
gacatcgtgatgacccaggccgctcccagcatccctgtgacacctggcgagagcgtgtccatctcctgccggtctagcaagagcctgctgaacagcaacggcaatacctacctgtactggttcctccagcggccaggccagtctccccaactgctgatctaccggatgagcaacctggcctccggcgtgcccgatagattttctggcagcggctccggcaccgccttcaccctgagaatcagcagagtggaagccgaggacgtgggcgtgtactactgtatgcagcacctggaataccccttcaccttcggagccggcaccaagctggaactgaagaga

SEQ ID NO: 41 - DNA, 321 bp, Artificial Sequence
  Synthetic Polynucleotides
gagatcgtgctgacacagagccccgccaccctgtcactgtctccaggcgaaagagccaccctgagctgtagcgccagcagcagcgtgtcctacatgcactggtatcagcagaagcccggccaggcccccagactgctgatctacgataccagcaagctggcctccggcatccccgccagattttctggcagcggctccggcaccgacttcaccctgacaatcagcagcctggaacccgaggacgtggccgtgtactactgttttcaaggcagcgtgtaccccttcaccttcggccagggcaccaagctggaaatcaagaga

SEQ ID NO: 42 - DNA, 333 bp, Artificial Sequence
  Synthetic Polynucleotides
gacatccagctgacacagagccctgccagcctggccgtgtctctgggacagagagccaccatcagctgcaaggccagccagagcgtggactacgacggcgacagctacctgaactggtatcagcagatccccggccagccccccaagctgctgatctacgatgccagcaacctggtgtccggcatcccccctagattttccggcagcggctccggcaccgacttcaccctgaatatccaccccgtggaaaaggtggacgccgccacctaccactgccagcagagcaccgaagatccctggacctttggcggaggcaccaagctggaaatcaag

SEQ ID NO: 43 - DNA, 321 bp, Artificial Sequence
  Synthetic Polynucleotides
gacatccagatgacacagactacatcctccctgtctgcctctctgggagacagagtcaccatcagttgcagggcaagtcaggacattagtaaatatttaaattggtatcagcagaaaccagatggaactgttaaactcctgatctaccatacatcaagattacactcaggagtcccatcaaggttcagtggcagtgggtctggaacagattattctctcaccattagcaacctggagcaagaagatattgccacttacttttgccaacagggtaatacgcttccgtacacgttcggaggggggaccaagctggagatcaca

SEQ ID NO: 44 - DNA, 321 bp, Artificial Sequence
  Synthetic Polynucleotides
gacatccagatgacacagactacatcctccctgtctgcctctctgggagacagagtcaccatcagttgcagggcaagtcaggacattagtaagtacctgaactggtatcagcagaaaccagatggaactgttaaactcctgatctaccatacatcaagattacactcaggagtcccatcaaggttcagtggcagtgggtctggaacagattattctctcaccattagcaacctggagcaagaagatattgccacttacttttgccaacagggtaatacgcttccgtacacgttcggaggggggaccaagctggagatcaca

SEQ ID NO: 45 - DNA, 321 bp, Artificial Sequence
  Synthetic Polynucleotides
gacatccagatgacacagactacatcctcactgtctgcctctctgggagacagagtcaccatcagttgcagggcaagtcaggacattagtaagtacctgaactggtatcagcagaaaccagatggaactgttaaactcctgatctaccatacatcaagattacactcaggagtcccatcaaggttcagtggcagtgggtctggaacagattattctctcaccattagcaacctggagcaagaagatattgccacttacttttgccaacagggtaatacgcttccgtacacgttcggaggggggaccaagctggagatcaca

SEQ ID NO: 46 - DNA, 321 bp, Artificial Sequence
  Synthetic Polynucleotides
gagatcgtgatgacccagagccctgccaccctgtctctgagccctggcgaaagagccaccctgagctgtagagccagccaggacatcagcaagtacctgaactggtatcagcagaagcccggccaggcccccagactgctgatctaccacaccagcagactgcacagcggcatccccgccagattttctggctctggcagcggcaccgactacaccctgacaatcagcagcctccagcccgaggacttcgccgtgtacttctgtcagcaaggcaacaccctgccctacaccttcggccagggcaccaagctggaaatcaag

SEQ ID NO: 47 - DNA, 333 bp, Artificial Sequence
  Synthetic Polynucleotides
gagatcgtgctgacacagagccccgatttccagagcgtgacccctaaagaaaaagtgaccatcacctgtcgggccagcgagagcgtggacacattcggcatcagcttcatgaactggttccagcagaagcccgatcagagccccaagctgctgattcacgccgccagcaatcaaggcagcggagtgcctagcagattttccggctctggcagcggcaccgatttcaccctgaccatcaatagcctggaagccgaggatgccgccacctactactgccagcagagcaaagaggtgcccttcacctttggcggaggcaccaaggtggaaatcaaa

SEQ ID NO: 48 - DNA, 321 bp, Artificial Sequence
  Synthetic Polynucleotides
gccattcagctcacacagagcccttctagcctgagcgcctctgtgggcgacagagtgaccatcacatgtagagccagccagggcatcagcagcgcccagcagaaacctggaaaggcccctaagctgctgatcctggcctggtacagcagcctggaaagcggagtgcctagcagattcagcggctacgatgcctctggcagcggcaccgatttcaccctgacaatatccagcctccagcctgaggacttcgccacctactactgccagcagttcaacagctacccctacaccttcggccagggcaccaagctggaaatcaaa

SEQ ID NO: 49 - DNA, 336 bp, Artificial Sequence
  Synthetic Polynucleotides
gacatcgtgatgacacagagccccgccacactgtcactgtctccaggcgaaagagccacactgagctgtcggagcagcaagagcctccagaacgtgaacggcaacacctacctgtactggttccagcagaagcccggccagtctcctcagctcctgatctacagaatgagcaacctgaacagcggcgtgcccgacagattttctggcagcggaagcggcaccgagttcaccctgaccataagcagcctggaacctgaggacttcgccgtgtactactgtatgcagcacctggaataccccatcaccttcggagccggcaccaagctggaaatcaaa

SEQ ID NO: 50 - DNA, 333 bp, Artificial Sequence
  Synthetic Polynucleotides
gacatcctgctgacacagtctcccgccacactgtcactgtctccaggcgaaagagccacactgagctgtagagccagccagagcgtggactacgacggcgacagctacctgaactggtatcagcagaagcccggccagcctcctaagctgctgatctacgatgccagcaacctggtgtctggcatccctcctagattttccggcagcggctctggcaccgatttcaccctgaccatcagcagactggaacccgaggacttcgccgtgtaccactgtcagcagagcacagaggacccctggacatttggcggaggcaccaagctggaaatcaaa

SEQ ID NO: 51 - DNA, 333 bp, Artificial Sequence
  Synthetic Polynucleotides
gacatcctgctgacacagtctcccgccacactgtcactgtctccaggcgaaagagccacactgagctgtagagccagccagagcgtggacaactacggcatcagcttcatgaactggtatcagcagaagcccggccagcctcctaagctgctgatctacgccgccagcaatcaaggctctggcatccccagcagattttccggctctggaagcggcaccgacttcaccctgaccataagcagcctggaacctgaggacttcgccatgtacttttgccagcagagcaacgaggtgcccagaacctttggcggaggcaccaagctggaaatcaaa

SEQ ID NO: 52 - DNA, 327 bp, Artificial Sequence
  Synthetic Polynucleotides
gacatcctgctgacacagtctcccgccacactgtcactgtctccaggcgaaagagccacactgagctgcaaggccagtcagaacgtgggcacaaacgtggcctggtatcagcagaagcctggacagcctcctaagctgctgatctacagcgccacctaccggaactctggcatccctgccagattttctggcagcggctctggcaccgagttcaccctgaccatcaccaacgtgcagagcaaggacctggccgactacttctacttctgccagtacaacagatacccctacaccagcggcggaggcaccaagctggaaatcaaaaga

SEQ ID NO: 53 - DNA, 312 bp, Artificial Sequence
  Synthetic Polynucleotides
cagatcgtgctgacacagtctccagccacactgagcgcttctccaggcgagaaggccaccatgacatgttctgccagcagcggcgtgaactacatgcactggtatcagcagaagcccggcacaagccccaagcggtggatctacgataccgacaagacagccagcggagtgcccgccagattttctggctctggcagcggcacatcctacagcctgacaatcagcagcatggaagccgaggatgccgccacctactactgtcaccagagaggcagctacaccttcggcggaggcaccaagctggaaatcaaa

SEQ ID NO: 54 - DNA, 324 bp, Artificial Sequence
  Synthetic Polynucleotides
gacatccagatgacacagagccctagcagcctgtctgccagcgtgggagacagagtgaccatcacatgcaaggccagcgaccacatcaacaactggctggcctggtatcagcagaagcctggacaggcccctaagctgctgatctacggcgctaccacactggaaacaggcgtgcccagcagattttctggcagcggctctggcaccgactacaccctgacaatatccagcctccagcctgaggacttcgccacctactactgtcagcagagctggaacaccccttggacattcggccagggcaccaagctggaaatcaagaga

SEQ ID NO: 55 - DNA, 336 bp, Artificial Sequence
  Synthetic Polynucleotides
gacatccagctgacccagagccccagcagcctgagcgccagcgtgggcgacagagtgaccatcacctgcaaggccagccagagcgtggactacgacggcgacagctacctgaactggtaccagcagatccccggcaaggcccccaagctgctgatctacgacgccagcaacctggtgagcggcatcccccccagattcagcggcagcggcagcggcaccgactacaccttcaccatcagcagcctgcagcccgaggacatcgccacctaccactgccagcagagcaccgaggacccctggaccttcggcggcggcaccaagctgcagatcaagaga

SEQ ID NO: 56 - DNA, 321 bp, Artificial Sequence
  Synthetic Polynucleotides
gagatcgtgctgacacagagccctgccaccctgtctctgagccctggcgaaagagccaccctgagctgtagagccagccagagcgtgtccagctacctggcctggtatcagcagaagcccggccaggctccccggctgctgatctacgatgccagcaatagagccaccggcatccccgccagattttccggctctggcagcggcaccgacttcaccctgaccatcagctccctggaacccgaggacttcgccgtgtactactgccagcagcggagcaactggcccatcacattcggccagggcacccggctggaaatcaaa

SEQ ID NO: 57 - DNA, 339 bp, Artificial Sequence
  Synthetic Polynucleotides
gacatcgtgatgacccagacccccctgagcctgcctgtgacacctggcgagcctgccagcatctcctgcagaagcagcaagagcctgctgcacagcaacggcatcacctacctgtactggtatctgcagaaacccggccagagcccccaactgctgatctaccagatgagcaacctggtgtccggcgtgcccgacagattttctggcagcggctccggcaccgacttcaccctgaagatcagccgggtggaagccgaggacgtgggcgtgtactactgcgcccagaacctggaactgccctacacctttggcggcggaacaaaggtggaaatcaagcgg

SEQ ID NO: 58 - DNA, 321 bp, Artificial Sequence
  Synthetic Polynucleotides
gacatcgtgctgacacagagccctgccatcatcacagcctctccaggcgagaaagtgaccatgacctgtagagccagcagcagcgtgaactacatggactggtatcagaagaagcccggcagcagccccaagccttggatctacgccacaagcaatctggcctctggcgtgcccagcagattttctggctctggcagcggcaccacctacagcatgacaatctctagcctggaagccgaggacgccgccacctactattgtcagcagtggtccttcaatcctcctaccttcggcggaggcaccaagctggaaatcaaaaga

SEQ ID NO: 59 - DNA, 321 bp, Artificial Sequence
  Synthetic Polynucleotides
gagatcgtgctgacacagtctcccgccacactgtcactgtctccaggcgaaagagccacactgagctgtagagccagccagagcgtgtcctcttacctggcctggtatcagcagaagcctggacaggctccccggctgctgatctacgatgccagcaatagagccacaggcatccccgccagattttctggctctggcagcggcaccgatttcaccctgaccataagcagcctggaacctgaggacttcgccgtgtactactgccagcagagaagcgactggcccctgacatttggcggcggaacaaaggtggaaatcaaa

SEQ ID NO: 60 - DNA, 321 bp, Artificial Sequence
  Synthetic Polynucleotides
gagatcgtgctgacacagtctcccgccacactgtcactgtctccaggcgaaagagccacactgagctgtagagccagccagagcgtgtcctcttacctggcctggtatcagcagaagcctggacaggctccccggctgctgatctacgatgccagcaatagagccacaggcatccccgccagattttctggctctggcagcggcaccgatttcaccctgaccataagcagcctggaacctgaggacttcgccgtgtactactgccagcagagaagcaactggcccctgacatttggcggaggcaccaaggtggaaatcaaa

SEQ ID NO: 61 - DNA, 321 bp, Artificial Sequence
  Synthetic Polynucleotides
gacatccagatgacacagagccctagcagcctgtctgccagcgtgggagacagagtgaccatcacctgtagagccagcagcagcgtgtcctacatgcactggtatcagcagaagcccggcaaggcccctaagcctctgatctacgcccctagcaatctggcctctggcgtgccaagcagattttctggcagcggctctggcaccgacttcaccctgacaatatccagcctccagcctgaggacttcgccacctactactgccagcagtggtccttcaatcctcctaccttcggccagggcaccaaggtggaaatcaaaaga

SEQ ID NO: 62 - DNA, 318 bp, Artificial Sequence
  Synthetic Polynucleotides
gacatccagctcacacagagcccttctagcctgtctgccagcgtgggcgatagagtgaccatgacctgtagagccagcagcagcgtgtcctacatccactggttccagcagaagcctggcaaggcccctaagccttggatctacgccaccagcaatctggcctctggcgtgccagtcagattttctggcagcggctctggcaccgactacaccttcacaatatccagcctccagcctgaggacattgccacctactactgccagcagtggacctccaatcctcctacctttggcggaggcaccaagctggaaatcaaa

SEQ ID NO: 63 - DNA, 333 bp, Artificial Sequence
  Synthetic Polynucleotides
agcaccgtgatgacacagagccctgatagcctggccgtgtctctgggagagagagccaccatcaactgcaagagcagccagagcaacagcaacgacgtggcctggtatcagcagaagccaggacagagccccaaggtgctgatctacttcgccagcaacagatacagcggcgtgcccgatagattttccggcagcggctacggcaccgacttcacccttacaatcagcagcctccaggccgaggatgtggccgtgtacttctgtcagcaagactacagcagccctctgacctttggagccggcaccaagctggaactgaaaagagctgacgct

SEQ ID NO: 64 - DNA, 333 bp, Artificial Sequence
  Synthetic Polynucleotides
cagatcgtgctgtctcagtctcctgccatcctgagcgcttccccaggcgagaaagtgaccatgacctgtagagccagcagcagcgtgtcctacatgcactggtatcagcagaagcccggcagcagccctaagccttggatctacgccaccagcaatctggcctctggcgtgccagccagattttctggctctggcagcggcaccagctacagcttcacaatcagcagagtggaagccgaggacgccgccacctactattgtcagcagtggaccttcaatcctcctaccttcggcggaggcacccggctggaaatcaaaagaacagtggctgct

SEQ ID NO: 65 - DNA, 321 bp, Artificial Sequence; identical to SEQ ID NO: 61
  Synthetic Polynucleotides

SEQ ID NO: 66 - DNA, 318 bp, Artificial Sequence
  Synthetic Polynucleotides
gagatcgtgctgacacagagcccttctagcctgtctgccagcgtgggcgacagagtgaccatcacatgtagagccagcagcagcctgagcttcatgcactggtatcagcagaagcccggcaaggcccctaagccttggatctacgccaccagcaatctggcctctggcgtgccaagcagattttctggcagcggctctggcaccgactacaccctgacaatatccagcctccagcctgaggacttcgccacctacttttgccaccagtggtccagcaatcctctgacctttggcggaggcaccaaggtggaaatcaaa

SEQ ID NO: 67 - DNA, 321 bp, Artificial Sequence; identical to SEQ ID NO: 56
  Synthetic Polynucleotides

SEQ ID NO: 68 - DNA, 321 bp, Artificial Sequence
  Synthetic Polynucleotides
gagatcgtgctgacacagagccctggcacactgtcactgtctccaggcgaaagagccacactgagctgtagagccagcagcagcgtgccctacatccactggtatcagcagaagcctggacaggcccctcggctgctgatctatgccacatctgctctggcctctggcatccccgatagattttctggcagcggctccggcaccgacttcaccctgacaatcagcagactggaacccgaggacttcgccgtgtactactgtcagcagtggctgagcaaccctcctacattcggccagggcaccaagctggaactgaaaaga

SEQ ID NO: 69 - DNA, 339 bp, Artificial Sequence
  Synthetic Polynucleotides
gacatccagatgacccagagccccagcagcctgtctgccagcgtgggcgacagagtgaccatcacctgtcggagcagccagagcatcgtgcactccgtgggcaacaccttcctggaatggtatcagcagaagcccggcaaggcccccaagctgctgatctacaaggtgtccaacagattcagcggcgtgcccagcaggtttagcggctctggcagcggcaccgacttcaccctgaccatctctagcctccagcccgaggacttcgccacctactactgttttcaaggcagccagttcccctacaccttcggccagggaacaaaggtggaaatcaagcgg

SEQ ID NO: 70 - DNA, 324 bp, Artificial Sequence
  Synthetic Polynucleotides
gacatcgtgatgacccagagccccagcagcctgtctgccagcgtgggcgacagagtgaccatcacatgcaaggccagccagagcgtgaccaacgacgtggcctggtatcagcagaagcccggcaaggcccccaagctgctgatctactacgccagcaacagatacaccggcgtgcccagcagattcagcggctctggcagcggcaccgacttcaccctgaccatctctagcctccagcccgaggacttcgccacctactactgtcagcaggactacagaagcccctggaccttcggcggaggcaccaaggtggaaatcaagcgg

SEQ ID NO: 71 - DNA, 321 bp, Artificial Sequence
  Synthetic Polynucleotides
gacatccagatgacccagagccccagcagcctgtctgccagcgtgggcgacagagtgaccatcacctgtagagccagccagaccatctggtcctacctgaactggtatcagcagaggcccggcaaggcccccaacctgctgatctatgccgccagctctctccagagcggcgtgcccagcagattttccggcagaggcagcggcaccgacttcaccctgaccatcagttccttgcaggccgaggacttcgccacctactactgccagcagagctacagcatcccccagattttcggccagggcaccaagctggaaatcaag

SEQ ID NO: 72 - DNA, 330 bp, Artificial Sequence
  Synthetic Polynucleotides
gagatcgtgctgacacagagccctggcaccctgagcctgtctccaggcgaaagagccacactgagctgtcgggcctctcagagcgtgggaggctacctggcttggtatcagcagaagccaggccaggcccccagactgctgatctacgacgccagcaatcgggccacaggcatccccgccagattttctggcagcggctccggcaccgacttcaccctgacaatcagcagcctggaacccgaggacttcgccgtgtactactgccagcagcggaacaactggccccccatgtacacattcggccagggcaccaagctggaaatcaagaga

SEQ ID NO: 73 - DNA, 336 bp, Artificial Sequence
  Synthetic Polynucleotides
gacatccagatgacccagagccccgccaccatcgagaacacaagcctgtctgccagcgtgggcgacagagtgaccatcacctgtagagccagccagggcatcagctcttggctgacctggtatcagcagaagcccgagaaggcccccaagagcctgatctacgccgccagctctctgcagtctggcgtgcccagcagattttccggcagcggctctggcaccgacttcaccctgacaatcagcagcctgcagcccgaggacttcgccacctactactgccagcagtacgacagctaccccatcaccttcggccagggcacccggctggaaatcaag

SEQ ID NO: 74 - DNA, 336 bp, Artificial Sequence
  Synthetic Polynucleotides
gacgagatcgtgctgacccagagccctgatagcctggccgtgtctctgggcgagagagccaccatcaactgcaaggccagccagagcgtggacttcgacggcgacagctacctgaactggtatcagcagaagcccggccagccccccaaggtgctgatctatgccgccagcacactgcagagcggcgtgcccagcagattttctggcagcggctccggcaccgacttcaccctgaccatcaacagcctggaagccgaggacgccgccacctactactgccagcagagcaacgaggacccctggacctttggcggcggaacaaaggtggaaatcaag

SEQ ID NO: 75 - DNA, 321 bp, Artificial Sequence
  Synthetic Polynucleotides
gacatccagatgacccagagccccagcagcctgtctgccagcgtgggcgacagagtgaccatcacctgtagagccagccagggcatcagctcttggctggcctggtatcagcagaagcccgagaaggcccccaagagcctgatctacgccgcctctagtctccagagcggcgtgcccagcagattttctggcagcggctccggcaccgacttcaccctgacaatcagctccctccagcccgaggacttcgccacctactactgccagcagtacaacagctaccctcccacctttggcggaggcaccaaggtggaaatcaag

SEQ ID NO: 76 - DNA, 336 bp, Artificial Sequence
  Synthetic Polynucleotides
gacgtcgtgatgacccagagccctctgagcctgcctgtgacactgggacagcctgccagcatctcctgtcggagcagccagagcatcgtgcacagcgacggcaacacctacctggaatggtatcagcagcggccaggccagagccccagacggctgatctacaaggtgtccaacagattcagcggcgtgcccgacagattctccggcagcggctctggcaccgacttcaccctgaagatcagcagagtggaagccgaggacgtgggcgtgtactactgttttcaaggcagccacgccccctggacctttggcggaggaacaaaggtggaaatcaag

SEQ ID NO: 77 - DNA, 318 bp, Artificial Sequence
  Synthetic Polynucleotides
cagatcgtgctgacacagagccctgccctgatgagcgccagccctggcgagaaagtgaccatgacctgtagcgccagcagcagcgtgcgctacatgtactggtatcagcagaagcccagaagcagccccaagccctggattcacctgaccagcaatctggcctctggcgtgcccgctagattttccggctctggcagcggcaccagctacagcctgaccatcagcagcatggaagccgaggacgccgccacctactactgccagcagtggtccagccaccccttcacatttggctccggcaccaagctggaaatcaag

SEQ ID NO: 78 - DNA, 339 bp, Artificial Sequence
  Synthetic Polynucleotides
gagatcgtgctgacacagagccctggaagcctggccgtgtctcctggcgagcgcgtgacaatgagctgcaagagcagccagagcgtgttcttcagcagctcccagaagaactacctggcctggtatcagcagatccccggccagagccccagactgctgatctactgggccagcaccagagaaagcggcgtgcccgatagattcaccggcagcggctctggcaccgacttcaccctgacaatcagcagcgtgcagcccgaggacctggctatctactactgccaccagtacctgagcagccggaccttcggccagggcaccaagctggaaatcaagaga

SEQ ID NO: 79 - DNA, 342 bp, Artificial Sequence
  Synthetic Polynucleotides
gacgacatcgtgatgacacagtcaccagatagcctcaccgtctccctgggggagcggaccaccattaattgtaaatccagccaaagcgtgctggactcaagcaagaacaagaatagcctcgcctggtatcagcagaagcccggtcagcctccaaagctgctgctttcttgggcctccaccagagagtccgggattcctgataggtttagtggttcaggctccggcacagattttactctgaccattgattctctccagccagaggattctgcaacttattactgccagcaaagcgcccactttcctataacttttggccagggaacccgacttgaaatcaag

SEQ ID NO: 80 - DNA, 333 bp, Artificial Sequence
  Synthetic Polynucleotides
gacatccagctgacacagagcccttctagcctgtctgccagcgtgggcgacagagtgaccatcacatgtagagccagccagggcatcagctctgtgctggcttggtatcagcagaagcctggcaaggcccctaagctgctgatctacgatgccagcagcctggaaagcggcgtgccaagcagattttctggcagcggctctggcaccgacttcaccctgacaatatccagcctccagcctgaggacttcgccacctactactgccagcagttcaacagcagcatcaccttcggccagggcaccaagctggaaatcaagagaacagtggcagcc

SEQ ID NO: 81 - DNA, 321 bp, Artificial Sequence
  Synthetic Polynucleotides
gacatcgtgatgacacagagccctagcagcctgtctgcctctctcggcggcaaagtgaccatcacatgcaaggccagccaggacatcaacaagtatatcgcctggtatcagcacaagcccggcaagggacctagactgctgatccactacaccagcacactccagcctggcatccccagcagattttctggcagcggctccggcagagactacagcttcagcatcagcaacctggaacctgaggacattgccacctactactgcctccagtacgacaacctgctgacctttggagccggcaccaagctggaactgaaaaga

SEQ ID NO: 82 - DNA, 321 bp, Artificial Sequence
  Synthetic Polynucleotides
gacatccagatgacacagagccctagcagcctgtctgccagcgtgggagatagagtgaccatcaactgcaaggccagccaggacatcaacagctacctgagctggttccagcagaagcctggcaaggcccctaagacactgatctaccgggccaacagactggtggatggcgtgccaagcagattttctggcagcggcagcggccaggattacaccctgacaatatccagcctccagcctgaggacttcgccacctactactgcctccagtacgacgagttccctctgacctttggcggaggcaccaaggtggaaatcaaa

SEQ ID NO: 83 - DNA, 336 bp, Artificial Sequence
  Synthetic Polynucleotides
gagatcgtgctgacacagagccctctgagcctgcctgttacacctggcgagcctgccagcatctcctgtagaagctctcagagcctgctgcacagcaacggctacaactacctggactggtatctccagaagcctggacagagcccacagctcctgatctacctgggcgtgaactctgtgtccggcgtgcccgatagattttctggcagcggctctggcaccgacttcaccctgaagatcagcagagtggaagccgaggacgtgggcgtgtactactgtatgcaggccctccagacaccttggacattcggccagggcaccaaggtggaaatcaaa

SEQ ID NO: 84 - DNA, 333 bp, Artificial Sequence
  Synthetic Polynucleotides
gacatccagatgacacagtctccagccagcctgaccgtgtcactgggacagagagccaccatctcttgcagagccagcgagagcgtggacagctacggcaatagctacctgcactggtatcagcagaagcccggccagcctcctcagctcctgatctacctggcctccaatctggaaagcggcgtgccagccagattttctggcagcggcagcagaaccgacttcaccctgaccattgatcccgtggaagccgatgatgccgccacctactactgccagcagaacaacgaggacccctggacatttggcggaggcaccaaggtggaaatcaaa

SEQ ID NO: 85 - DNA, 321 bp, Artificial Sequence
  Synthetic Polynucleotides
gacatccagatgacacagagccctagcagcctgtctgccagcgtgggagacagagtgaccatcacctgtagagccagccagggcatcagaaacgacctcggctggtatcagcagaagcctggcaaggcccctaagcggctgatctatgccgcttcctctctgcaatctggcgtgcccagcagattttctggcagcggctctggcaccgagttcaccctgacaatatccagcctccagcctgaggacttcgccacctactactgcctccagcacaacagctacccctggacctttggacagggcaccaagctggaaatcaaa

SEQ ID NO: 86 - DNA, 342 bp, Artificial Sequence
  Synthetic Polynucleotides
gatgtgctgctgacccagagccctctgagcctgcctgtgacactgggacagcctgccagcatctcctgtcggagcagccagaccatcgtgcacagcaacggcaacacctacctggaatggttccagcagcggccaggccagagccccagactgctgatctaccaggtgtccaacagattcagcggcgtgcccgacagattctccggcagcggctctggcaccgacttcaccctgaagatcagccgggtggaagccgaggacgtgggcgtgtactactgttttcaaggcagccacgtgccccggacctttggcggaggaacaaaggtggaaatcaagagagcc

SEQ ID NO: 87 - DNA, 339 bp, Artificial Sequence
  Synthetic Polynucleotides
gatgtgctgctgacccagagccctctgagcctgcctgtgacactgggacagcctgccagcatctcctgtcggagcagccagaccatcgtgcacagcaacggcaacacctacctggaatggttccagcagcggccaggccagagccccagactgctgatctaccaggtgtccaacagattcagcggcgtgcccgacagattctccggcagcggctctggcaccgacttcaccctgaagatcagccgggtggaagccgaggacgtgggcgtgtactactgttttcaaggcagccacgtgccccggacctttggcggaggaacaaaggtggaaatcaagaga

SEQ ID NO: 88 - DNA, 318 bp, Artificial Sequence
  Synthetic Polynucleotides
gagatcgtgctgacacagagccctgccacactctctctgagccctggcgaaagagccaccctgagctgtagcgccagcagcagcatcaactacatctactggctccagcagaagcccggccaggcccccagaatcctgatctacctgaccagcaacctggcctccggcgtgccagccagattttctggcagcggctccggcaccgacttcaccctgacaatcagcagcctggaacccgaggacttcgccgtgtactactgcctccagtggtccagcaaccccctgacctttggcggaggcaccaaggtggaaatcaag

SEQ ID NO: 89 - DNA, 324 bp, Artificial Sequence
  Synthetic Polynucleotides
cacatcgtgctgacccagagccctagcagcctgtctgccagcctgggcgacagagtgaccatcagctgtagagccagccaggacatcagcacctacctgaactggtatcagcagaaacccgacggcaccgtgaagctgctgatcttctacaccagcagactgcacgccggggtgcccagcagattttctggcagcggctctggcacccaccacagcctgaccatctccaacctggaacaggaagatattgctacctacttctgtcagcaaggcaacagcctgcccttcaccttcggcagcggcaccaagctggaaatcaagaga

SEQ ID NO: 90 - DNA, 327 bp, Artificial Sequence
  Synthetic Polynucleotides
gaccacatcgtgctgacccagagccctagcagcctgtctgccagcctgggcgacagagtgaccatcagctgtagagccagccaggacatcagcacctacctgaactggtatcagcagaaacccgacggcaccgtgaagctgctgatcttctacaccagcagactgcacgccggggtgcccagcagattttctggcagcggctctggcacccaccacagcctgaccatctccaacctggaacaggaagatattgctacctacttctgtcagcaaggcaacagcctgcccttcaccttcggcagcggcaccaagctggaaatcaagaga

SEQ ID NO: 91 - DNA, 336 bp, Artificial Sequence
  Synthetic Polynucleotides
gacatcgtgatgacccagagccccgatagcctggccgtgtctctgggagagagagccaccatcaactgccgggccagcaagagcgtgtccaccagcggctacagcttcatgcactggtatcagcagaagcccggccagccccccaagctgctgatctacctggcctccaacctggaaagcggcgtgcccgatagattcagcggcagcggctctggcaccgacttcaccctgaccatcagttctcttcaggccgaggacgtggccgtgtactactgccagcacagcagagaggtgccctggacattcggccagggcacaaaggtggaaatcaagcgg

SEQ ID NO: 92 - DNA, 339 bp, Artificial Sequence
  Synthetic Polynucleotides
gacatcgtgatgacccagacccccctgaccctgagcgtgacaatcggacagcctgccagcatctcctgcaagagcagccagagcctgctggacagcgacggcaagacctacctgaactggctgctgcagaggccaggccagagccccgagagactgatctacctggtgtccaagctggactccggcgtgcccgatagattcacaggcagcggctccggcaccgacttcaccctgaagatcagccgggtggaagccgaggacctgggcgtgtactgttgttggcagggcacccacttcccttacaccttcggcggagggaccaaggtggaaatcaagggc

SEQ ID NO: 93 - DNA, 339 bp, Artificial Sequence
  Synthetic Polynucleotides
gacgacatccagttgacccagtcccccagctcactcagcgccagtgtgggggaccgggtgaccattacctgtaaagccagtcagagtgtggactatgagggggatagcttcctgaattggtatcagcagaagcctggcaaagccccaaagctgctgatctacgctgcatctaatctggagtcaggcgtgccttctaggttctccggtagtgggtctgggaccgatttcacattgaccatttcatccctccaacccgaggatttcgctacatattactgtcagcagtccaatgaggaccctctcacctttggccagggcaccaaagttgaaattaagaga

SEQ ID NO: 94 - DNA, 336 bp, Artificial Sequence
  Synthetic Polynucleotides
gacatcgtgatgacccagacacctctgagcctgagcgtgacacctggacagcctgccagcattagctgcaagagcagccagtctctgctggacggcgacggcaagacctacctgaattggctgctccagaagcctggacagagccctcagcggctgatctacctggtgtccaagctggatagcggcgtgcccgatagattttctggcagcggctctggcaccgacttcaccctgaagatcagcagagtggaagccgaggacgtgggcgtgtactactgttggcagggcacacacttccccagaacattcggccagggcacaaagctggaaatcaaa

SEQ ID NO: 95 - DNA, 342 bp, Artificial Sequence
  Synthetic Polynucleotides
gacatcgtgatgagccagagccctagcagcctggccgtgtccgtgggcgagaaagtgaccatgagctgcaagagcagccagtccctgctgcacagcagcaaccagaagaactacctggcctggtatcagcagaagcccggccagtcccccaaggtgctgatctactgggccagcaccagagaaagcggcgtgcccgatagattcaccggcagcggctctggcaccgacttcaccctgaccatcaccagcgtgaagtccgaggacctggctgtgtactactgccagcagtattacagctacccctggaccttcggcggaggcacccggctggaaatcaaaaga

SEQ ID NO: 96 - DNA, 327 bp, Artificial Sequence
  Synthetic Polynucleotides
gagatcgtgctgacacagagccctggcaccctgagcctgtctccaggcgaaagagccacactgagctgtcgggccagccagagcgtgtccagctcttacctggcctggtatcagcagaagcccggccaggctccccggctgctgatctacggaacaagcagcagagccaccggcatccccgacagattttctggcagcggctccggcaccgacttcaccctgacaatcagcagactggaacccgaggacttcgccgtgtactactgccagcagtacggcagcagccccttcacctttggcggaggcaccaaggtggaaatcaagaga

SEQ ID NO: 97 - DNA, 324 bp, Artificial Sequence
  Synthetic Polynucleotides
gacatccagatgacccagagccccagcagcctgtctgccagcgtgggcgacagagtgaccatcacctgtagagccagccagagcatcagcctgtggctgaactggtatcagcagaagcccggcaaggcccccaagctgctgatctacgccgccagcacactccagagcggcgtgccaagcagattttccggcagcggctccggcaccgacttcaccctgacaatcagctccctccagcccgaggacttcgccacctactactgccagcagtactacaccagcccctacaccttcggccagggcaccaaggtggaaatcaagaga

SEQ ID NO: 98 - DNA, 327 bp, Artificial Sequence
  Synthetic Polynucleotides
gacatccagatgacccagagccccagcagcctgtctgccagcgtgggcgacagagtgaccatcacctgtagagccagccagagcatcagcagctacctgaactggtatcagcagaagcccggcaaggcccccaaactgctgatctacgccgtgtccacactccagagcggcgtgcccagcagattttctggcagcggctccggcaccgacttcaccctgacaatcagctccctccagcccgaggacttcgccacctactactgtcagcagagcggcaccttccctcccaccacatttggacagggcaccaaggtggaaatcaagaga

SEQ ID NO: 99 - DNA, 318 bp, Artificial Sequence
  Synthetic Polynucleotides
cagagcccatctagcctggctgtgtctgccggcgagaaagtgaccatgagctgcaagagcagccagagcctgctgaacagccggacccggaagaactacctggcctggtatcagcagaagcccggccagagccccaagctgctgatctactgggccagcaccagagaaagcggcgtgcccgatagattcaccggctctggcagcggcaccgacttcaccctgacaatcagcagcgtgcaggccgaggacctggccgtgtactactgcaagcagagcaacctgtacaccttcggcggaggcaccaagctggaaatcaag

SEQ ID NO: 100 - DNA, 312 bp, Artificial Sequence
  Synthetic Polynucleotides
atgacccagagccccaagttcctgctggtgtctgccggcgacagagtgaccctgacatgcaaggccagccagagcgtgaacaacgacgtgtactggtatcagcaggaacccggccagtcccccaagctgctgatctactgggccagcaccagagaaagcggcgtgcccgatagattcaccggcagcggctctggcaccgacttcaccctgacaatcagcagcgtgcaggccgaggacctggccgtgtactactgcaagcagagctacaacctgtacaccttcggcggaggcaccaagctggaaatcaagaga

SEQ ID NO: 101 - DNA, 321 bp, Artificial Sequence
  Synthetic Polynucleotides
gacatccagatgacccagagccccagcagcctgtctgcctctctgggcgagagagtgtccctgacctgtcgggccacacaggaactgagcggctacctgtcttggctgcagcagaagcccgacggcaccatcaagcggctgatctacgccgccagcaccctggatagcggcgtgcccaagagattcagcggcaacagaagcggcagcgactacagcctgaccatcagctccctggaaagcgaggacttcgccgactactactgcctgcagtacgccatctacccctacaccttcggcggaggcaccaagctggaaatcaag

SEQ ID NO: 102 - DNA, 336 bp, Artificial Sequence
  Synthetic Polynucleotides
gacaccatcgtgctgacacagagccctgcttccctggccgtgtccctgggacagagagccaccatctcttgcagagccagcgagagcgtggacagctacggcaacagcttcatgcactggtatcagcagaagcccggccagccccccaagctgctgatctacctggcctccaacctggaaagcggcgtgcccgccagattttctggcagcggcagcagaaccgacttcaccctgaccatcgaccccgtggaagccgatgatgccgccacctactactgccagcagaacaactacgacccctggaccttcggcggaggcaccaagctggaaatcaag

SEQ ID NO: 103 - DNA, 318 bp, Artificial Sequence
  Synthetic Polynucleotides
gacatccagatgacacagagccctagcagcctgtctgccagcgtgggagacagagtgaccatcacatgcaaggccagccaggatgtgtctacagccgtggcctggttccagcagaagcctggaaaagcccctaagctgctgatctacagccccagctacagatacaccggcgtgcccagcagattttctggcagcggctctggcaccgacttcaccctgacaatatccagcctccagcctgaggacttcacctactactgccagcagctctacagcaccccttacacattcggccagggcaccaaggtggaaatcaaa

SEQ ID NO: 104 - DNA, 333 bp, Artificial Sequence
  Synthetic Polynucleotides
gacatccagatgacacagagccctagcagcctgtctgccagcgtgggagacagagtgaccatcacctgtagagccagccagagcgtgtccaccagcagctacaactacatgcactggtatcagcagaagcccggcaagcctcctaagctgctgattaagtacgccagcaacctggaaagcggcgtgcccagcagattttctggcagcggctctggcaccgacttcaccctgacaatatccagcctccagcctgaggacttcgccacctactactgtcagcactcctgggagatccctctgacattcggccagggcaccaaggtggaaatcaaa

SEQ ID NO: 105 - DNA, 324 bp, Artificial Sequence
  Synthetic Polynucleotides
gagatcgtgctgacacagtctccagccacactgagcgcttctccaggcgagagagtgaccctgacctgtagagccagcagcaacgtgatctccagctacgtgcactggtatcagcagaagcctggcagcagccccagactgtttctgtacagcaccagcaatctggcctccggcgtgccaagcagattttctggctctggcagcggcaccgacttcacctttaccatctctagcctggaagccgaggacgccgccacctactactgtcagcagtacagcggctaccctctgaccttcggccagggcacaagactggaaatcaaa

SEQ ID NO: 106 - DNA, 324 bp, Artificial Sequence
  Synthetic Polynucleotides
gagatcgtgctgacacagtctcccgccacactgtcactgtctccaggcgaaagagccacactgagctgtagagccagcagcaacgtgatctccagctacgtgcactggtatcagcagaagcctggacaggcccctcggctgctgatctacagcacaagcaatctggcctctggcatccccgccagattttctggctctggaagcggcaccgacttcaccctgaccataagcagcctggaacctgaggacttcgccgtgtactactgccagcagtatagcggctaccctctgaccttcggccagggcacaagactggaaatcaaa

SEQ ID NO: 107 - DNA, 360 bp, Artificial Sequence
  Synthetic Polynucleotides
ctgaacttcatgctgacccagccccacagcgtgtccggcagccctggaaagaccgtgaccatctcctgcaccagaagcaccggcagcatcaccagcaactacgtgcactggtatcagcagaggcccggcagcagccctaccaccgtgatctgcgaggacaacgagaggccaagcggcgtgcccgatagattcagcggctccatcgacatcagcagcaacagcgccagcctgaccatcagcggcctgaaaaccgaggacgaggccgactactactgccagagctacgacgacagcaaccacatctccgtgttcggcaccgggaccaaagtgaccgtgctgggacagcccaaggccaatcct

SEQ ID NO: 108 - DNA, 321 bp, Artificial Sequence
  Synthetic Polynucleotides
gacatccagatgacccagagccccagcagcctgagcgccagcgtgggcgacagagtgaccatcacctgcaaggccagccaggacgtgggcatcgccgtggcctggtaccagcagaagcccggcaaggtgcccaagctgctgatctactgggccagcaccagacacaccggcgtgcccgacagattcagcggcagcggcagcggcaccgacttcaccctgaccatcagcagcctgcagcccgaggacgtggccacctactactgccagcagtacagcagctacccctacaccttcggccagggcaccaaggtggagatcaag

SEQ ID NO: 109 - DNA, 324 bp, Artificial Sequence
  Synthetic Polynucleotides
gacatccagatgacccagagccccagcagcctgtctgccagcgtgggcgacagagtgaccatcacatgcaaggccagccaggacgtgggaatcgccgtggcctggtatcagcagaaacccggcaaggtgcccaagctgctgatctactgggccagcaccagacacaccggcgtgcccgatagattttccggcagcggctccggcaccgacttcaccctgacaatcagctccctccagcccgaggacgtggcaacctactactgccagcagtacagcagctacccctacaccttcggccagggcaccaaggtggaaatcaagaga

SEQ ID NO: 110 - DNA, 321 bp, Artificial Sequence
  Synthetic Polynucleotides
gacatccagatgacccagagccccagcagcctgtctgccagcgtgggcgacagagtgaccatcacatgcaaggccagccaggacgtgggaatcgccgtggcctggtatcagcagaaacccggcaaggtgcccaagctgctgatctactgggccagcaccagacacaccggcgtgcccgatagattttccggcagcggctccggcaccgacttcaccctgacaatcagctccctccagcccgaggacgtggcaacctactactgccagcagtacagcagctacccctacaccttcggccagggcaccaaggtggaaatcaag

SEQ ID NO: 111 - DNA, 321 bp, Artificial Sequence
  Synthetic Polynucleotides
gacatcgtgatgacccagagccagaagagcatgagcaccagcgtgggcgacagagtgagcatcacctgcaaggccagccaggacgtgatcaccggcgtggcctggtaccagcagaagcccggccagagccccaagctgctgatctacagcgccagctacagatacaccggcgtgcccgacagattcaccggcagcggcagcggcaccgacttcaccttcaccatcagcaacgtgcaggccgaggacctggccgtgtactactgccagcagcactacagcacccccctgaccttcggcgccggcaccaagctggagctgaag

SEQ ID NO: 112 - DNA, 327 bp, Artificial Sequence
  Synthetic Polynucleotides
gacatccagatgacacagagccctagcagcctgtctgccagcgtgggagacagagtgaccatcacatgcaaggccagccaggatgtgtctacagccgtggcctggtatcagcagaagcctggaaaggcccctaagctgctgatctacagcgccagctacagatacaccggcgtgcccgatagattcacaggctctggcagcggcaccgacttcaccctgacaatatctagcctccagcctgaggacttcgccacctactactgccagcagcactacagcacccctccatacacatttggcggaggcaccaaggtggaaatcaagaga

SEQ ID NO: 113 - DNA, 339 bp, Artificial Sequence
  Synthetic Polynucleotides
gacgtggtcatgacacagacacctctgagcctgagcgtgacacctggacagcctgccagcatcagctgtagaagcagccagagcctggtgcacaacaacggcaacacctacctgcactggtatctccagaagcctggacagagccctcagctgctgatctacaaggtgtccaacagattcagcggcgtgcccgacagattttctggcagcggctctggcaccgacttcaccctgaagattagcagagtggaagccgaggacgtgggcgtgtacttctgtagccagagcacacacgtgccaccttacacctttggcggaggcaccaaggtggaaatcaaa

SEQ ID NO: 114 - DNA, 339 bp, Artificial Sequence
  Synthetic Polynucleotides
gacgtggtcatgacacagacacctctgagcctgagcgtgacacctggacagcctgccagcatctcctgtagaagcagccagagcctggtgcacagcaacggcctgacatacctgcactggtatctccagaagcctggacagagccctcagctcctgatctacaaggtgtccaacagattcagcggcgtgcccgacagattttctggcagcggctctggcaccgacttcaccctgaagatcagcagagtggaagccgaggacgtgggcgtgtacttctgtagccagagcacacacgtgccacctttcacctttggcggaggcaccaaggtggaaatcaaa

SEQ ID NO: 115 - DNA, 339 bp, Artificial Sequence
  Synthetic Polynucleotides
gacgtggtcatgacacagagccctctgagcctgcctgtgacacctggcgaacctgccagcatctcctgtagaagcagccagagcctggtgcacagcaacggcaatacctacctgcactggtatctccagaagcctggacagagcccacagctcctgatctacaaggtgtccaaccggttcagcggcgtgcccgatagattttctggcagcggctctggcaccgacttcaccctgaagatcagcagagtggaagccgaggacgtgggcgtgtacttctgtagccagagcacacacgtgccacctttcacctttggcggaggcaccaaggtggaaatcaaa

SEQ ID NO: 116 - DNA, 321 bp, Artificial Sequence
  Synthetic Polynucleotides
gacatccagatgacccagagcagcagctacctgagcgtgtcccttggcggcagagtgaccatcacctgtaaagccagcgaccacatcaacaactggctggcctggtatcagcagaagcctggcaacgcccctagactgctgattagcggagccacctctctggaaacaggcgtgccaagcagattttccggcagcggctctggcaaggactacaccctgagcatcaccagcctccagaccgaggatgtggctacctactactgccagcagtattggagcaccccttggacctttggcggaggcaccaagctggaaatcaaa

SEQ ID NO: 117 - DNA, 324 bp, Artificial Sequence
  Synthetic Polynucleotides
gacatcgtgatgacccagagccacaagttcatgagcaccagcgtgggcgacagagtgtccatcacctgtaaagccagccaggacgtgtcaacagccgtggcctggtatcagcagaagcctggacagagccccaagctgctgatctacagcgccagctacagatacaccggcgtgcccgatagattcacaggctctggcagcggcaccgacttcacctttacaatcagcagcgtgcaggccgaggacctggccgtgtattattgccagcagcactacagcacccctccatacacatttggcggaggcaccaagctggaaatcaaa

SEQ ID NO: 118 - DNA, 339 bp, Artificial Sequence
  Synthetic Polynucleotides
cagagcgtgctgacacagcctccatccgtgtctggcgctccaggccagagagtgaccatctcctgtaccggcagcggcagcaacatcggagccccctacgacgtgtcctggtatcagcaactgcctggcaccgcccccaagctgctgatctaccacaacaacaagcggcccagcggcgtgcccgatagattcagcggctctaagagcggcaccagcgccagcctggctatcactggactccaggccgaggacgaggccgactactactgccagagctacgacagcagcagcatcagcaccatcttcggcggaggcaccaagctgacagtgctgggagct

SEQ ID NO: 119 - DNA, 339 bp, Artificial Sequence
  Synthetic Polynucleotides
cagagcgtgctgacacagcctccatccgtgtctggcgctccaggccagagagtgaccatctcctgtaccggcagcggcagcaacatcggagccccctacgacgtgtcctggtatcagcaactgcctggcaccgcccccaagctgctgatctaccacaacaacaagcggcccagcggcgtgcccgatagattcagcggctctaagagcggcaccagcgccagcctggctatcactggactccaggccgaggacgaggccgactactactgtgccacagtggaagccggcctgagcggctctgtgtttggcggcggaacaaagctgaccgtgctgggagct

SEQ ID NO: 120 - DNA, 321 bp, Artificial Sequence
  Synthetic Polynucleotides
gacatccagatgacccagagccccagcagcctgtctgccagcgtgggcgacagagtgaccatcacctgtagcgccagcagcagcgtgtcctacatgtactggtatcagcagaagcccggcaaggcccccaagctgctgatctacctgaccagcaatctggcctccggcgtgcccagcagattttctggcagcggctccggcaccgacttcaccctgacaatcagctccctccagcccgaggacttcgccacctactactgtcagcagtggcggagcaaccccttcaccttcggccagggcaccaagctggaaatcaagaga

SEQ ID NO: 121 - DNA, 324 bp, Artificial Sequence
  Synthetic Polynucleotides
gagatcgtgatgacccagagccctgccaccctgtccgtgtctccaggcgaaagagccaccctgagctgcaaggcttcccagagcgtgtccaacgacgtcgtgtggtatcagcagaagcccggccaggcccccagactgctgatctactacgccagcaacagatacaccggcatccccgccagattcagcggctctggcagcggcaccgagttcaccctgacaatcagcagcctccagagcgaggacttcgccgtgtactactgtcagcaggactacaccagcccctggaccttcggccagggcaccaagctggaaatcaagaga

SEQ ID NO: 122 - DNA, 333 bp, Artificial Sequence
  Synthetic Polynucleotides
agcaccgacatccagatgacccagagccccagcagcctgtctgccagcgtgggcgacagagtgaccatcacctgtagagccagccagagcatcagcagctacctgaactggtatcagcagaagcccggcaaggcccccaaactgctgatctacctggccagcaacctgcagagcggcgtgcccagcagattttctggcagcggctccggcaccgacttcaccctgacaatcagctccctgcagcccgaggacttcgccacctactactgtcagcaggccgagtacatgcccctgaccttcggccagggaacaaaggtggaaatcaagagagcc

SEQ ID NO: 123 - DNA, 321 bp, Artificial Sequence
  Synthetic Polynucleotides
gacatcctgctgacccagagccccgtgatcctgtccgtgtctcctggcgagagagtgtccttcagctgtcgggccagccagagcatcggcaccaacatccactggtatcagcagcggaccaacggcagccccagactgctgattaagtacgccagcgagtccatcagcggcatccccagcagattttccggcagcggctccggcaccgacttcaccctgagcatcaacagcgtggaaagcgaggacattgccgactactactgccagcagaacaacaactggcccaccaccttcggagccggcaccaagctggaactgaag

SEQ ID NO: 124 - DNA, 333 bp, Artificial Sequence
  Synthetic Polynucleotides
gacatccagatgacccagagccccagcagcctgtctgccagcgtgggcgacagagtgaccatcacctgtcggagcagccagaacatcgtgcacagcaacggcaacacctacctggactggtatcagcagacccccggcaaggcccccaagctgctgatctacaaggtgtccaacagattcagcggcgtgcccagcaggtttagcggctctggcagcggcaccgacttcaccttcaccatcagctccctccagcccgaggacattgccacctactactgcttccagtacagccacgtgccctggaccttcggccagggcacaaagctccagatc

SEQ ID NO: 125 - DNA, 315 bp, Artificial Sequence
  Synthetic Polynucleotides
gacatccagatgacccagagccccagcagcctgtctgccagcgtgggcgacagagtgaccatcacctgtagagccagccagggcatcagaaacaacctggcctggtatcagcagaagcccggcaaggcccccaagcggctgatctacgccgccagcaatctccagagcggcgtgcccagcagattcacaggctctggcagcggcaccgagttcaccctgatcgtgtctagcctccagcccgaggacttcgccacctactactgcctccagcaccacagctaccccctgacatctggcggaggcaccaaggtggaa

SEQ ID NO: 126 - DNA, 336 bp, Artificial Sequence
  Synthetic Polynucleotides
gatgtcgtgatgacccagagccccgacagcctggctgtgtctctgggagagagagccaccatcaactgcaagtccagccagtccctgctggacagcgacggcaagacctacctgaactggctccagcagaagcccggccagccccccaagagactgatctccctggtgtccaagctggactccggcgtgcccgatagattttccggctctggcagcggcaccgacttcaccctgacaatcagctcccttcaggccgaggacgtggccgtgtactattgctggcagggcacacacttccccggcacctttggcggaggcaccaaggtggaaatcaag

SEQ ID NO: 127 - DNA, 321 bp, Artificial Sequence
  Synthetic Polynucleotides
gagctgcagatgacccagagccctagcagcctgtctgccagcgtgggcgacagagtgaccatcacctgtagagccagccagagcatcagcagctacctgaactggtatcagcagaagcccggccagccccccaaactgctgatctactgggccagcaccagagaaagcggcgtgcccgatagattcagcggcagcgagagcggcaccaactacaccctgaccatcagctccctgcagcccgaggacttcgccacctacttttgccagcagagcgacagcctgcccatcacctttggacagggcacccggctggacattcag

SEQ ID NO: 128 - DNA, 339 bp, Artificial Sequence
  Synthetic Polynucleotides
gagcttgtgatgacccagagccccagcagcctgacagtgacagccggcgagaaagtgaccatgagctgcaagagcagccagagcctgctgaacagcggcaaccagaagaactacctgacctggtatcagcagaagcccggccagccccccaagctgctgatctactgggccagcaccagagaaagcggcgtgcccgatagattcaccggctctggcagcggcaccgacttcaccctgacaatcagcagcgtgcaggccgaggacctggccgtgtactactgccagaacgactacagctaccccctgaccttcggagccggcaccaagctggaaatcaag

SEQ ID NO: 129 - DNA, 336 bp, Artificial Sequence
  Synthetic Polynucleotides
gacgtcgtgatgacccagacccctctgagcctgcctgtgtccctgggcgatcaggccagcatctcctgtagaagcagccagagcctggtgcacagcaacggcaacacctacctgcggtggtatctccagaagcccggccagagccccaaggtgctgatctacaaggtgtccaacagattcagcggcgtgcccgacagattctccggcagcggctctggcaccgacttcaccctgaagatcagccgggtggaagccgaggacctgggcgtgtacttctgtagccagagcacccacgtgccctggacctttggcggcggaacaaagctggaaatcaag

SEQ ID NO: 130 - DNA, 336 bp, Artificial Sequence
  Synthetic Polynucleotides
gacgtggtcatgacacagaccccactgagcctgcctgtgtctctgggagatcaggccagcatctcctgtagaagcagccagagcctggtgcacagcaacggcaacacctacctgcggtggtatctccagaagcctggacagagccccaaggtgctgatctacaaggtgtccaacagagtgtccggcgtgcccgatagattttctggcagcggctctggcaccgacttcaccctgaagatcaatagagtggaagccgaggacctgggcgtgtacttctgtagccagagcacccatgtgccttggacctttggcggaggcaccaagctggaaatcaag

SEQ ID NO: 131 - DNA, 330 bp, Artificial Sequence
  Synthetic Polynucleotides
tctgtgctgacccagcctagctccgtgtctgctgctcctggacagaaagtgaccatctcctgtagcggcagcaccagcaacatcggcaacaactacgtgtcctggtatcagcagcaccccggcaaggcccctaagctgatgatctacgacgtgtccaagaggcccagcggcgtgccagatagattttccggcagcaagagcggcaacagcgccagcctggatattagcggactccagtctgaggacgaggccgactactattgcgccgcctgggatgatagcctgagcgagtttctgtttggcaccggcaccaagctgacagtgcttgga

SEQ ID NO: 132 - DNA, 321 bp, Artificial Sequence
  Synthetic Polynucleotides
gacatccaaatgacacagagtccttctagtttgagtgcgagcgtgggggacagggtgaccattacctgcagggccagccagagcataagctcataccttaattggtaccagcaaaaaccaggtaaggcccctaagctcctgatctacgcggcctcttcacttcaatctggggtcccttcccgcttcagtggctccggcagcggcaccgacttcacgctcactatatcaagtctgcagcctgaggatctcgccacctattactgtcaacaaagttattccacccctttcacctttggaccgggcacgaaagtggatattaag

SEQ ID NO: 133 - DNA, 309 bp, Artificial Sequence
  Synthetic Polynucleotides
tacatccacgtgacacagagccctagcagcctgtccgtgtccatcggcgatagagtgaccatcaactgccagacctctcaaggcgtgggcagcgacctgcactggtatcagcacaaacctggcagagcccctaagctgctgatccaccatgccagctctgtggaagatggcgtgcccagcagattttccggcaccggatttcacaccagcttcaacctgacaatcaacgacctccaggccgacgacatcggcacctactactgtcaagtgctccagagcttcggcagaggcagcagactggatacaaaa

SEQ ID NO: 134 - DNA, 336 bp, Artificial Sequence
  Synthetic Polynucleotides
gacatcgtgctgacccagagccctctgagcctggccgtgtctctgggacagcctgccatcatcagctgcaaggccagccagagcgtgtcctttgccggcacctctctgatgcactggtatcaccagaagcccggccagcagcccagactgctgatctacagagccagcaacctggaagccggcgtgcccgatagattttccggcagcggcagcaagaccgacttcaccctgaccatcagccccgtggaagccgaagatgccgccacctactactgccagcagagcagagagtacccctacaccttcggcggaggcaccaagctggaaatcaagagg

SEQ ID NO: 135 - DNA, 327 bp, Artificial Sequence
  Synthetic Polynucleotides
ctggaaaccaccctgacacagagccctgccaccctgagtgtgtccccaggcgagagagtgaccctgagctgtagagccagccagagcgtgggcagcaacctggcctggtatcagcagaagttcggccaggcccccagactgctgatctacgacgccagcacaagagccaccggcatccccgccagattttctggcagcggctccggcaccgagttcaccctgaccatcagcagactggaacccgaggacttcgccgtgtactactgccaccagtacggcagcagccccagaacctttggacagggcaccaaggtggacatcaagcgg

SEQ ID NO: 136 - DNA, 339 bp, Artificial Sequence
  Synthetic Polynucleotides
gacgttgtgatgacccagacccccctgagcctgcctgtgacacctggcgaacctgccagcatcagctgtcggagcagccagagcctggtgcacagaaacggcaacacctacctgcactggtatctccagaagcccggccagagccccaagctgctgatccacaaggtgtccaacagattcagcggcgtgcccgacagattctccggcagcggctctggcaccgacttcaccctgaagatcagccgggtggaagccgaggacctgggcgtgtacttctgtagccagagcacccatgtgccccccctgacatttggagccggcaccaagctggaactgaag

SEQ ID NO: 137 - DNA, 315 bp, Artificial Sequence
  Synthetic Polynucleotides
gagatcgtgatgacccagacccctgccaccctgtctgtgtctgccggcgagagagtgaccattacctgcaaggccagccagagcgtgtccaacgacgtgacctggtatcagcagaagcccggccaggcccccagactgctgatctacagcgccagcaacagatacagcggcgtgcccgccagattttccggcagcggctacggcaccgagttcaccttcaccatcagcagcgtgcagagcgaggacttcgccgtgtacttctgtcagcaagactacagcagcttcggccagggcaccaagctggaaatcaagagg

SEQ ID NO: 138 - DNA, 324 bp, Artificial Sequence
  Synthetic Polynucleotides
gacatccagatgacccagaccgccagcagcctgcctgcctctctgggcgacagagtgaccatctcctgtagcgccagccaggacatcagcaactacctgaactggtatcagcagaaacccgacggcaccgtgaagctgctgatcttctacagcagcaacctgcacagcggcgtgcccagcagattttctggcggcggaagcggcaccgactacagcctgaccatcagcaatctggaacccgaggacattgccacctacttttgccaccagtacagcaagctgccctggacctttggcggaggcaccaagctggaaatcaagaga

SEQ ID NO: 139 - DNA, 333 bp, Artificial Sequence
  Synthetic Polynucleotides
cagttcgtgctgacccagagcccttctgtgtctgccgccctgggagcctctgccaagctgacctgtacactgagcagcgcccacaagacctacaccatcgactggtatcagcagcagcagggcgaggcccccagatacctgatgcaagtgaagtccgacggcagctacaccaagggcaccggcgtgcccgatagattcagcggcagtagcagcggagccgatagatacctgattatcccgagcgtgcaggccgacgacgaggccggatatgtgtgcggcgctgacgacaatggcggctacgtgttcggcggaggcacccaactgacagtgaca

SEQ ID NO: 140 - DNA, 333 bp, Artificial Sequence
  Synthetic Polynucleotides
cagttcgtgctgacccagagcccttctgtgtctgccgccctgggagcctctgccaagctgacctgtacactgagcagcgcccacaagacctacaccatcgactggtatcagcagcagcagggcgaggcccccagatacctgatgcaagtgaagtccgacggcagctacaccaagggcaccggcgtgcccgatagattcagcggcagtagcagcggagccgatagatacctgattatccccagcgtgcaggccgacgacgaggccggatatgtgtgcggcgctgacgacaatggcggctacgtgttcggcggaggcacccaactgacagtgaca

SEQ ID NO: 141 - DNA, 333 bp, Artificial Sequence
  Synthetic Polynucleotides
cagttcgtgctgacccagagcccttctgcctctgctgccctgggagcctctgccaagctgacctgtacactgagcagcgcccacaagacctacaccatcgactggtatcagcagcagaagggaaaggcccccagatacctgatccaagtgaagtccgacggcacctacacaaaggccaccggcgtgcccgatagattcagcggcagtagcagcggagccgatagatacctgattatccccagcgtgcaggccgacgacgaggccgattactactgcggcaccgattacaccggcggctacgtgttcggcggaggcacacaactgaccgtgaca

SEQ ID NO: 142 - DNA, 321 bp, Artificial Sequence
  Synthetic Polynucleotides
gacatccagatgacccagagccccagcagcctgtctgccagcgtgggcgacagagtgaccatcacctgtagagccagccagggcatcagctcttggctggcctggtatcagcagaagcccgagaaggcccccaagagcctgatctacgccgcctctagtctccagagcggcgtgcccagcagattttctggcagcggctccggcaccgacttcaccctgacaatcagctccctccagcccgaggacttcgccacctactactgccagcagtacaacagctacccccccacctttggcggaggcaccaaggtggaaatcaag

SEQ ID NO: 143 - DNA, 321 bp, Artificial Sequence; identical to SEQ ID NO: 75
  Synthetic Polynucleotides

SEQ ID NO: 144 - DNA, 336 bp, Artificial Sequence
  Synthetic Polynucleotides
aacttcatgctgacccagccccacagcgtgtccgagagccctggcaagaccgtgaccatctcctgtaccggcagcggcggcagcatcgacaacaactacgtgcactggtatcagcagaggcccggcagcgcccctaccaccgtgatgttcgaggacaaccagaggcccagcggcgtgcccgatagattcagcggctctatcgacagcagcagcaacagcgccagcctcgtgatctccggcctgaaaaccgaggacgagggcgactactactgccagagcagcgacggctccaaggtggtgtttggcggaggcaccaagctgaccgtgctgggacag

SEQ ID NO: 145 - DNA, 321 bp, Artificial Sequence
  Synthetic Polynucleotides
aacatcgagctgacccagagccccgccatcatgagtgcctctccaggcgagcgcgtgaccatgacatgtagcgccagcagcagcatccggtacatctactggtatcagcagaagcccggcagcagccccagactgctgatctacgacaccagcaacgtggcccctggcgtgccctttagattttccggcagcggctccggcaccagctacagcctgaccatcaaccggatggaagccgaggacgccgccacctactattgtcaggaatggagcggctacccctacaccttcggcggaggcaccaagctggacatcaagaga

SEQ ID NO: 146 - DNA, 336 bp, Artificial Sequence
  Synthetic Polynucleotides
gacgtcgtgatgacccagacccctctgagcctgcctgtgtccctgggcgatcaggccagcatcagctgtagaagcagccagagcctggtgcacagcaacggcaacacctacctgcactggtatctccagaagcccggccagagccccaagctgctgatctacaaggtgtccaacagattcagcggcgtgcccgacagattctccggcagcggctctggcaccgacttcaccctgaagatcagccgggtggaagccgaggacctgggcgtgtacttctgtagccagaacacccccgtgccccccaagtttggcagcggcaccaagctggaaatcaag

SEQ ID NO: 147 - DNA, 321 bp, Artificial Sequence
  Synthetic Polynucleotides
gacatccaactgacccagagccccagcagcctgtctgcctctgtgggcgacagagtgaccatcacctgtagagccagccagggcatcagaaacgacctgggctggtatcagcagaagcccggcaaggcccccaagcggctgatctatgctgccagctccctccagaatggcgtgcccagcagattttccggcagcggctctggcaccgagttcaccctgaccatcagctccctccagcccgaggacttcgccacctactactgcctccagcacaacacctaccccgccttcggccagggcaccaaggtggaaatcaagaga

SEQ ID NO: 148 - DNA, 333 bp, Artificial Sequence
  Synthetic Polynucleotides
cagtctgtggtcacacagccacctagcatgtctgccgctccaggccagcaagtgaccatctcttgtagcggcggcaacagcaacatcgagcggaactacgtgtcctggtatctgcaactgcctggcacagcccctaagctggtcatcttcgacaacgacagacggcccagcggcatccccgatagattttctggcagcaagagcggcaccagcgccacactgggaattaccggacttcagacaggcgacgaggccgactactactgtggcacatgggactctagcctgagaggctgggttttcggcggaggcacaaagctgacagtgcttggt

SEQ ID NO: 149 - DNA, 333 bp, Artificial Sequence
  Synthetic Polynucleotides
cagtctgtgctgacacagcctccatctgcctctggcacacctggacagagagtgaccatcagctgtagcggcagcagaagcaacgtcggcggcaactacgtgttctggtatcagcaggtcccaggcgctacccctaagctgctgatctacagaagcaatcagcggcctagcggcgtgcccgatagatttgccggaagcaagagcggcagctctgccagccttgccatctctggactgagaagcgaggacgaggccgactactactgtgccacctgggatgatagcctgagcggcttcgtgtttggcaccggcaccaaagtgacagtgcttggt

SEQ ID NO: 150 - DNA, 339 bp, Artificial Sequence
  Synthetic Polynucleotides
cagtctgtggtcacacagcctccatctgtgtctggcgctccaggccagagagtgaccatctcttgtaccggcagcagcagcaatatcggagccggctatgacgtgcactggtatcagcagctccctggcacagcccctaaactgctgatctacggcaacagcaacagacccagcggcgtgcccgatagattttccggctctaagagcggcacaagcgccagcctggctattactggactccaggccgaggacgaggccgactactactgtcagagctacgacagcagcctgagcggcagctatgtgtttggcaccggcaccaagctgacagtgcttgga

SEQ ID NO: 151 - DNA, 333 bp, Artificial Sequence
  Synthetic Polynucleotides
cagtctgtggttacacagcctgcctccgtgtctggctctcctggccagagcatcaccatcagctgtaccggcaccagctctgatgtcggcggctacaattacgtgtcctggtatcagcagcaccccggcaaggcccctaagctgatgatctacgacgtgtccaagaggcccagcggcgtgtccaatagattcagcggcagcaagagcggcaacaccgccagcctgacaatttctggactgcaagccgaggacgaggccgactactactgtagcagctacaccagcagcagcacactggtgtttggcggaggcaccaagctgacagttcttgga

SEQ ID NO: 152 - DNA, 321 bp, Artificial Sequence
  Synthetic Polynucleotides
gacatccagatgacccagagccccagcagcctgtctgccagcgtgggcgacagagtgaccatcacctgtagagccagccaggacgtgaacaccgccgtggcctggtatcagcagaagcctggcaaggcccccaagctgctgatctacagcgccagcttcctggaaagcggcgtgcccagcagattcagcggaagcagaagcggcaccgacttcaccctgaccatcagctccctccagcccgaggacttcgccacctactactgccagcagcactacaccacccctcccaccttcggccagaccaaggtggaaatcaagaga

SEQ ID NO: 153 - DNA, 315 bp, Artificial Sequence
  Synthetic Polynucleotides
gacatccagatgacccagagccccagcagcctgtctgccagcgtgggcgataccgtgaccatcacctgtcaggccaacggctacctgaactggtatcagcagcggagaggcaaggcccccaagctgctgatctacgacggcagcaagctggaaagaggcgtgcccagcagattcagcggcagaagatggggccaggagtacaacctgaccatcaacaacctccagcccgaggatattgccacatacttttgccaggtgtacgagttcgtggtgcccggcacacggctggacctgaagagaacagtggctgctcct

SEQ ID NO: 154 - DNA, 321 bp, Artificial Sequence
  Synthetic Polynucleotides
cagagcgtgctgacacagcctcctagcgtgtcagtggcccctggcaagaccgccagaatcccctgcgagggcaactacatcggcagcagcaacgtgcactggtatcagcagaagcccggccaggctcccgtgctcgtgatccacttcgacagcgacagacccagcggcatccccgacagattcagcggcagcaacagcggcaacatggctaccctgaccatcagcagagtggaagccggggacgaggccgactactactgtcaagtgtgggagaaccacggctgggtgttcggcggaggcaccaagctgacagtgctgtct

SEQ ID NO: 155 - DNA, 315 bp, Artificial Sequence
  Synthetic Polynucleotides
cagtctgccctgacacagcctcctagcgcctctggctctcccggccagagcatcaccatcagctgtaccggcaccagcaacaacttcgtgtcctggtatcagcagcacgccggcaaggcccccaagctcgtgatctacgacgtgaacaagcggcccagcggcgtgcccgatagattcagcggcagcaagagcggcaacaccgccagcctgacagtgtctggcctccagaccgatgacgaggccgtgtactactgcggcagcctcgtgggcaactgggacgtgatctttggcggaggcaccaagctgaccgtgctg

SEQ ID NO: 156 - DNA, 312 bp, Artificial Sequence
  Synthetic Polynucleotides
gagatcgtgctgacacagagccctggcaccctgagcctgtctccaggcgagacagccatcatcagctgccggacaagccagtacggcagcctggcctggtatcagcagaggccaggacaggcccccagactcgtgatctacagcggcagcacaagagccgccggaatccccgatagattcagcggctccagatggggacccgactacaacctgaccatcagcaacctggaaagcggcgacttcggcgtgtactactgccagcagtacgagttcttcggccagggcaccaaggtgcaggtggacatcaaaaga

SEQ ID NO: 157 - DNA, 321 bp, Artificial Sequence
  Synthetic Polynucleotides
gagctggtgctgacacagagccctggcaccctgtctctgtctgccggcgaaagagccaccctgagctgtagagccagccagagcgtgtcctctggcagcctggcttggtatcagcagaagccaggccaggcccccagactgctgatctacggcgcttctaccagagccaccggcatccccgatagattcagcggctctggctccggcaccgacttcaccctgacaatcggcagactggaacccgaggacctggccgtgtactactgccagcagtacggcaccagcccctacacattcggccagggcaccaagctggaaatc

SEQ ID NO: 158 - DNA, 324 bp, Artificial Sequence
  Synthetic Polynucleotides
gacgtggtcatgacacagagcccttctagcctgtctgccagcgtgggcgacagagtgacaatcacctgtcagagcagcctggacatcagccactacctgaactggtatcagcagaagcccggcaaggcccctaagctgctgatctacgacgccagcaatctggaaaccggcgtgcccagcagattttctggcagcggaagcggcacccacttcaccttcacaatatccagcctccagcctgaggacttcgccacctactactgccagcagtacgacaacctgcctctgacctttggcggaggcaccaagctggaaatcaagaga

SEQ ID NO: 159 - DNA, 324 bp, Artificial Sequence
  Synthetic Polynucleotides
gacatcgtgatgacccagagccaggacagcatggctaccagcgtgggcgagcgcgtgaccgtgaattgcaaggccagccagaacgtggacaccaacgtggcctggtatcagcagaagcccggccagtctcctgagcccctgctgttcagcgccagctacagatacaccggcgtgcccgacagattcagcggcagcggctctggcaccgacttcaccctgacaatcagcagcgtgcaggccgaggacgtggccgagtatttctgccagcagtacaacagctaccccctgaccttcggccagggcaccaagctggaaatcaagaga

SEQ ID NO: 160 - DNA, 339 bp, Artificial Sequence
  Synthetic Polynucleotides
agctacgagctgacacagcctccatccgtgtctggcacacctggacagagagtggctatctcctgtagcggcagcagcagcaacatcggcaccagaatggtcacctggtatcagcacgtgccaggcacagcccctaagctgctgatcttcaacaacaaccagcggcctagcggcgtgcccgatagattttctgccagcaagagcggcacaagcgccagcctggctatcatcggactccagtctgacgacgaggccgactactactgtgccacctgggacgacaacgtgaagtcctacgtgttcggcaccggcaccaaagtgacagtgcttggaagtaga

SEQ ID NO: 161 - DNA, 330 bp, Artificial Sequence
  Synthetic Polynucleotides
cagtctgtgctgacacagcctcctagcctgtctgtggcccctggaaagacagccagcatcacatgcggcggcaacaacatcggcatgaagtccgtgcactggtatcagcagaggccaggacaggctcctgtgctggtcatctactacgacagcgacagaccctctggcatccccggcagattttccggcagcaactctggcaataccgccacactgaccatctccagagtggaagctggcgacgaggccgactactactgccaagtgtgggataccaccggcgatcaccctggctatgtgtttggcaccggcaccaaagtgacagtgctt

SEQ ID NO: 162 - DNA, 327 bp, Artificial Sequence
  Synthetic Polynucleotides
gagatcgtgctgacacagagccctgccaccctgtctctgagccctggcgaaagagccaccctgagctgtagagccagccagagcgtgggcagctacctggcctggtatcagcagaagcctggcgctccccggctgctgatctacgatgcctctcacagagccaccggcatccccgccagattttctggcagcggctccggcaccgacttcaccctgacaatcagctccctggaacccgaggacttcgccgtgtactactgccagcagcggagcaactggccccccatgtataccttcggccagggcaccaagctggaaatcaagaga

SEQ ID NO: 163 - DNA, 339 bp, Artificial Sequence
  Synthetic Polynucleotides
gagatcgtgctgacccagagccctctgagcctgcctgtgacacctggcgagcctgccagcatctcctgtagaagcagccagagcctgctgcacagcaacggctacaactacctggactggtatctccagaagcccggccagagcccccaactgctgatctacctgggcagcaacagagccagcggcgtgcccgatagattttccggcagcggctccggcaccgacttcaccctgaagatcagccgggtggaagccgaggacgtgggcgtgtactactgtatgcaggccctccagaccccccggacctttggacagggcaccaaggtggaaatcaagcgg

SEQ ID NO: 164 - DNA, 291 bp, Artificial Sequence
  Synthetic Polynucleotides
gacatccagatgacccagagccccagcagcctgtctgccagcgtgggcgacagagtgaccatcacctgtcaggccagccaggacatcaacaactacctgaactggtatcagcagaagcccggcaaggcccccaagctgctgatctacgacgccagcaatctgcagaccggcgtgcccagcagattttccggctctggcagcggcaccgacttcaccttcaccatcgaggacattgccacctactactgccagcagtacaccttcggccctggcaccaaggtggacatcaaa

SEQ ID NO: 165 - DNA, 327 bp, Artificial Sequence
  Synthetic Polynucleotides
gacatccagatgacccagagccccagcagcctgtctgccagcgtgggcgacagagtgaccatcacctgtaccgccagcctgagcgtgtccagcacctacctgcactggtatcagcagaagcccggcagcagccccaagctgtggatctacagcaccagcaacctggcctccggcgtgcccagcagattttctggcagcggctctggcaccagctacaccctgaccatcagctccctccagcccgaggacttcgccacctactactgccaccagtaccacagaagccccctgacctttggcggaggcaccaaggtggaaatcaagaga

SEQ ID NO: 166 - DNA, 321 bp, Artificial Sequence
  Synthetic Polynucleotides
gacatccagatgacccagagccccagcagcctgtctgccagcgtgggcgacagagtgaccatcacatgcaaggccagccaggacgtgggaacagccgtggcctggtatcagcagaagcctggcaaggcccccaagctgctgatctacagcgccagctacagatccaccggcgtgcccagcagattttccggctctggcagcggcaccgacttcaccctgaccatctctagcctccagcccgaggacttcgccacctactactgccagcaccactactccgccccctggacatttggcggaggcaccaaggtggaaatcaag

SEQ ID NO: 167 - DNA, 357 bp, Artificial Sequence
  Synthetic Polynucleotides
caggtgcagctccaggagagtggcccaggacttgtgaagccaagtgaaactctctcactcacttgtgctgtgagtggatacagtatcagtgacgatcacgctgtcagctgggtacgacaacctcccggagagggtctggagtggatcggtttcatttcctatagtggcattacaaactacaaccccacacttcaggaccgcgtcacaatttcacgggacaattccaagaacaccctgtatctccagatgaatagtctgagggcagaggatacggctgtgtactactgtgcccggctgctcgcccgcgcaacagctatggacgtgtggggtgaggggaccctggtgaccgtaagttcc

SEQ ID NO: 168 - DNA, 309 bp, Artificial Sequence
  Synthetic Polynucleotides
gacatccagatgacacagagccctagcagcctgtctgccagcgtgggagacagagtgaccatcacctgtagaaccagccagagcctgagcagctacacccactggtatcagcagaagcctggcaaggcccctaagctgctgatctatgccgcttccagcagaggcagcggagtgcctagcagattttctggcagcggctccggcaccgatttcaccctgacaatatccagcctccagcctgaggacttcgccacctactactgccagcagagcagaacattcggccagggcaccaaggtggaaatcaaa

SEQ ID NO: 169 - DNA, 318 bp, Artificial Sequence
  Synthetic Polynucleotides
atccaaatgacacaatcttcatcctacttgtctgtttctctaggaggcagagtcaccatcacttgcaaggcaagtgcccacatcaataattggttagcctggtatcagcagaaaccaggaaatgctcctagactcttaatatctggtgcaaccagtttggaaactggggttccttcaagattcagtggcagtggatctggaaaggattacactctcagcattaacagtcttcagactgaagatgttgctacttattattgtcaacagtattggagtcttcctcggacgttcggtggaggcaccaggctggaaatcaaa

SEQ ID NO: 170 - DNA, 339 bp, Artificial Sequence
  Synthetic Polynucleotides
gacatcgtgatgacccagagccccagcagcctgaccatgagcgtgggccagaaagtgaccatgtcctgcaagagcagccacagcctgctgaacagccggaaccagaagaactacctggcctggttccagcagaagcccggccagtcccccaagctgctggtgtacttcgcaagcacccgcgagagcggcgtgcccgacagattcatcggcagcggctccggcaccgacttcaccctgaccatcagcaacgtgcaggccgaggacctggccgactacttctgccagcagcactacaccaccctgcccaccttcggcggaggcaccaagctggaaatcaag

SEQ ID NO: 171 - DNA, 324 bp, Artificial Sequence
  Synthetic Polynucleotides
gacatccagatgacccagagcttcagcagcctgagcgccagcgtgggcgacagagtgaccatcacctgtagagccagccaggacatcagcaactacctgaactggtatcagcagaagcccggcaaggcccccaagctgctgatctactacaccagcagactgcacagcggcgtgcccagcagattttctggcagcggctccggcaccgactacaccctgacaatcagctccctgcagcccgaggacttcgctacctacttctgtcagcaaggcaacaccctgccctggacctttggcggaggcaccaagctggaaatcaagaga

SEQ ID NO: 172 - DNA, 321 bp, Artificial Sequence
  Synthetic Polynucleotides
gacatccagatgacccagagcccccctagcctgtctgcctctgtgggcggcaaagtgaccatcacatgcaaggccagccaggacatcgaccgctacatggcctggtatcaggacaagcccggcaagggacccaagctgctgatccacgataccagcaccctccagcccggcatccccagcagattttctggcagcggctccggcagagactacagcttcagcatcagcaacctggaacccgaggacattgccacctactactgcctccagtacgacaacctgtggaccttcggcggaggcaccaagctggaaatcaagaga

SEQ ID NO: 173 - DNA, 321 bp, Artificial Sequence
  Synthetic Polynucleotides
gacatccagatgacccagagccctgccagcctgtctgcctctgtgggcgagacagtgaccatcacctgtcgggtgtccggcaacatccacaactacctggcctggtatcagcagaagcagggcaagagcccccaactgctggtgtacaacgccaagaccctggccgatggcgtgcccagcagattttctggctctggcagcggcacccagtacagcctgaagatcaacagcctccagcccgaggacttcggcagctactactgccagcacttctggtccaacccctacaccttcggcggaggcaccaagctggaaatcaag

SEQ ID NO: 174 - DNA, 336 bp, Artificial Sequence
  Synthetic Polynucleotides
gacatccagatgacccagagccccagcagcctgtctgccagcgtgggcgacagagtgaccatcacctgtcggagcagccagcggatcgtgcacagcaacggcaacacctacctggaatggtatcagcagacccccggcaaggcccccaagctgctgatctacaaggtgtccaacagattcagcggcgtgcccagcaggtttagcggctctggcagcggcaccgactacacccctaccatctctagcctccagcccgaggacattgccacctactactgttttcaaggcagccacgtgccccccaccttcggccagggaacaaagctccagatcacc

SEQ ID NO: 175 - DNA, 321 bp, Artificial Sequence
  Synthetic Polynucleotides
gacatccagatgacacagtctccggcgtcactgtccgcctccgtgggggagactgtgactattatttgtagggcatcagttaacatctactcttatttggcctggtaccagcagaagcaaggcaagagtcctcagctgctggtgtataatgcgaagatcctggcagagggcgtgccgagccggttctccggcagcggctcaggtacccaattttccctcaagatcaattcactgcagccagaggactttggcagttactattgtcaacaccactacggcacattcactttcgggtccggtacaaaattggagattaagcga

SEQ ID NO: 176 - DNA, 321 bp, Artificial Sequence
  Synthetic Polynucleotides
gacattgtgatgacccagtctcacaaattcatgtccacatcagtaggagacagggtcagcgtcacctgcaaggccagtcagaatgtgggtaataatgtagcctggtatcaacagaaaccagggcaatctcctaaagtactgatttactcggcatcctaccggtacagtggagtccctgatcgcttcacaggcagtggatctgggacagatttcactctcaccatcagtaatgtgcagtctgaagacttggcagagtatttctgtcagcaatataacacctatccattcacgttcggctcggggacaaagttggaaataaaa

SEQ ID NO: 177 - DNA, 348 bp, Artificial Sequence
  Synthetic Polynucleotides
gaccagagcgtgctgacacagcctccatccgtgtctggcgctccaggccagagagtgaccatctcctgtaccggcagcagcagcaacatcggagccggctatgacgtgcactggtatcagcaactgcccggcaccgcccccaagctgctgatctacggcaacagcaacagacccagcggcgtgcccgatagattcagcggcagcaagagcggcacaagcgccagcctggctatcactggactccaggccgaggacgaggccgactactactgccagagctacgacaacagcctgtcctcctgggtgttcggcggaggcaccaagctgacagtgctgggccagcctaag

SEQ ID NO: 178 - DNA, 345 bp, Artificial Sequence
  Synthetic Polynucleotides
gaccagagcgtcgtgacacagcctccatctgtgtctgccgcccctggccggaaagtgaccatctcttgtagcggcagcagcagcaacatcggcagcaactacgtgtcctggtatcagcaggtgcccggcaccgcccctaagctgctgatctacgaggacgacaagcggcccagcggcatccccgatagattcagcggctctaagagcggcaccagcgccacactgggcatcaccggactccagacaggcgacgaggccgactacttctgcgccacctgggacagaaccgtgaacgtggtgcgctttggcggcggaaccagactgacagtgcacagccagcctaag

SEQ ID NO: 179 - DNA, 324 bp, Artificial Sequence
  Synthetic Polynucleotides
gacatccagatgacccagagccccagcagcctgtctgccagcgtgggcgacagagtgaccatcacctgtagagccagccagagcatcagcagctacctgaactggtatcagcagaagcccggcaaggcccccaaactgctgatctacgccgccagctctctgcagtctggcgtgccatctggctttagcggcagcggctctggcaccgacttcaccctgaccatcagctccctgcagcccgaggacttcgccacctactactgccagcagagctacagcacccccctgacctttggcggaggcaccaaggtggaaatcaagaga

SEQ ID NO: 180 - DNA, 324 bp, Artificial Sequence
  Synthetic Polynucleotides
gacatccagatgacccagagcagcagcagcttcagcgtgtccctgggcgacagagtgaccatcacatgcaaggccagcgaggacatctacatccggctggcctggtatcagcagaagcccggcaacgcccccagactgctgattagcgccgccacctctctggaaaccggcatccccagcagattctccggctctggcagcggcgaggactacaccctgacaatcaccagcctccagaccgaggacgtggcaacctactactgccagcagtattggaccaccccctggacctttggcggaggcaccaagctggaaatcaagaga

SEQ ID NO: 181 - DNA, 321 bp, Artificial Sequence
  Synthetic Polynucleotides
gatatccagatgacccagtccagcagcagcttcagcgtgtccctgggcgacagagtgaccatcacctgtatggcctccgaggacatctacatccggctggcctggtatcagcagaagcccggcaacgcccccagactgctgattagcgccgccacctctctggaaaccggcgtgccaagcagattcagcggctctggcagcggcaaggactacaccctgagcatcacctccttgcagaccgaggacgtgggcacctactattgccagcagtattggagcagcccctggacctttggcggaggcacaaagctggaaatcaac

SEQ ID NO: 182 - DNA, 321 bp, Artificial Sequence
  Synthetic Polynucleotides
gacatccagatgacccagagcagcagcagcttcagcgtgagcctgggcgacagagtgaccatcacctgcatggccagcgaggacatctacatcagactggcctggtaccagcagaagcccggcaacgcccccagactgctgatcagcgccgccaccagcctggagaccggcgtgcccagcagattcagcggcagcggcagcggcaaggactacaccctgagcatcaccagcctgcagaccgaggacgtgggcacctactactgccagcagtactggagcagcccctggaccttcggcggcggcaccaagctggagatcaac

SEQ ID NO: 183 - DNA, 318 bp, Artificial Sequence
  Synthetic Polynucleotides
cagatcgtgctgacccagtcccccgctattatgtccgcatcaccgggcgaaaaagtgacgatctcctgtagcgcttcatctagcgtctcctacatgtattggtatcaacagaaacctgggtctagcccaaagccgtggatctacagaaccagtaaccttgccagtggggtgccagcccgcttcagcggtagtggcagtggaacttcctatagcctcacaataagcaacatggaggctgaagatgccgctgcctattactgccagcagtaccacagttacccaaccacgttcggcgggggaactaagctcgaagtaaaa

SEQ ID NO: 184 - DNA, 336 bp, Artificial Sequence
  Synthetic Polynucleotides
gacatcgtaatgacccaggctgccccatccataccagtcactcccggtgaatccgtgtctatatcttgtaggtccgataagagtctgcttcacagcaacggcaatacttatcttttctggtttttgcagcgaccgggacaaagcccacaactgctgatctatagaatgtcaaatcttgcatcaggggtcccagatcgctttagtggatctgggtcaggcacagctttcaccctgagaatctccggagtggaagcagaagacgtaggcgtgtattactgtatgcagcaccttgagtatccttatacctttggaggcggaactaagctcgaaattaaa

SEQ ID NO: 185 - DNA, 336 bp, Artificial Sequence
  Synthetic Polynucleotides
gacatcgtaatgacacagtctcccctgtccctccctgtcacaccaggtgaacctgccagtatttcttgtagatccagtaagtcacttctgcactccaatgggaacacctacctgtattggttccagcaaaagcctggtcaggcacctcgcttgcttatttataggatgtccaatcttgcatccggcgtgccagaccgattctcaggctccggctctggtactgcatttaccctgaaaatctcccgcgtggaagcagaagatgtgggcgtgtactactgtatgcagcacatcgagtaccccttcacgtttggtcaaggcacaaagctggaaatcaaa

SEQ ID NO: 186 - DNA, 345 bp, Artificial Sequence
  Synthetic Polynucleotides
tcctcctacgtgctgactcagcctccctccgtgtctgggtctcctggacagtcgatcaccatctcctgcactggaaccagcagtgacgttggtggttataactatgtctcctggtaccaacaacacccaggcaaagcccccaaactcatgatttatgagggcagtaagcggccctcaggggtttctaatcgcttctctggctccaagtctggcaacacggcctccctgacaatctctgggctccaggctgaggacgaggctgattattactgcagctcatatacaaccaggagcacccgagttttcggcggagggaccaagctgaccgtcctaggtgccgccgca

SEQ ID NO: 187 - DNA, 333 bp, Artificial Sequence
  Synthetic Polynucleotides
gacatcgtactgacacagagccccgcttctctggcagtgtcactgggccagtccgttacaatatcctgtcgggcgagtgaatccgtggaatactatggaacaagtctcatgcagtggtatcagcagaaacctggacagccccccaagctgctcatctacggtgcgtcaaatgtcgagagtggggttccggcccgattcagtggttccgggagtggcacagactttagcctcaacatccatcctgttgaggaagacgatattgccatgtatttttgccaacagtcccgcaaagtcccctggacctttggtggaggaactaagctggagatcaag

SEQ ID NO: 188 - DNA, 327 bp, Artificial Sequence
  Synthetic Polynucleotides
gagacaaccctgacacagagccctggcaccctgagcctgtctccaggcgaaagagccacactgagctgtcgggccagccagagcgtgtccagctcttacctggcctggtatcagcagaagcccggccaggctccccggctgctgatctatggcgcttctagcagagccaccggcatccccgatagattcagcggctctggcagcggcaccgacttcaccctgaccatcagcagactggaacccgaggacttcgccgtgtactactgccagcagtacggcagcagccccagaacattcggccagggcaccaaggtggaaatcaagaga

SEQ ID NO: 189 - DNA, 324 bp, Artificial Sequence
  Synthetic Polynucleotides
gagatcgtgatgacccagagccctgccaccctgtctctgagccctggcgaaagagccaccctgagctgtagagccagccagagcgtgtccagctacctggcctggtatcagcagaagcccggccaggctccccggctgctgatctacgatgccagcaatagagccaccggcatccccgccagattttccggctctggcagcggcaccgacttcaccctgaccatcagctccctggaacccgaggacttcgccgtgtactactgccaccagtacggcagcagcccccagacctttggacagggcaccaaggtggaaatcaagcgg

SEQ ID NO: 190 - DNA, 339 bp, Artificial Sequence
  Synthetic Polynucleotides
gacatcgagctgacccagagccctagcagcctggctgtgtctgccggcgagaaagtgaccatgagctgcaagagcagccagagcctgctgaacagccggacccggaagaatcaactggcctggtatcagcagaagcccggccagtctcccgagctgctgatctactgggccagcaccagacagagcggcgtgcccgatagattcacaggcagcggctccggcaccgacttcaccctgacaatcagcagcgtgcaggccgaggacctggccgtgtactactgccagcagagctacaacctgctgaccttcggccctggcaccaagctggaagtgaagaga

SEQ ID NO: 191 - DNA, 327 bp, Artificial Sequence
  Synthetic Polynucleotides
gagatcgtgctgacacagagccctggcaccctgagcctgtctccaggcgaaagagccacactgagctgtcgggccagccagagcgtgtccagctcttacctggcctggtatcagcagaagcccggccaggctccccggctgctgatctatggcgcttctagcagagccaccggcatccccgatagattcagcggctctggcagcggcaccgacttcaccctgaccatcagcagactggaacccgaggacttcgccgtgtactactgccagcagtacggcagcagcccctggacctttggacagggcaccaaggtggaaatcaagaga

SEQ ID NO: 192 - DNA, 336 bp, Artificial Sequence
  Synthetic Polynucleotides
gacgtcgtgatgacccagacccctctgaccctgagcgtgaccattggacagcccgccagcatctcctgcaagagcagccagagcctgctggacagcgacggcaagacctatctccactggctgttgcaacggccaggtcagagccccaagagactgatcttcctggtgtccaagctggactccggcgtgcccgatagattcacaggcagcggctccggcaccgacttcaccctgaagatcagccgggtggaagccgaggacctgggcgtgtactactgttggcagggcacccacttcccccagacctttggcggcggaacaaagctggaaatcaag

SEQ ID NO: 193 - DNA, 330 bp, Artificial Sequence
  Synthetic Polynucleotides
gaccagagcgagctgacccagcctagaagcgtgtccggcagccctggacagagcgtgaccatcagctgtaccggcaccgagagagatgtgggcggctacaactacgtgtcctggtatcagcagcaccccggcaaggcccccaagctgatcatccacgacgtgatcgagcggagcagcggcgtgcccgatagattcagcggcagcaagagcggcaacaccgccagcctgacaatcagcggactgcaggccgaggacgaggccgactactactgctggtctttcgctggcggctactacgtgttcggcaccggcacagatgtgaccgtgctg

SEQ ID NO: 194 - DNA, 291 bp, Artificial Sequence
  Synthetic Polynucleotides
gagatcgtgctgacacagagccctgccaccctgtctctgagccctggcgaaagagccaccctgagctgtagagccagccagagcgtgtccagctacctggcctggtatcagcagaagcccggccaggctccccggctgctgatctacgatgccagcaatagagccaccggcatccccgccagattttccggctctggcagcggcaccgacttcaccctgaccatcgaggacttcgccgtgtactactgccagcagagcaccttcggccagggcaccaaggtggaaatcaag

SEQ ID NO: 195 - DNA, 321 bp, Artificial Sequence
  Synthetic Polynucleotides
gagatcgtgctgacacagagccctgccaccctgtctctgagccctggcgaaagagccaccctgagctgtagagccagccagagcgtgtccagctacctggcctggtatcagcagaagcccggccaggctccccggctgctgatctacgatgccagcaatagagccaccggcatccccgccagattttccggctctggcagcggcaccgacttcaccctgaccatcagctccctggaacccgaggacttcgccgtgtactactgccagcagagcagcaactggccccggacctttggacagggcaccaaggtggaaatcaag

SEQ ID NO: 196 - DNA, 321 bp, Artificial Sequence
  Synthetic Polynucleotides
gacatccagatgacacagagccctagcagcctgtctgccagcgtgggagacagagtgaccatcacctgtagagccagccagggcatctcttcttggctggcctggtatcagcagaagcccgagaaggcccctaagagcctgatctatgccgccagctctctccagagcggagtgcctagcagattttctggcagcggctccggcaccgatttcaccctgacaatatccagcctccagcctgaggacttcgccacctactactgccagcagtacaacagctacccctacaccttcggccagggcaccaagctggaaatcaaa

SEQ ID NO: 197 - DNA, 324 bp, Artificial Sequence
  Synthetic Polynucleotides
gacatccagatgacacagagccctagcagcctgtctgccagcgtgggagacagagtgaccatcacctgtagagccagccaggatgtgtctacagccgtggcctggtatcagcagaagcctggaaaggcccctaagctgctgatctacagcgccagctttctgtacagcggcgtgcccagcagattttctggcagcggctctggcaccgacttcaccctgacaatatccagcctccagcctgaggacttcgccacctactactgccagcagtacctgtatcaccccgccacctttggacagggcaccaaggtggaaatcaagaga

SEQ ID NO: 198 - DNA, 336 bp, Artificial Sequence
  Synthetic Polynucleotides
gccatcgtgatgacccagacaccttctccagtgtctgccgccgttggcggcacagtgacaatcaactgtcaggccagcgagagcgtgtacagcaacaactacctgagctggttccagcagaagcccggccagcctcctaagctgctgatctacctggcctccacactggcaagcggagtgcccagtagattcaaaggcagcggctctggcacccagttcaccctgacaattagcggcgtgcagtgtgacgatgccgccacctattactgcatcggcggcaagagcagcagcaccgatggcaatgcttttggcggcggaacagaggtggtcgttaga

SEQ ID NO: 199 - DNA, 324 bp, Artificial Sequence
  Synthetic Polynucleotides
gacatcgtcgtgacacagagccctgcttccctggccgtgtccctgggacagagagccaccatcagctaccgggccagcaagagcgtgtccaccagcggctacagctacatgcactggaaccagcagaagcccggccagccccctagactgctgatctacctggtgtccaacctggaaagcggcgtgcccgccagattttctggcagcggctctggcaccgacttcaccctgaacatccaccccgtggaagaagaggacgccgccacctactactgccagcacatcagagagctgaccagaagcgagggcggaccctcttggaag

SEQ ID NO: 200 - DNA, 318 bp, Artificial Sequence
  Synthetic Polynucleotides
cagctgacacagagccctagcagcgtgtcagccagcgtgggcgacagagtgaccatcacctgtagagccagccggggcatcagctcttggctggcctggtatcagcagaagcccggcaaggcccccaagctgctgatctacacagccagcagcctccagagcggcgtgcccagcagattttctggcagcggctccggcaccgacttcaccctgacaatcagcagcctccagcccgaggacttcgccacctactactgccagcaggcttacagcttcccccggacctttggccagggcaccaaggtggaaatcaagcgg

SEQ ID NO: 201 - DNA, 339 bp, Artificial Sequence
  Synthetic Polynucleotides
gacatcgtgatgacccagagccccctgagcctgcctgtgacacctggcgagcctgccagcatctcctgtagaagcagccagagcctgctgcacagcaacggctacaactacctcgtgtggtatctccagaagcccggccagagccctcaactgctgatctacctgggcagcatcagagccagcggcgtgcccgatagattttccggcagcggctccggcaccgacttcaccctgaagatcagccgggtggaagccgaggacgtgggcgtgtactactgtatgcagcccctccagacccccatcaccttcggccagggcaccagactggaaatcaagaga

SEQ ID NO: 202 - DNA, 321 bp, Artificial Sequence
  Synthetic Polynucleotides
gacatccagatgacccagagccccagcagcctgtctgccagcgtgggcgacagagtgaccatcacctgtagagccagccagggcatcagcaactacctggcctggtatcagcagaaaaccggcaaggtgcccaagttcctgatctacgaggccagcaccctgcagagcggcgtgccaagtagattttccggcggaggcagcggcaccgacttcaccctgacaatcagctccctgcagcccgaggacgtggcaacctactactgccagaactacaacagcgcccccttcaccttcggccctgggaccaaggtggacatcaag

SEQ ID NO: 203 - DNA, 321 bp, Artificial Sequence
  Synthetic Polynucleotides
gacatccagatgacccagagccccagcagcctgtctaccagcgtgggcgatagagtgaccctgacctgcaaggccagccaggatgtgggaaccgccgtggactggtatcagcagaagcctggccccagccccaagctgctgatctactgggccagcaccagacacaccggcatccccagcagattttccggcagcggctccggcaccgacttcaccctgacaatcagctccctgcagcccgaggacttcgccgactactactgccagcagtacaacagctaccccctgaccttcggccctgggaccaaggtggacatcaag

SEQ ID NO: 204 - DNA, 309 bp, Artificial Sequence
  Synthetic Polynucleotides
gacatccagatgacccagagccccagcagcctgtctgccagcgtgggcgacagagtgaccatcacatgcaaggccagccaggacatctacccctacctgaactggttccagcagaagcccggcaaggcccccaagaccctgatctaccggaccaacagactgctggacggcgtgcccagcagattttctggcagcggctccggcaccgacttcaccttcaccatcagctccctccagccctactactgcctccagtacgacgagttccccctgacctttggagccggcaccaagctggaaatcaagaga

SEQ ID NO: 205 - DNA, 324 bp, Artificial Sequence
  Synthetic Polynucleotides
gacatcgtgatgacccagagccagaaattcatgagcaccagcgtgggcgacagagtgaacgtgacctgcaaggccagccagaacgtgggcaccaacgtcgtgtggtatcagcagaaaaccggccagagccccaaggccctgatccacagcgccagctacagatacagcggcgtgcccgacagattcaccggcagcggctctggcaccgacttcaccctgaccctgagcaacgtgcagagcgaggacctggccgaatacttctgccagcactacaacagcttcccttacaccttcggcggaggcaccaagctggaaatcaagaga

SEQ ID NO: 206 - DNA, 321 bp, Artificial Sequence
  Synthetic Polynucleotides
gacatcaagatgacccagagccccagctctatgtacgccagcctgggcgagcgcgtgaccatcacctgtaaagccagccccgacatcaacagctacctgagctggttccagcagaagcccggcaagagccccaagaccctgatctaccgggccaacagactggtggatggcgtgcccagcagattctctggcggcggaagcggccaggactacagcctgaccatcaactccctggaatacgaggacatgggcatctactactgcctccagtacgacgagttcccctacaccttcggcggaggcaccaagctggaaatgaaa

SEQ ID NO: 207 - DNA, 324 bp, Artificial Sequence
  Synthetic Polynucleotides
gacgtggtcgtgacccctgtgtcctgcttcctgagctgcatctctggcgccgagggccaccacctgattcagggccagcagaagtgccagtacatctggctgctgtacgccctggaacccaccgagacaagaaccgccacccagacccctcacctgtcctgcatccagcccagaatctggggaccctgccaggtgcagtggcagtgggtgtgggatagactgcacccccagcaccctagttgtggcggcggaggctgttgcaacctgctgctgtctgcccacggcgcctacacatttggcggaggcacccggctggaactgaaa

SEQ ID NO: 208 - DNA, 321 bp, Artificial Sequence
  Synthetic Polynucleotides
cagagcgtgctgacacagcctcctagtgcctctgccggcggaacacctggacagagagtgaccatctcctgctccggcagcagcagcaacatcggcagcaacttcgtgtactggtatcagcaactgcccggcaccgcccccaagctgctgatctacagaaacaaccagcggcccagcggcgtgcccgatagattctctggaagcagaagcggcaccagcgccagcctggctggactgagaagcgaggacgaggccgactactactgtgccgccgatagcctgggcggccactacgtgttcggcaccggaacaaaagtgctg

SEQ ID NO: 209 - DNA, 324 bp, Artificial Sequence
  Synthetic Polynucleotides
gagatcgtgatgacccagagccctgccaccctgtccgtgtctccaggcgaaagagccaccctgagctgtagagccagccagagcgtgtccagcaacctggcctggtatcagcagaagcccggccaggctccccggctgctgatctatggcgcttctaccagagccaccggcatccccgccagattttctggcagcggctccggcaccgacttcaccctgacaatcagctccctccagtccgtggacagcgccgtgtactactgccagcagtacaacaactggcccccctacaccttcggccagggcaccaagctggaaatcaag

SEQ ID NO: 210 - DNA, 318 bp, Artificial Sequence
  Synthetic Polynucleotides
gagaacgtgctgacacagagccctgccatcatgagcgcttccccaggcgagaaagtgaccatgacatgtagcgccagcagcagcgtgtcctacatgcactggtatcagcagaagtccagcacaagccccaagctgtggatctacgacaccagcaaactggcctctggcgtgccaggcagattttctggcagcggcagcggaaacagctacagcctgacaatcagcagcatggaagccgaggacgtggcaacctactactgctttcaaggcagcggctaccctctgacctttggagccggaacaaagctggaactgaaa

SEQ ID NO: 211 - DNA, 324 bp, Artificial Sequence
  Synthetic Polynucleotides
gacatccagatgacccagagccccagcagcctgtctgccagcgtgggcgacagagtgaccatcacctgtagagccagccagagcatcagcagctacctgaactggtatcagcagaagcccggcaaggcccccaaactgctgatctacgacgccagcaacctggaaaccggcgtgcccagcagattttccggcagcggctctggcaccgacttcaccttcaccatcagctccctccagcccgaggacattgccacctactactgccagcagtacgacaacctgcccctgacctttggcggaggcaccaaggtggacatcaagaga

SEQ ID NO: 212 - DNA, 339 bp, Artificial Sequence
  Synthetic Polynucleotides
gacgtcgtgatgacccagagccctctgagcctgcctgtgtccctgggcgatcaggccagcatctcctgcagatccagccagagactggtgcacagcaacggcaacacctacctgcactggtatctgcagaagcccggccagagccccaagctgctgatctaccgggtgtccaacagattccccggcgtgcccgatagattcagcggctctggcagcggcaccgacttcaccctgaagatcagccgggtggaagccgaggacctgggcatctatttctgcagccagagcacccacgtgccctacacctttggcggaggcaccaagctggaaatcaagcgg

SEQ ID NO: 213 - DNA, 327 bp, Artificial Sequence
  Synthetic Polynucleotides
agctacgagctgacccagcctcctagcgtgtccgtgtctcctggacagaccgccaccatctcttgcagcggcgatcaactgggcgggaagtacggccactggtatcagaagaagcccggccagagccccgtgctggtgctgtaccaggacagaaaacggcctgccggcatccccgagagattcagcggaagcagcagcggcaacaccatcaccctgaccatcagcggcacccaggccgtggatgaggccgactactactgccaggcttgggacaccaatctgggcggcgtgttcggcggaggcaccaaagtgacagtgctgggacag

SEQ ID NO: 214 - DNA, 339 bp, Artificial Sequence
  Synthetic Polynucleotides
aacttcatgctgacccagccccacagcgtgtccgagagccctggcaagaccgtgaccatctcctgcaccagaagcagcggctctatcgccagcaaatacgtgcagtggtatcagcagaggcccggcagcagccctaccaccgtgatctacgaggacaaccagaggcctagcggcgtgcccgatagattcagcggcagcatcgacaccagcagcaacagcgccagcctgaccatcagcggcctgagaacagaggacgaggccgactactactgccacagctacgacagcaacaaccactccgtgttcggcggaggcaccaaagtgacagtgctgggacag

SEQ ID NO: 215 - DNA, 324 bp, Artificial Sequence
  Synthetic Polynucleotides
gacatccagatgaaccagagccccagcagcctgagcgccagcctgggcgataccatcaccatcacctgtcacgccagccagaacatcaacgtgtggctgagctggtatcagcagaagcccggcaacatccccaagctgctgatctacaaggccagcaacctgcacaccggcgtgcccagcagattttctggcagcggctctggcaccggcttcaccattaccatcagctccctccagcccgaggacattgccacctactactgccagcagggccagagctacccctggacatttggcggaggcaccaagctggaaatcaagaga

SEQ ID NO: 216 - DNA, 327 bp, Artificial Sequence
  Synthetic Polynucleotides
gagacaaccctgacacagagccctggcaccctgagcctgtctccaggcgaaagagccacactgagctgtcgggccagccagagcgtgtccagctcttacctggcctggtatcagcagaagcccggccaggctccccggctgctgatctatggcgcttctagcagagccaccggcatccccgatagattcagcggctctggcagcggcaccgacttcaccctgaccatcagcagactggaacccgaggacttcgccgtgtactactgccagcagtacggcagcagcccctacacattcggccagggcaccaagctggaaatcaagaga

SEQ ID NO: 217 - DNA, 324 bp, Artificial Sequence
  Synthetic Polynucleotides
gacatccagatgacccagagccccagcatcctgagcgccagcgtgggcgacagagtgaccatcacctgtcgggccagccagagattcggcgactacctggcctggtatcagcagaagcctggacaggcccccaagctgctgatctacggcgcttccacactccagagcggcgtgcccagcagattttctggcagcggctccggcaccgagttcaccctgacaatcagcggcctccagcccgaggacttcgccacctactattgccagcaggccaacagcttccctatcaccttcggcaagggcacccggctggacatcagaaga

SEQ ID NO: 218 - DNA, 321 bp, Artificial Sequence; identical to SEQ ID NO: 196
  Synthetic Polynucleotides

SEQ ID NO: 219 - DNA, 321 bp, Artificial Sequence
  Synthetic Polynucleotides
gagatcgtgctgacacagagccctgccaccctgtctctgagccctggcgaaagagccaccctgagctgtagagccagccagagcgtgcggagctacctggcctggtatcagcagaagcctggacaggcccccagactgctgatctacgacgccagcaatcgggccacaggcatccccgccagattttctggctctggcagcggcaccgacttcaccctgacaatcagcagcctggaacccgaggacttcgccgtgtactactgccagcagcggagcaactggccccctacctttggacagggcaccaaggtggaaatcaag

SEQ ID NO: 220 - DNA, 342 bp, Artificial Sequence
  Synthetic Polynucleotides
gacatcgtgatgacccagacccccctgagcctgcctgtgacacctggcgagcctgccagcatctcctgcagaagcagcagaagcctgctggacagcgacgacggcaacacctacctggactggtatctgcagaaacccggccagagcccccaactgctgatctacaccctgagctacagagccagcggcgtgcccgatagattttccggctctggcagcggcaccgacttcaccctgaagatcagccgggtggaagccgaggacgtgggcgtgtactactgtatgcagcgggtggaatttcccatcaccttcggccagggcaccagactggaaatcaagaga

SEQ ID NO: 221 - DNA, 321 bp, Artificial Sequence
  Synthetic Polynucleotides
gagatccagatgacccagagccccagcagcatgtctgccagcctgggcgacaccatcaccatcacatgccaggccacccaggacatcttcaagaacctgaactggtatcagcagaagcccggcaagccccccagcctgctgatctactatgccaccgaactggccgagggcgtgcccagcagattttctggcagcggcagcggctccgactacagcctgaccatcagcaacctggaaagcgaggacttcgccgcctactactgcctccagttcttcgagttcccattcaccttcggctccggcaccaagctggaaatgaag

SEQ ID NO: 222 - DNA, 324 bp, Artificial Sequence
  Synthetic Polynucleotides
gacatcctgctgacacagagccccgccatcctgtccgtgtctccaggcgagagagtgtcctttagctgccgggccagccagaacatcggcaccagcatccactggtatcagcagcggaccaacggcagccccagactgctgattaagtacgccagcgagtccgtgtccggcatccccagcagattttctggcagcggctccggcaccgacttcaccctgagcatcaacagcgtggaaagcgaggacattgccgactactactgccagcacaccaatagctggcccaccacctttggcggaggcaccaagctggaaatcaagaga

SEQ ID NO: 223 - DNA, 339 bp, Artificial Sequence
  Synthetic Polynucleotides
gacatcgtgatgacccagagccccgatagcctggccgtgtctctgggagagagagccaccatcaactgcaagagcagccagagcctgctgaacagcggcgaccagaagaactacctgacctggtatcagcagaagcccggccagccccccaagctgctgatctactgggccagcaccagagaaagcggcgtgcccgatagattcagcggcagcggaagcggcaccgacttcaccctgaccatcagttctcttcaggccgaggacgtggccgtgtactactgccagaacgactacagctaccccctgaccttcggccagggcaccaaggtggaaatcaag

SEQ ID NO: 224 - DNA, 321 bp, Artificial Sequence
  Synthetic Polynucleotides
gacatccagatgacccagagccccagcagcctgtctgccagcgtgggcgacagagtgaccatcacatgcaaggccagccaggacgtgtccattgccgtggcctggtatcagcagaagcccggcaaggcccccaaggtgctgatctacagcgccagctacagatacaccggcgtgcccgacagattcagcggctctggcagcggcaccgacttcaccttcaccatcagctccctccagcccgaggatattgccgtgtactactgccagcagcactacatcacccccctgacctttggcggaggcaccaaggtggaaatcaag

SEQ ID NO: 225 - DNA, 333 bp, Artificial Sequence
  Synthetic Polynucleotides
gacatcgtgatgacccagagccccgatagcctggccgtgtctctgggagagagagccaccatcaactgccgggccagcaagagcgtgtccaccagcggctacagctacatgcactggtatcagcagaagcccggccagccccccaagctgctgatctacctggcctccaacctggaaagcggcgtgcccgatagattcagcggcagcggctctggcaccgacttcaccctgaccatcagttctcttcaggccgaggacgtggccgtgtactactgccagcacagcagagagctgccctacaccttcggccagggcaccaagctggaaatcaag

SEQ ID NO: 226 - DNA, 327 bp, Artificial Sequence
  Synthetic Polynucleotides
gccatccagatgacccagagccctagcagcctgagcgccagcgtgggcgacagagtgaccatcacctgtagagccagccagagcatcagcaactacctgaactggtatcagcagaagcccggcaaggcccccaagctgctgatctatgccgccagctctctccagagcggcgtgcccagcagattttctggcagcggctccggcaccgacttcaccctgacaatcagcagcctccagcccgaggacttcgccacctactactgccagcagagctacagcagcccctccaccacctttggacagggcaccaagctggaaatcaagaga

SEQ ID NO: 227 - DNA, 321 bp, Artificial Sequence
  Synthetic Polynucleotides
cagagcgtgctgacacagcctcctagcgtgtccgtgtctcctggccagaccgccagcatcacctgtagcggcgataagctgggcgataagtacgcctgctggtatcagcagaagcccggccagtctcccgtgctcgtgatctaccaggacagcaagaggcccagcggcatccccgagagattcagcggcagcaacagcggcaataccgccaccctgaccatcagcggcacccaggctatggacgaggccgactactactgccaggcttgggatagcagcaccgccgtggtgtttggcggaggcaccaagctgacagtgctg

SEQ ID NO: 228 - DNA, 321 bp, Artificial Sequence
  Synthetic Polynucleotides
gacatcgtgatgacccagagccagaaattcatgagcaccagcgtgggcgaccgggtgtccatcatctgcaaggccagccagaacgtgggcaccttcgtggcctggtatcagcagaagcctggccagagccccaagctgctggtgtacagcgccagcaacagatacaccggcgtgcccgatagattcaccggcagcggctctggcaccgacttcaccctgaccatcaacaacatgcagagcgaggacctggccgactacttctgtcggcagtacagcagctacccctacaccttcggcggaggcaccaagctggaaatcaag

SEQ ID NO: 229 - DNA, 324 bp, Artificial Sequence
  Synthetic Polynucleotides
gacatccagatgacccagagccccagcagcctgtctgccagcgtgggcgacagagtgaccatcacctgtagagccagccagagcatcggcaccagcctgcactggtatcagcagaagcctggcaaggcccccaagctgctgattaagttcgccagcagactgcagagcggcgtgcccagcagattttctggcagcggctccggcaccgacttcaccctgacaatcagctccctgcagcccgaggacttcgccacctactactgccagcagagccccggcttccctccaacctttggacagggcaccaagctggaaatcaagcgg

SEQ ID NO: 230 - DNA, 339 bp, Artificial Sequence
  Synthetic Polynucleotides
gagatcgtgctgacccagagccctctgagcctgcctgtgacacctggcgagcctgccagcatctcctgtagaagcagccagagcctgctgcacagcatcggctacaactacctggactggtatctccagaagcccggccagagcccccaactgctgatctacctgggcagcaacagagccagcggcgtgcccgatagattttccggcagcggctccggcaccgacttcaccctgaagatcagccgggtggaagccgaggacgtgggcgtgtactactgtatgcaggccctccagacccccctgacctttggcggaggcaccaaggtggaaatcaagcgg

SEQ ID NO: 231 - DNA, 339 bp, Artificial Sequence
  Synthetic Polynucleotides
gacgtcgtgatgacccagagccctctgagcctgcctgtgacacctggcgagcctgccagcatctcctgtagaagcagccagagcctgctgcacagcatcggctacaactacctgcactggtttctccagaagcccggccagagcccccaactgctgatctacctgggcagcaacagagccagcggcgtgcccgatagattttccggcagcggctccggcaccgacttcaccctgaagatcagccgggtggaagccgaggacgtgggcgtgtactactgtatgcaggccctccagacccctcccacctttggacagggcaccagactggaaatcaagcgg

SEQ ID NO: 232 - DNA, 339 bp, Artificial Sequence
  Synthetic Polynucleotides
gacgtcgtgatgacccagagccctctgagcctgcctgtgacacctggcgagcctgccagcatcagctgtagaagcagccagagcctgctgcacagcaacggccacaactacctggactggtatctccagaagcccggccagagcccccagctgctgatctacctgggcagcaatagagccagcggcgtgcccgatagattcagcggctctggaagcggcaccgacttcaccctgaagatcagccgggtggaagccgaggacgtgggcgtgtactactgtatgcagaccctccagacccccctgacctttggccctggcaccaaggtggacatcaagaga

SEQ ID NO: 233 - DNA, 321 bp, Artificial Sequence
  Synthetic Polynucleotides
gagatcgtgctgacacagagccctggcaccctgagcctgtctctgggagagagagccacactgagctgtcgggccagccagtctatcagcagcagcttcctggcctggtatcagcagaagcccggccaggcccctaagctgctgatctacgccgccagcacaagagccaccggcatccccgatagattcagcggctctggcagcggcaccgacttcaccctgaccatcagcagactggaacccgaggacttcgccgtgtactactgccagcagtacggcagaagcctgagcttcggcggaggcaccaaggtggaagtgaag

SEQ ID NO: 234 - DNA, 330 bp, Artificial Sequence
  Synthetic Polynucleotides
caggctgtcgtgacacagcctcctagcgcctctggcacaccaggccagagagtgaccatctcctgtagcggcagcagcagcaacatcggcagcaacaccgtgaactggtatcagcaggtgcccggcaccgctcccaagctgctgatctacagcaacaaccagcggcccagcggcgtgcccgatagattttctggcagcaagagcggcaccagcgccagcctggctatctctggactccagtccgaggacgaggccgactactattgcgccgcctgggacgatagcctgaacggctgggtgttcggcggaggcaccaagctgacagtgctg

SEQ ID NO: 235 - DNA, 321 bp, Artificial Sequence
  Synthetic Polynucleotides
gacatccagatgacccagagccccagcacactgagcgccagcgtgggcgacagagtgaccatcacctgtcgggccagccagaacatcaacaagtggctggcctggtatcagcagaggcccggaaaagccccccagctgctgatctacaaggccagcagcctggaaagcggcgtgcccagcagattttctggcagcggctctggcaccgagtacaccctgaccatcagctccctccagcccgacgacttcgccacctactactgccagcagtacaacagctacgccaccttcggccagggcaccaaggtggaaatcaagaga

SEQ ID NO: 236 - DNA, 333 bp, Artificial Sequence
  Synthetic Polynucleotides
cagaccgtcgtgacacagcctcctagcgcctctggcacaccaggccagagagtgaccatctcctgtagcggcagcagcagcaacatcggcagcaactacgtgtactggtatcagcaactgcccggcaccgcccccaagctgctgatctacagaagcaaccagcggcccagcggcgtgcccgatagattttctggcagcaagagcggcaccagcgccagcctggctatctctggacctagaagcgtggacgaggccgactactactgcgccgcctgggacgatagcctgaacggcgtggtgtttggcggaggcaccaagctgacagtgctgggt

SEQ ID NO: 237 - DNA, 327 bp, Artificial Sequence
  Synthetic Polynucleotides
cagagcgtcgtgacacagcctcctagcgtgtcagtggcccctggcaagaccgccagaatcacctgtggccggaacaacatcggcagcaagagcgtgcactggtatcagcagaagcccggccaggctcctgtgctggtggtgtacgacgacagcgacagacccagcggcatccccgagagattcagcggcagcaactccggcaataccgccaccctgaccatcagcagagtggaagccggcgacgaggccgactactactgccaagtgtgggacagcagcagcgatcacgtggtgtttggcggaggcaccaagctgacagtgctgggt

SEQ ID NO: 238 - DNA, 327 bp, Artificial Sequence
  Synthetic Polynucleotides
caggccgtgctgacccaggagagcgccctgaccaccagccccggcgagaccgtgaccctgacctgcagaagcagcaccggcgccgtgaccaccagcaactacgccaactgggtgcaggagaagcccgaccacctgttcaccggcctgatcggcggcaccaacaacagagtgcccggcgtgcccgccagattcagcggcagcctgatcggcgacaaggccgccctgaccatcaccggcgcccagaccgaggacgaggccatctacttctgcgtgctgtggcacagcaaccactgggtgttcggcggcggcaccaagctgaccgtgctg

SEQ ID NO: 239 - DNA, 324 bp, Artificial Sequence
  Synthetic Polynucleotides
gagatcgtgctgacacagagccctggcaccctgagcctgtctccaggcgaaagagccacactgagctgtcgggccagccagagcgtgtccaatacctacctggcctggtatcaccagaggcccggacaggctccccggctgctgatctatggcgcttctagcagagccaccggcatccccgatagattcagcggctctggcagcggcaccgacttcgccctgacaatcagctccctggaacccgaggacttcgccgtgtactactgccagcagtacagcaactcctggaccttcggccagggcaccaaggtggaaatcaagaga

SEQ ID NO: 240 - DNA, 324 bp, Artificial Sequence
  Synthetic Polynucleotides
gagctgacacaggaccctgctgtgtctgttgccctgggccagacagtgcggattacctgtcaaggcgacagcctgagaagcaactacgccaactggtatcagcagaagcccggacaggctcccgtgctggttatctacggccagaacaacagacccagcggcatccccgatagattcagcggctctagctctggcaataccgccagcctgacaatcactggcgctcaggctgccgatgaggccgactactactgcgatagcagagtgtccaccggcaatcacgtggtgtttggcggcggaacaaagctgacagtgctcggacaa

SEQ ID NO: 241 - DNA, 321 bp, Artificial Sequence
  Synthetic Polynucleotides
gacatcgtgctgacacagacaccagccacactgagcgtgacacctggcgattctgtgtccctgagctgtagagccagccagagcatcagcaacaacctgcactggtatcagcagaagtcccacgagagccccagactgctgattaagaacgccagccagtctatcagcggcatccccagcaagtttagcggctctggcagcggcaccgacttcaccctgagaatcaacagcgtggaaaccgaggacttcgggatgtacttctgccagcagagcaatagctggccctacacatttggctccggcaccaagctggaaatcaaa

SEQ ID NO: 242 - DNA, 318 bp, Artificial Sequence
  Synthetic Polynucleotides
gacatcgtgatgacacagacccctgccatcatgagcgcctctccaggccagaaagtgaccatcacatgtagcgccagcagcagcgtgaactacatgcactggtatcagcagaagctgggcagcagccccaagctgtggatctacgataccagcaaactggcccctggcgtgccagccagattttctggttctggcagcggcaccagctacagcctgacaatcagcagcatggaagccgaggatgccgccagctacttctgccatcagtggtctagctacccctacacctttggctccggcaccaagctggaaatcaaa

SEQ ID NO: 243 - DNA, 318 bp, Artificial Sequence
  Synthetic Polynucleotides
gacatccagatgacacagagccctagcagcctgtctgccagcgtgggagacagagtgaccatcacctgtagcgccaccagcagcatcagctacatgcactggtatcagcagaagcccggcaaggcccctaaaggctggatctacgataccagcaaactggcccacggcgtgcccagcagattttctggttctggcagcggcaccgacttcaccctgacaatatctagcctccagcctgaggacttcgccacctactactgccaccagagaagaagctaccccttcaccttcggccagggcaccaaggtggaaatcaaa

SEQ ID NO: 244 - DNA, 324 bp, Artificial Sequence
  Synthetic Polynucleotides
gacatccagatgacacagagccctagcagcctgtctgccagcgtgggagacagagtgaccatcacatgcaaggccagccagggcttcaacaaatacgtggcctggtatcagcagaagcccggcaaggctcctaagctgctgatctactacaccagcacactccagcctggcgtgcccagcagattttctggctctggcagcggcagagactacaccctgacaatatccagcctccagccagaggacttcgccacctactactgtctccagtacggcaacctgctgtacgcctttggacagggcaccaaggtggaaatcaagaga

SEQ ID NO: 245 - DNA, 336 bp, Artificial Sequence
  Synthetic Polynucleotides
gacatccagctcacacagagcccttctagcctgtctgccagcgtgggcgacagagtgaccatcacatgtagagccagccagagcgtggactacgacggcgacagctacatgaactggtatcagcagaagcccggcaaggcccctaagctgctgatctacgccgccagctatctggaaagcggcgtgccaagcagattttccggctctggcagcggcaccgatttcaccctgacaatatccagcctccagcctgaggacttcgccacctactactgccagcagagccatgaggacccctacacctttggacagggcaccaaggtggaaatcaagaga

SEQ ID NO: 246 - DNA, 321 bp, Artificial Sequence
  Synthetic Polynucleotides
gacatccagatgacacagagccctagcagcctgtctgccagcgtgggagacagagtgaccatcacctgtagagccagccaggacatccggtactacctgaactggtatcagcagaagcccggcaaggcccctaagctgctgatctatgtggcctccagcctccagagcggagtgccttctagattttctggcagcggctccggcaccgagtttaccctgacagtgtctagcttgcagcccgaggacttcgccacctactactgcctgcaagtgtacagcacccctcggacctttggacagggcaccaaggtggaaatcaaa

SEQ ID NO: 247 - DNA, 321 bp, Artificial Sequence
  Synthetic Polynucleotides
gagatcgtgatgacacagagccccgccacactgagtgtgtctccaggcgaaagagccacactgtcctgtagagccagccagagcgtgtccagaaacctggcctggtatcagcagaagcctggacaggctccccggctgttgatctacggcgcttctacaagagccaccggcattcccgccagattttctggctctggcagcggcaccgagttcaccctgacaatcggaagcctccagagcgaggacttcgccgtgtactactgccagcagtacaagacctggcctcggacctttggacagggcaccaacgtggaaatcaaa

SEQ ID NO: 248 - DNA, 321 bp, Artificial Sequence
  Synthetic Polynucleotides
gagatcgtgatgacccctagcagcgccacactgagtgtgtctccaggcgaaagagccacactgtcctgtagagccagccagagcgtgtccagaaacctggcctggtatcagcagaagcctggacaggctccccggctgttgatctacggcgcttctacaagagccaccggcattcccgccagattttctggctctggcagcggcaccgagttcaccctgacaatctctagcctccagagcgaggacttcgccgtgtactactgccaccagtacagcaactggatgtgcagcttcggccagggcaccaagctggaaatcaaa

SEQ ID NO: 249 - DNA, 324 bp, Artificial Sequence
  Synthetic Polynucleotides
gacatccagatgacccagagccccagcagcctgtctgccagcgtgggcgacagagtgaccatcacatgcaaggccagcaagaacatcagaagctacctggcctggtatcagcagaagcccggcaaggcccccaagctgctgatctacagcggcagcacactgcacagcggcgtgcccagcagattttccggctctggcagcggcaccgacttcaccctgaccatctctagcctccagcccgaggacttcgccacctactactgccagcagcaccacgagtaccccctgacattcggccagggcaccaaggtggaaatcaagaga

SEQ ID NO: 250 - DNA, 45 bp, Artificial Sequence
  Synthetic Polynucleotides
ggcggaggcggaagtggaggcggaggatctggcggcggaggctct

SEQ ID NO: 251 - DNA, 45 bp, Artificial Sequence
  Synthetic Polynucleotides
ggaggcggaggaagtggcggcggaggatctgggggaggcggaagc

SEQ ID NO: 252 - DNA, 45 bp, Artificial Sequence
  Synthetic Polynucleotides
ggtggcggtggctcgggcggtggtgggtcgggtggcggcggatct

SEQ ID NO: 253 - DNA, 45 bp, Artificial Sequence
  Synthetic Polynucleotides
ggcggcggaggatctggcggaggcggatctgggggcggaggctct

SEQ ID NO: 254 - DNA, 45 bp, Artificial Sequence
  Synthetic Polynucleotides
ggcggtggcggttcaggtggagggggaagcggtggtggtggctca

SEQ ID NO: 255 - DNA, 45 bp, Artificial Sequence
  Synthetic Polynucleotides
ggcggcggaggctcaggcggaggcggatctggcgggggaggatct

SEQ ID NO: 256 - DNA, 105 bp, Artificial Sequence
  Synthetic Polynucleotides
ggaggtagcggctccgggggaggcggaagtggaggcggaggatctgggtctggaggaagcggatctggaggctcagggtcagggggctcaggcagtggaggctct

SEQ ID NO: 257 - DNA, 105 bp, Artificial Sequence
  Synthetic Polynucleotides
ggaggaggcggctccgggggaggcggaagtggaggcggaggatctgggtctggaggaagcggatctggaggctcagggtcagggggctcaggcagtggaggctct

SEQ ID NO: 258 - DNA, 75 bp, Artificial Sequence
  Synthetic Polynucleotides
agcagcgccgacgacgccaagaaggacgccgccaaaaaggatgatgccaagaaagacgatgctaaaaaagacggc

SEQ ID NO: 259 - DNA, 351 bp, Artificial Sequence
  Synthetic Polynucleotides
gaagttcagctggttcagtctggcgccgaagtgaagaagcctggcgagtctctgaccatctcctgcaaggccagcggctacagcttccccaactactggatcacctgggtccgacagatgtccggtggtggccttgagtggatgggcagaatcgatcccggcgactcctacaccacctacaatcctagcttccagggccacgtgaccatcagcatcgacaagagcaccaacaccgcctacctgcactggaacagcctgaaagccagcgacaccgccatgtactactgcgcccggtactatgtgtccctggtggacatttggggccagggcacactggtcacagtgtctagt

SEQ ID NO: 260 - DNA, 372 bp, Artificial Sequence
  Synthetic Polynucleotides
gaagtgcaactggtggaatctggcggcggactggttaagcctggcggatctctgagactgtcttgtgccgccagcggcttcaccttcagcaatgcctggatgagctgggttcgacaggcccctggaaaaggactggaatgggtcggattcatccggtccaaagcctacggcggcaccacagaatatgccgcctctgtgaagggcagattcaccatcagccgggacgacagcaagtctatcgcctacctccagatgaacaacctgaaaaccgaggacaccgccgtgtactactgcgccagagatggcctgtacagcagctcttggtacgacagcgattactggggccagggcacactggtcacagtgtcatct

SEQ ID NO: 261 - DNA, 378 bp, Artificial Sequence
  Synthetic Polynucleotides
caaatgcaactggttcaaagcggcggtggcctggtgcaacctggaagaagtctgagactgagctgtgccgccagcggcttcaccttcgatgattacgccatgcactgggtccgacaggcccctggaaaaggactggaatgggtgtccggcatctcctggaatagcggctctatcggctacgccgacagcgtgaagggcagattcaccatcagccgggacaacgccaagaacagcctgtacctccagatgaactccctgagagccgaggatacagccctgtactactgcgccaaggacatccacagcggcagctactacggcctgctgtactacgctatggacgtgtggggccagggcacaaccgtgacagtttcttct

SEQ ID NO: 262 - DNA, 375 bp, Artificial Sequence
  Synthetic Polynucleotides
gggggaggcggctctcaggtgcaactccagcagtctggcgctgagcttgtgaagcctggggccagcgtgaagattagctgcaaggccagcggctacgccttcagcagctactggatgaactgggtcaagcagcggcctggcaagggcctggaatggatcggccaaatctaccccggcgacggcgacaccacctacaacggcaagttcaagggcaaggccaccctgacagccgacaagagcagcagcaccgtgtacatgcaactgaacagcctgaccagcgaggacagcgccgtgtacttctgcgtgcggtactactacggcagctccggctacttcgactattggggccagggcaccacactgaccgtgtcctct

SEQ ID NO: 263 - DNA, 360 bp, Artificial Sequence
  Synthetic Polynucleotides
gctctccagctccagcagtctggcgcagaactcgtgcggcctggcgcttctgtgaccctgagctgtaaagccagcggctacaccttcaccgactacgagatgcactgggtcaagcagacccctgtgcacggcctggaatggatcggagccatcgaccctgagacaggcggcaccgcctacaaccagaagttcgagggcaaggccatcctgaccgccgacaagagcagcagcacagcctacatggaactgcggagcctgacctccgaggacagccccgtgtactactgtgccagacggcggtactacggcagcagctccttcgactattggggccagggcaccaccctgaccgtgtctagt

SEQ ID NO: 264 - DNA, 369 bp, Artificial Sequence
  Synthetic Polynucleotides
gaagtgcagctggtggagtctgggggaggcttggtccagcctggggggtccctgagactctcctgttcagcctctggattcacctttagtagctttggaatgcactgggtccgccaggctccagggaaggggctggaatgggtggcctacattagtagtggcagtagtaccatctactatggagacaccgtgaagggccgattcaccatctccagagacaacgccaagaactcactgtttctgcaaatgagcagcctgagagccgaggacacggccgtgtattattgtgcgagagaggggggatattactacggaaggagttactatactatggactactggggccaagggaccacggtcaccgtctcc

SEQ ID NO: 265 - DNA, 354 bp, Artificial Sequence
  Synthetic Polynucleotides
caagttcagctggttcagagcggagccgaagtgaagaaacctggggcctctgtgaaggtgtcctgcaaggcttccggctacacctttaccgattactacatgcactgggtccgacaggctcccggccaaagacttgaatggatgggctggatcaaccccaacagcggcggcacaaattacgcccagaagttccaggaccggatcaccgtgaccagagacaccagctccaacaccggctacatggaactgacccggctgagatccgatgacaccgccgtgtactactgcgctagaagcccttactccggcgtgctggataagtggggacagggcacactggtcaccgtgtcatct

SEQ ID NO: 266 - DNA, 351 bp, Artificial Sequence
  Synthetic Polynucleotides
gaagttcaactggttcagagcggagccgaagtgaagaagcctggcgagagcctgaagattagctgcaaaggcagcggctacgacttcaccacctactggatcggctgggtccgacagatgcctggcaaaggactggaatggatgggcatcatctaccccggcgacagcgacaccagatacagccctagcgttagaggccgcgtgaccatcagcgccgacaagtctatcaacaccgcctacctccagtggtccagcctggaagcctctgacaccgccatgtactactgcgccagaatgtggaccttcagccaggatggatggggccagggaacactggtcacagtgtcatct

SEQ ID NO: 267 - DNA, 351 bp, Artificial Sequence
  Synthetic Polynucleotides
caggtgcagctggtgcagtctggccccgaagtgaagaaacccggcgagtccgtgaagatcagctgcaaggccagcggctacaccttccggcactacagcatgaactgggtcaagcaggccccaggccagggcctgaagtggatgggcagaatcaacaccgagagcggcgtgcccatctacgccgacgacttcaagggccggttcagcttcaccgtggacaccagcgccagcaccgcctacctggaaatctccagcctgaccagcgaggataccgccgtgtatttctgctccaacgactacctgtacagcctggatttctggggccagggaaccaccctgacagtgtcctct

SEQ ID NO: 268 - DNA, 363 bp, Artificial Sequence
  Synthetic Polynucleotides
caggtgcagctggtccagagcggcgccgaagtgaagaagcccggcagctccgtgaaagtgagctgcaaggccagcggcggcaccttcagcaactactggatgcactgggtgaggcaggcccccggacagggcctggagtggatgggcgccacctacaggggccacagcgacacctactacaaccagaagttcaagggccgggtgaccatcaccgccgacaagagcaccagcaccgcctacatggaactgagcagcctcaggagcgaggacaccgctgtgtattactgcgccaggggcgccatctacgacggctacgacgtgctggacaactggggccagggcacactggtgaccgtgtccagc

SEQ ID NO: 269 - DNA, 375 bp, Artificial Sequence
  Synthetic Polynucleotides
cttgaaatggctcaggtgcagctggtgcagagcggagccgaagtgaagaaacctggcagcagcgtgaaggtgtcctgcaaagcttctggcggcaccttcagcagctacgccatctcttgggttcgacaggcccctggacaaggactggaatggatgggcagaatcatccccatcctgggaatcgccaactacgcccagaaattccagggcagagtgacaatcaccgccgacaagagcaccagcaccgcctacatggaactgagcagcctgagaagcgaggacaccgccgtgtactattgtgcaagaggcggctactacagccacgacatgtggagcgaagattggggccagggcacactggtcacagtgtcatct

SEQ ID NO: 270 - DNA, 351 bp, Artificial Sequence
  Synthetic Polynucleotides
caagttcagctggtgcagtctggctccgagctgaagaaacctggcgagtccgtgaagatcagctgcaaggccagcggctacaccttcaccgactacagcatcaactgggtcaagcaggcccctggacagggactgaaatggatgggctggatcaacaccgagacaagagagcccgcctacgcctacgacttcagaggcagattcgtgttctccctggacaccagcgccagcacagcctatctccagatcagctctctgaaggccgaggataccgccgtgtacttctgcgccctggactacagctacgctatggactattggggccagggcaccctggtcacagtctcttct

SEQ ID NO: 271 - DNA, 351 bp, Artificial Sequence
  Synthetic Polynucleotides
caagttcaactggtgcagagcggctccgagctgaagaaacctggcgagtccgtgaagattagctgcaaggccagcggctacaccttcacacactacagcatgaactgggtccgacaggctccaggccaaggactggaatggatgggcagaatcaacaccgagacaggcgagcccctgtacgccgacgatttcaagggcagattcgtgttcagcctggacaccagcgccagcacagcctatctccagatcagctctctgaaggccgaggacaccgccgtgtattattgcagcaacgactacctgtactccctggactattggggccagggcacactggtcacagtgtctagt

SEQ ID NO: 272 - DNA, 354 bp, Artificial Sequence
  Synthetic Polynucleotides
caggtgcagctggtgcagtctggcgctgaagtgaagaaacctggggccagcgtgaaggtgtcctgcaaggccagcggctacacctttgccagccagtggatgcactggatgagacaggcccctggacagggcctggaatggatcggctggatcaaccccggcaacgtgaacaccaagtacaacgagaagttcaagggcagagccaccctgacagtggacaccagcaccaacaccgcctacatggaactgagcagcctgcggagcgaggacaccgccgtgtattattgcgccagaagcacctggtacagacccctggattattggggccagggaacccttgtgaccgtgtcctct

SEQ ID NO: 273 - DNA, 360 bp, Artificial Sequence
  Synthetic Polynucleotides
gaagtgcagctggtgcagtctggggccgaagtgaagaagcctggcgagagcctgaagatcagctgcaagggcagcggctacagcttcaccgactactacatgaagtgggccagacagatgcccggcaagggcctggaatggatgggcgacatcatccccagcaacggggccaccttctacaaccagaaattcaagggccaagtgaccatctccgccgacaagagcatcagcaccacctacctccagtggtccagcctgaaggccagcgacaccgccatgtactattgcgccagaagccatctgctgcgggccagttggttcgcctattggggccagggaacaatggtcacagtgtccagc

SEQ ID NO: 274 - DNA, 354 bp, Artificial Sequence
  Synthetic Polynucleotides
cagattcagctggtgcagtctggccccgagctgaagaaacctggcgagacagtgaagatcagctgcaaggccagcggctacatcttcaccaattacggcatgaactgggtcaagcaggcccctggcaagagcttcaagtggatgggctggatcaacacctacaccggcgagagcacatacagcgccgacttcaagggcagattcgccttcagcctggaaaccagcgccagcacagcctacctgcacatcaacgacctgaagaacgaggacaccgccacctacttttgcgccagaagcggcggctacgaccctatggattattggggccagggcaccagcgtgaccgtttcttct

SEQ ID NO: 275 - DNA, 360 bp, Artificial Sequence
  Synthetic Polynucleotides
gaagtgcaactggttcagagcggagccgagctgaagaaacctggggccagcgtgaaggtgtcctgtaaagccagcggctacacctttaccgactactacatgaaatgggtccgacaggccccaggccagggactcgaatggatcggcgatattatccccagcaacggggccaccttctacaaccagaaattcaagggccgcgtgaccatcaccgtggacaagagcacaagcaccgcctacatggaactgagcagcctgagaagcgaggacaccgccgtgtattattgcgccagaagccatctgctgcgggccagttggttcgcctattggggacagggaaccctggtcaccgttagctct

SEQ ID NO: 276 - DNA, 360 bp, Artificial Sequence
  Synthetic Polynucleotides
caagtgcaactggttcagagcggagccgagctgaagaaacctggggccagcgtgaaggtgtcctgtaaagccagcggctacacctttaccgactactacatgaaatgggtccgacaggccccaggccagggactcgaatggatcggcgatattatccccagcaacggggccaccttctacaaccagaaattcaagggccgcgtgaccatcaccgtggacaagagcacaagcaccgcctacatggaactgagcagcctgagaagcgaggacaccgccgtgtattattgcgccagaagccatctgctgcgggccagttggttcgcctattggggacagggaaccctggtcaccgttagctct

SEQ ID NO: 277 - DNA, 354 bp, Artificial Sequence
  Synthetic Polynucleotides
gaagttcaactggttcagagcggagccgaagtgaagaagcctggcgagagcctgaagattagctgcaaaggctccggctactccttcaccagctactggatctcttgggtccgacagatgcccggcaaaggactggaatggatgggcatcatcgaccccagcgacagcgacaccagatacagccctagcttccagggccaagtgaccatcagcgccgacaagagcatcagcacagcctacctccagtggtcctctctgaaggccagcgataccgccatgtactattgcgccagaggcgacggcagcaccgacctggattattggggacagggaaccctggtcaccgtgtctagt

SEQ ID NO: 278 - DNA, 354 bp, Artificial Sequence
  Synthetic Polynucleotides
caagtgcagctccaagaatctggccctggcctggtcaagcctagcgagacactgagcctgacctgtaccgtgtccggctttagcctgaccacctacgacgtgcactgggtccgacaacctccaggcaaaggactggaatggatgggcagaatccagaacgccggcatcaccgactacaatagcgccctgaagtcccggctgattatctccagagacaccagcaagagccaggtgttcctgaagatgaacagcgtgaccaccgccgacaccgccatgtacttttgtgccaagaccggcagctacttctacgccttcgatcactggggccagggcacactggttaccgtttcttct

SEQ ID NO: 279 - DNA, 357 bp, Artificial Sequence
  Synthetic Polynucleotides
caagttcagctgcaagagtctggccccacactggtcaagcctggcgatagcgtgaagatgagctgcaaggccagcggctacacctttaccgactacatcatccactgggtcaagcagagccacggcaagagcctggaatggatcggctacatcaacccttacagcgacggcaccaactacaacgagaagttcaagagcaaggccacactgaccgtggacaagagcaccagcacagcctacatggaattttcccggctgacctccgaggacagcgccatctatttctgcgccctgaactacggcagctactacgctatggatgcctggggccagggcacaagcgtgacagtttcttct

SEQ ID NO: 280 - DNA, 357 bp, Artificial Sequence
  Synthetic Polynucleotides
gaagttcagctccttgagagtggtggcggcctggttcaacctggcggatctctgagactgtcttgtgccgccagcggcttcacctttagcggctattggatgcactgggtccgacaggcccctggcaaaggacttgaatgggtgtccgccatcagaagcgacggcagcagcaagtactacgccgactctgtgaagggcagattcaccatcagccgggacaacagcaagaacaccctgtacctccagatgaacagcctgagagccgaggacacagccgtgtattattgcgccaaggacggcgtgatcgaggacacctttgattactggggccagggcaccctggtcaccgtttcttct

SEQ ID NO: 281 - DNA, 345 bp, Artificial Sequence
  Synthetic Polynucleotides
caagttcaactgcaacagcctggggccgagcttgttagacctggcgcttctgtgaagctgagctgcaaggccagcggctacaccttcaccagctactggatgaactgggtcaagcagcggcctgaccagggcctcgaatggatcggcagaatcgacccctacgacagcgagacacactacaaccagaagttcaaggacaaggccatcctgaccgtggacaagagcagctccaccgcctacatgcaactgagcagcctgacctctgaggatagcgccgtgtactattgcgccagaggcaactgggacgactattggggccagggcacaaccctgacagtgtctagt

SEQ ID NO: 282 - DNA, 357 bp, Artificial Sequence
  Synthetic Polynucleotides
caagtgcagctccaagagtctggccccacactggtcaatcctggcgacagcgtgaagatgagctgcaaggccagcggctacacctttaccgaccacatcatccactgggtcaagcagagccacggcaagagcctggaatggatcggctacatcaacccctatagcggcggagccaactacaacggcaagttcaagagcaaggccacactgacaatcgacaagagcagcagcaccgcctacatggaattttccagactgaccagcggcgactccgccatctactactgcgccctgaattacggcagctactacgctatggatgcctggggccagggcacaagcgtgacagtttcttct

SEQ ID NO: 283 - DNA, 357 bp, Artificial Sequence
  Synthetic Polynucleotides
gaagtgcagctcgttgagtctggtggcggactggttcagcctggaagaagcctgaagctgagctgtgccgccagcggcttcaccttcagcgactacaatatggcctgggtccgacaggcccctaagaaaggactggaatgggtcgccaccatcctgtacgatggcggcagaacctactaccggggcagcgtgaagggcagattcaccatcagcagagacaacgccaagagcaccctgtacctgcggatggactctctgagaagcgaggataccgccacatattactgtgccacacacagccggggcaccgactactttgattattggggccagggcgtgatggttaccgtgtctagt

SEQ ID NO: 284 - DNA, 363 bp, Artificial Sequence
  Synthetic Polynucleotides
gaagtgaagctgcaagagtctggccccagcctggtgcagagtagccaaacactgagcctgacctgtaccgtgtccggctttagcctgaccagctaccacatccactgggtccgacagacccctggcaaaggactggaatggatgggcgtgatgtggagcgacggcgacaccagctataacagcgccctgaagtcccggctgagcatcagcagagatacaagccagagccaggtgttcctgaagatgaacagcctccagaccgaggacaccgccacctactattgtgccagaggctactacagcagctacctgtacctttggttcgcctattggggccagggcaccctggttacagtcagctct

SEQ ID NO: 285 - DNA, 375 bp, Artificial Sequence
  Synthetic Polynucleotides
caggttcagctccagcagtctggacccgagcttagaaggccaggatctagcgtcagactgagctgcaaggccagcggctaccggatcaaggacttcctgatccactggattaagaacagacccgagcacggcctggaatggatcggatggattgaccctgaggacggcgagactaagtacgcccagaagttccagaccaaggccacactgaccgccgacacctctagcaacaccgcctacatgcaactgagcagcctgaccagcgaggacaccgccacctacttttgtgctagatggggcgacgtgtactacggcctgatgagaggccatgtgatggatgcctggggccagggaacaagcgtgacagtctcttct

SEQ ID NO: 286 - DNA, 366 bp, Artificial Sequence
  Synthetic Polynucleotides
caggtgcaactccagcagtccggaagcgagcttatgatgccaggggcatcagtgaagatcagctgcaaggctactggctacaccttctctaattactggatagagtgggttaaacaaaggccagggcacggcctggaatggatcggcgagatcctgcctgggacaggccgaaccatttataacgagaagttcaaaggcaaggctactttcaccgcagatataagctctaatacagtgcaaatgcagctctcttccctgacaagtgaggatagtgccgtgtattattgcgcacgaagagattactatggaaatttttattacgctatggattattggggtcaaggaacaagtgtgaccgttagcagc

SEQ ID NO: 287 - DNA, 354 bp, Artificial Sequence
  Synthetic Polynucleotides
gaagtgcaactccagcagagcggccctgagcttgtgaagcctggcgcttccgtgaagatgagctgcaaggccagcggctacaccttcaccgactactacatgaagtggatgaagcagagccacggcaagtccctggaatggatcggcgacatcaaccccaacaacggcggcaccacctacaaccagaagttcaagggcaaggccaccctgaccgtggacaagagcagcagcaccgcctacatgcaactgaacagcctgaccagcgaggacagcgccgtgtactactgcgccagagactacggctacggctatttcgactactggggccagggcacaaccctgacagtgtcctct

SEQ ID NO: 288 - DNA, 363 bp, Artificial Sequence
  Synthetic Polynucleotides
gaagtgcaactccagcagagcggccctgagctgattaagcctggggccagcgtgaagatgagctgcaaggccagcggctacaccttcaccagctacgtgatgcactgggtcaagcagaagcccggccagggcctggaatggatcggctacatcaacccctacaacgatggcaccaagtacaacgagaagttcaagggcaaggccaccctgaccagcgacaagagcagcagcaccgcctacatggaactgagcagcctgacaagcgaggacagcgccgtgtactattgcgccagaggcacctactactacggcagccgggtgttcgactattggggccagggcaccacactgaccgtgtcctct

SEQ ID NO: 289 - DNA, 360 bp, Artificial Sequence
  Synthetic Polynucleotides
caggtgcagctccaggaatctggccctggcctcgtgaagcctagccagaccctgagcctgacctgtaccgtgtctggcggcagcatcagcacaagcggcatgggcgtgggctggatcagacagcaccctggcaagggcctggaatggatcggccacatttggtgggacgacgacaagcggtacaaccccgccctgaagtccagagtgaccatcagcgtggacaccagcaagaaccagttcagcctgaagctgagcagcgtgacagccgccgataccgccgtgtattattgcgcccggatggaactgtggtcctactacttcgactactggggccagggaaccctcgtgaccgtgtctagt

SEQ ID NO: 290 - DNA, 360 bp, Artificial Sequence
  Synthetic Polynucleotides
caggtgcagctccaggaatctggccctggcctcgtgaagcctagtcagaccctgagcctgacctgtaccgtgtctggcggcagcatcagcacaagcggcatgggcgtgggctggatcagacagcaccctggcaagggcctggaatggatcggccacatttggtgggacgacgacaagcggtacaaccccgccctgaagtccagagtgaccatcagcgtggacaccagcaagaaccagttcagcctgaagctgagcagcgtgacagccgccgataccgccgtgtattattgcgcccggatggaactgtggtcctactacttcgactactggggccagggaaccctcgtgaccgtgtctagt

SEQ ID NO: 291 - DNA, 372 bp, Artificial Sequence
  Synthetic Polynucleotides
caggtacagctccaacagtcaggggccgagctggtacgcccagggtccagcgtcaaaatatcatgtaaggcatctggctacgccttcagctcttactggatgaattgggtgaaacaacggccaggccagggactggagtggattggtcaaatttggccaggagacggggacacaaattacaacggaaaattcaagggaaaggccacacttaccgccgatgaaagtagttcaaccgcttatatgcagctgtcctccctcgcttctgaggactctgctgtgtacttttgcgcacgccgagaaaccaccactgtgggaagatactactacgctatggattattggggacagggcacaaccgtgaccgttagcagt

SEQ ID NO: 292 - DNA, 360 bp, Artificial Sequence
  Synthetic Polynucleotides
gaggtgaaactgcaggagtcaggacctggcctggtggcgccctcacagagcctgtccgtcacatgcactgtctcaggggtctcattacccgactatggtgtaagctggattcgccagcctccacgaaagggtctggagtggctgggagtaatatggggtagtgaaaccacatactataattcagctctcaaatccagactgaccatcatcaaggacaactccaagagccaagttttcttaaaaatgaacagtctgcaaactgatgacacagccatttactactgtgccaaacattattactacggtggtagctatgctatggactactggggtcaaggaacctcagtcaccgtctcctca

SEQ ID NO: 293 - DNA, 357 bp, Artificial Sequence
  Synthetic Polynucleotides
gtgaaactgcaggagtcaggacctggcctggtggcgccctcacagagcctgtccgtcacatgcactgtctcaggggtctcattacccgactatggtgtaagctggattcgccagcctccacgaaagggtctggagtggctgggagtaatatggggtagtgaaaccacatactataattcagctctcaaatccagactgaccatcatcaaggacaactccaagagccaagttttcttaaaaatgaacagtctgcaaactgatgacacagccatttactactgtgccaaacattattactacggtggtagctatgctatggactactggggccaaggaacctcagtcaccgtctcctca

SEQ ID NO: 294 - DNA, 360 bp, Artificial Sequence
  Synthetic Polynucleotides
caggtgcaactccaggaatctggccctggcctcgtgaagcccagcgagacactgagcctgacctgtaccgtgtccggcgtgtccctgcctgactatggcgtgtcctggatcagacagccccctggcaagggcctggaatggatcggagtgatttggggcagcgaaaccacctactacaacagctccctgaagtccagagtgaccatctccaaggacaactccaagaaccaggtgtccctgaagctgagcagcgtgacagccgccgacaccgccgtgtattactgcgccaagcactactactacggcggcagctacgctatggactactggggccagggaaccctcgtgaccgtgtctagt

SEQ ID NO: 295 - DNA, 363 bp, Artificial Sequence
  Synthetic Polynucleotides
gaagtgcagctcgttgagtctggtggcggactggttcaacctggcggaagcctgagactgtcttgtgccgccagcggcttcaccttcagcagctcttggatgaactgggtccgacaggcccctggcaaaggactggaatgggtcggaagaatctaccccggcgacggcgacaccaactacaacggcaagttcaagggcagattcaccatcagccgggacgacagcaagaacagcctgtacctgcagatgaactccctgaaaaccgaggacaccgccgtgtactactgtgccagatccggcttcatcaccaccgtgctggacttcgattattggggccagggcaccctggtcaccgtttcttct

SEQ ID NO: 296 - DNA, 363 bp, Artificial Sequence
  Synthetic Polynucleotides
gaagtgcaactggttcagagcggagccgaagtgaagaagcctggcgagagcctgaagattagctgcaaaggctccggctacagcttcagcagctcttggatcggctgggtccgacagatgcctggcaaaggactggaatggatgggcatcatctaccccgacgacagcgacaccagatacagccctagcttccagggccaagtgacaatcagcgccgacaagagcatcagaaccgcctacctccagtggtcctctctgaaggccagcgataccgccatgtactactgcgccagacacgtgaccatgatctggggagtgattatcgacttctggggccagggaaccctggtcacagtctcttct

SEQ ID NO: 297 - DNA, 363 bp, Artificial Sequence
  Synthetic Polynucleotides
gaagtgcaactggttgaatctggcggcggactggttaagcctggcggatctctgaagctgagctgtgccgccagcggctacacctttaccagctacgtgatgcactgggtccgacaggcccctggcaaaggacttgagtggatcggctacatcaacccctacaacgatggcaccaagtacaacgagaagttccagggcagagtgaccatcagctccgacaagagcatcagcaccgcctacatggaactgagcagcctgagaagcgaggataccgccatgtactattgcgccagaggcacctactactacggcaccagagtgttcgactactggggccagggaaccctggtcacagtctcttct

SEQ ID NO: 298 - DNA, 369 bp, Artificial Sequence
  Synthetic Polynucleotides
caggtgcagctggttgaatctggcggcggacttgttgagcctggcggatctctgagactgagctgcatgagcggctacgccttcagcagctactggatgaactgggtccgacagatgcccggcaaaggactggaatggatgggccagatttggcctggcgacggcgataccaactacaaccccagcctgaagtccagagtgaccatcaccgccgatgagagcaccagcaccgcctacatggaactgtctagcctgaaggccgaggatacagccgtgtacttctgcgccagacgggaaaccacaaccgtgggcagatattactacgctatggactactggggccagggcaccctggttacagtctcttct

SEQ ID NO: 299 - DNA, 360 bp, Artificial Sequence
  Synthetic Polynucleotides
caggtgcaactggttgagtctggcggcggacttgttgaacctggcggaagcctgagactgagctgcatgagcggctacgcctttagcagctcctggatgaactgggtccgacagatgcctggcaaaggactggaatggatgggcagaatctaccccggcgacggcgacaccaactacaacggcaagttcaaagaacgggtcaccatcaccgccgacgagagcacaagcaccgcctacatggaactgagcagcctgaaggccgaggataccgccgtgtacttctgcgccagaagcgagtattggggcaactactgggctatggactactggggccagggcacactggtcacagtgtctagc

SEQ ID NO: 300 - DNA, 363 bp, Artificial Sequence
  Synthetic Polynucleotides
caggtgcaactggttgaatcaggcggaggactggtggaacctggcggatctctgagactgagctgtatgagcggctacgccttcagcagctactggatgaactgggtccgacagatgcccggcaaaggactggaatggatgggccaaatctaccccggcgacggcgacaccaactacaacggcaagttcaagggcagagtgacaatcaccgccgacgagagcacaagcaccgcctacatggaactgagcagcctgaaggccgaggataccgccgtgtacttctgcgccagaaagaccatcagcagcgtggtggatttctacttcgacaactggggccagggcaccctggtcacagtttcttct

SEQ ID NO: 301 - DNA, 360 bp, Artificial Sequence
  Synthetic Polynucleotides
caagttcagctggaacaacctggcgctgaggtggtcaaaccaggggcctctgtgaaggtgtcctgcaagacaagcggctacacattcaccagcaactggatgcactgggtcaagcagacccctggcaaaggactggaatggatcggcgagatcgaccccagcgactcctacaccaactacaaccagaagttcgacggcaaggccaagctgaccgtggacaagtctagcagcaccgcctacatggaagtgtccgatctgaccgccgaagatagcgccacatattactgcgccagaggcagcaacccctactactacgctatggactattggggccagggcaccagcgtgacagtctcttct

SEQ ID NO: 302 - DNA, 363 bp, Artificial Sequence
  Synthetic Polynucleotides
caagttcagcttcaacagcctggcgctgagctggtcaaacctggcgcttctgtgaagatgagctgcaaagccagcggctacgccttcagcagctactggatcaactggatgaagcagaaacccggccagggactcgaatggatcggccaaatctatcccggcgacggcgacaccaactacaacggcaagttcaagggcagagccacactgaccgccgatacctctagcagcacagcctacatgcagctgagcagcctgaccagcgaagatagcgccgtgtacttctgtgcccggtccatcacaacagtcgtgggctgcgctatggactattggggccagggaacaagcgtgaccgtgtctagt

SEQ ID NO: 303 - DNA, 372 bp, Artificial Sequence
  Synthetic Polynucleotides
caggtgcagctgcagcagagcggcgccgaggtgaagaagcccggcagcagcgtgaaggtgagctgcaaggccagcggctacgccttcagcagctactggatgaactgggtgagacagagacccggccagggcctggagtggatcggccagatttggcccggcgacggcgacaccaactacaacggcaagttcaagggcagagccaccatcaccgccgacgagagcaccaacaccgcctacatggagctgagcagcctgagaagcgaggacaccgccttctacagctgcgccagaagagagaccaccaccgtgggcagatactactacgctatggactactggggccagggcaccaccgtgaccgtgagcagc

SEQ ID NO: 304 - DNA, 366 bp, Artificial Sequence
  Synthetic Polynucleotides
gaagtgcagctggtggaatcaggcggcggactggtgcagcctggcagaagcctgagactgagctgtgccgccagcggcttcaccttcaacgactacgccatgcactgggtgcgccaggcccctggaaaaggactggaatgggtgtccacaatcagctggaacagcggcagcatcggctacgccgatagcgtgaagggccggttcaccatcagccgggacaacgccaagaagtccctgtacctccagatgaacagcctgcgggccgaggacacagccctgtactattgcgccaaggacatccagtacggcaactactactacggcatggacgtgtggggccagggaaccaccgtgaccgtgtcatct

SEQ ID NO: 305 - DNA, 357 bp, Artificial Sequence
  Synthetic Polynucleotides
caggtgcaactggtgcagagcggagccgaagtgaaaaagcccggcagcagcgtgaaggtgtcctgcaaggccagcggctacgccttcagctactcctggatcaactgggtgcgccaggcccctggacagggcctggaatggatgggcagaatcttccccggcgacggcgacaccgactacaacggcaagttcaagggcagagtgaccatcaccgccgacaagagcaccagcaccgcctacatggaactgagcagcctgcggagcgaggataccgccgtgtactattgtgccagaaacgtgttcgacggctactggctggtgtactggggccagggaacacttgtgaccgtgtccagc

SEQ ID NO: 306 - DNA, 366 bp, Artificial Sequence
  Synthetic Polynucleotides
gaagttcagcttcagcagagcggagccgagctgaagaaacctggcgcttctgtgaaggtgtcctgcaaggccagcggctacacctttaccagctacaacatgcactgggtcaagcagaccccaggccagggactcgaatggatcggagccatctatcccggcaacggcgacacctcctacaaccagaagttcaagggcaagaccacactgaccgccgacaagagcagctccaccgcctacatggaactgagcagcctgagatccgaggataccgccgtgtactactgcgccagaagcaactactacggcagctcctactggttcttcgacgtgtggggcaccggcacaaccgtgacagtttcttct

SEQ ID NO: 307 - DNA, 375 bp, Artificial Sequence
  Synthetic Polynucleotides
gaagtgcaactggttcaatcaggtggcggcctggttcaccctggcggatctctgagactgtcttgtaccggcagcggcttcaccttcagctaccacgccatgcactgggtccgacaggcacctggaaaaggactggaatgggtgtccatcatcggcacaggcggcgtgacctactacgccgattctgtgaagggcagattcaccatcagccgggacaacgtgaagaacagcctgtacctccagatgaactccctgagagccgaggatatggccgtgtattattgcgccagagactactacggcgctggcagcttttacgacggcctgtacggaatggatgtgtggggccagggaaccaccgtgactgtctcttct

SEQ ID NO: 308 - DNA, 369 bp, Artificial Sequence
  Synthetic Polynucleotides
gctgtgcagctcgttgagtctggcggaggacttgttcagcctggcagatccctgagactgtcttgtgccgccagcggcttcaccttcggcgattacacaatgcactgggtccgacaggcccctggcaaaggacttgaatgggtgtccggcatctcctggaacagcggctctatcggctacgccgattccgtgaagggcagattcaccatcagccgggacaacgccaagaacagcctgtacctccagatgaactccctgagagccgaggacacagccctgtactattgcaccaaggacaaccagtacggctccggcagcacatacggacttggagtttggggccagggcaccctggttacagtctcttct

SEQ ID NO: 309 - DNA, 366 bp, Artificial Sequence
  Synthetic Polynucleotides
gaagtgcagcttgttgaatctggcggcggactggttcagcctggcggatctctgagactgtcttgtgccgccagcggctacaccttcaccagctacaatatgcactgggtccgacaggcccctggcaaaggacttgaatgggtcggagccatctatcccggcaacggcgacacctcctacaaccagaagttcaagggcagattcaccatcagcgtggacaagagcaagaacaccctgtacctccagatgaactccctgagagccgaggacaccgccgtgtactattgtgccagagtggtgtactacagcaacagctactggtacttcgacgtgtggggccagggaaccctggtcacagtttcttct

SEQ ID NO: 310 - DNA, 363 bp, Artificial Sequence
  Synthetic Polynucleotides
caggttcagctccagcagtctggggccgaagtgaagaaacctggcagctccgtgaaagtgtcctgcaaggccagcggctacacctttaccagctacaacatgcactgggtcaagcaggcccctggacagggactcgaatggatcggagccatctatcccggcaacggcgacacctcctacaaccagaagttcaagggcaaagccacactgaccgccgacgagagcacaaacaccgcctacatggaactgagcagcctgagaagcgaggacaccgccttctactactgtgcccggtctacctactacggcggcgactggtactttgacgtgtggggccagggaaccaccgtgacagtttcttct

SEQ ID NO: 311 - DNA, 384 bp, Artificial Sequence
  Synthetic Polynucleotides
cagattcagctggtgcagtctggcagcgagctgaagaaacctggggcctctgtgaaggtgtcctgcaaggcttccggctacacctttaccaacttcggcgtgaactgggtccgacaggcccctggaaaaggactggaatggatgggctggatcaacacctacaccggcgagcctagctacgcccagggctttacaggcagattcgtgttcagcctggacgcctctgtgtctaccgcctacctccagatcagctccctgaaagccgaggacaccgccacctatttctgcaccagacggaccaactactacgggacctcctactactacgctatggactactggggccagggcaccaccgtgacagtgtctagcgccaagacaacc

SEQ ID NO: 312 - DNA, 360 bp, Artificial Sequence
  Synthetic Polynucleotides
caggcttatctgcaacagagcggagccgaactcgtcagacctggcgcttctgtgaagatgagctgcaaggccagcggctacaccttcaccagctataatatgcactgggtcaagcagacccctcggcagggactcgaatggatcggcggaatctatcccggcaacggcgacacctcctacaaccagaagttcaagggcaaagccacactgaccgtgggcaagagcagcagcaccgcctatatgcagctcagcagcctgaccagcgaggacagcgccgtgtacttctgcgccagatacgactacaactacgctatggactactggggccagggcaccagcgtgacagttagctctgccagc

SEQ ID NO: 313 - DNA, 366 bp, Artificial Sequence; identical to SEQ ID NO: 309
  Synthetic Polynucleotides

SEQ ID NO: 314 - DNA, 366 bp, Artificial Sequence
  Synthetic Polynucleotides
caggtgcaactggtgcagtctggggccgaagtgaagaaacctggggcctctgtgaaggtgtcctgcaaggcttccggctacacctttaccagctacaatatgcactgggtccgacaggctcccggccagagacttgaatggatcggagccatctatcccggcaacggcgacacctcctacaaccagaaattcaagggccgcgtgaccgtgaccagagacacatctgccaacaccgcctacatggaactgtctagcctgaagtccgaggacaccgccgtgtactactgtgccagaagccactacggcagcaactacgtggactacttcgactactggggccagggcacactggtcacagtctcttct

SEQ ID NO: 315 - DNA, 366 bp, Artificial Sequence
  Synthetic Polynucleotides
gaggtgcagcttgttgagtctggcggaggactggtgcagcccgatagaagcctgagactgtcttgtgccgccagcggcttcaccttccacgattatgccatgcactgggtccgacaggcccctggcaaaggacttgaatgggtgtccaccatctcttggaacagcggcacaatcggctacgccgactctgtgaagggcagattcaccatcagccgggacaacgccaagaacagcctgtacctccagatgaactccctgagagccgaggacacagccctgtactactgcgccaaggacatccagtacggcaactactactacggcatggacgtgtggggccagggcacaacagtgacagtctcttct

SEQ ID NO: 316 - DNA, 363 bp, Artificial Sequence
  Synthetic Polynucleotides
gaagttcagctggttcagagcggagccgaagtgaagaagccaggcgagagcctgaagctgagctgcaaaggcagcggcagaaccttcaccagctacaacatgcactgggtccgacagatgcccggcaaaggactggaatggatgggcgctatctaccctctgaccggcgacacctcctacaaccagaaaagcaagctgcaagtgaccatcagcgccgacaagagcatcagcacagcctacctccagtggtcctctctgaaggccagcgacaccgccatgtactattgtgccagaagcacctacgtcggcggcgactggcagtttgatgtgtggggcaagggcaccaccgtgaccgtttcttct

SEQ ID NO: 317 - DNA, 360 bp, Artificial Sequence
  Synthetic Polynucleotides
gaagtgcaactggtggaaagcggaggcggcctggtgcagcctggcggatctctgagactgagctgtgccgccagcggctacgagttcagccggtcctggatgaactgggtgcgccaggcccctggcaagggactggaatgggtgggaagaatctaccccggcgacggcgacaccaactacagcggcaagttcaagggccggttcaccatcagcgccgacaccagcaagaacaccgcctacctccagatgaacagcctgcgggccgaggataccgccgtgtactactgtgccagagatggcagctcctgggactggtacttcgacgtgtggggacagggaacccttgtgaccgtgtccagc

SEQ ID NO: 318 - DNA, 351 bp, Artificial Sequence
  Synthetic Polynucleotides
caggtgcaactggaagaaagcgggggaggcgtcgtgcggcctggaagaagtctgagactgagctgtgccgccagcggcttcaccttcagcgactacggcgtgaactggatcagacaggcccctggcaagggcctggaatgggtcacaatcatctggggcgacggcagaaccgactacaacagcgccctgaagtcccggttcaccgtgtcccggaacaacagcaacaacaccctgagcctccagatgaacagcctgaccaccgaggacaccgccgtgtactactgtgtgcgggctcccggcaaccgggctatggaatattggggacagggcgtactcgtgaccgtgtcctct

SEQ ID NO: 319 - DNA, 372 bp, Artificial Sequence
  Synthetic Polynucleotides
caggtgcagctccagcagtctggacccggcctcgtgaagcctagccagacactgagcctgacctgcgccatcagcggcgatagcgtgtccagcaatagcgccgcctggaactggatcagacagtccccctctcggggcctggaatggctgggccggacctactaccgcagcaagtggtacaacgactacgccgtgtccgtgaagtcccggatcaccatcaaccccgacaccagcaagaaccagttctccttgcaactgaacagcgtgacccccgaggacaccgccgtgtactactgcgccagagaagtgaccggcgacctggaagatgccttcgacatctggggccagggaacaatggtcacagtgtccagc

SEQ ID NO: 320 - DNA, 351 bp, Artificial Sequence
  Synthetic Polynucleotides
caggtgcaactggtgcagagcggagccgaagtgaagaaacccggcagcagcgtgaaggtgtcctgcaaggcttccggcggcaccttcagcagctacgccatttcttgggtgcgccaggctcctggacagggcctggaatggatgggcggcatcatccctatcctgggcaccgccaactacgcccagaaattccagggcagagtgaccatcaccgccgacgagagcaccagcaccgcctacatggaactgagcagcctgcggagcgaggacacagccgtgtattattgcgccagatggggcggaggggccttcgacatttggggccagggaacaatggtcaccgtgtccagc

SEQ ID NO: 321 - DNA, 336 bp, Artificial Sequence
  Synthetic Polynucleotides
caggtgcaactgcagcagtggggagccggactgctgaagcctagcgagacactgagcctgacctgcgccgtgtacggcggcagcttcagcgcctactattggagctggatcagacagccccctggcaagggcctggaatggatcggcgacatcaatcacggcggaggcaccaactacaaccccagcctgaagtcccgcgtgaccatctccgtggacaccagcaagaaccagttctccctgaagctgaacagcgtgacagccgccgacacagccgtgtactactgtgccagcctgaccgcctattggggccagggatctcttgtgaccgtgtccagc

SEQ ID NO: 322 - DNA, 351 bp, Artificial Sequence
  Synthetic Polynucleotides
caggtgcaactggtgcagtccggcgctgaagtgaagaaacctggggccagcgtgaaggtgtcctgcaaggtgtccggctacacctttaccgactactacattacctgggtgcgccaggcccctggacaggccctggaatggatgggctggatctaccccggcagcggcaacaccaagtacagccagaagttccagggcagattcgtgttcagcgtggacaccagcgccagcaccgcctacctgcaactgtctagcctgaaggccgaagataccgccgtgtactactgcgccaactacggcaactattggttcgcctattggggccagggaacccttgtgaccgtgtcctct

SEQ ID NO: 323 - DNA, 357 bp, Artificial Sequence
  Synthetic Polynucleotides
gaagtgcaactggtgcagtctggcggagggctggtgcatcctgggggaagcctgagactgagctgtgccggctctggcttcgccttcagcagcagcaccatgcactggatcagacaggcccctggcaagggcctggaatggatcagcctgatcggaagcggagggggcatctactacggcgacagcgtgaagggccggttcaccatcagccgggacaacgccaagaacagcctgtacctccagatgaactccctgcgggccgaggacatggccgtgtactattgtgtgcggggctacttcgactgggtggactacttcgattactggggccagggcaccctcgtgaccgtgtcatct

SEQ ID NO: 324 - DNA, 360 bp, Artificial Sequence
  Synthetic Polynucleotides
gaagtgcaactggtggaatcaggcggcggactggtgcagcctggcggatctctgagactgagctgtgccgccagcggcttcaccttcagcagctacggaatgcactgggtgcgccaggcccctggcaaaggactggaatgggtggcctacatcaccaccagaagcagcaccatctactacgccgacagcgtgaagggccggttcaccatctccagagacaacgccaagaacagcctgtacctccagatgaactccctgcgggccgaggacaccgccgtgtactattgcaccagagagcccctgaccggctactacgctatggactattggggccagggcaccagcgtgaccgtgtctagt

SEQ ID NO: 325 - DNA, 348 bp, Artificial Sequence
  Synthetic Polynucleotides
gatgtgcaactccaggaaagcggccctggccttgtgaagcctagccagagcctgtccctgacctgtaccgtgaccggcttcagcatcaccagcgactactcttggaactggatcagacagttccctggcaacaaactggaatggatgggctacatcagctactccggccacacctcctacaaccccagcctggaaagccggatctccatcaccagagacaccagcaagaaccagttcttcttgcaactgaacagcgtgaccaccgaggataccgccacatattactgtaccagaggcaactgggacgtggtgtactggggccagggcacacttgtgaccgtgtctgct

SEQ ID NO: 326 - DNA, 354 bp, Artificial Sequence
  Synthetic Polynucleotides
caggtgcaactgcagcagcctggcgctgaggtcgtgaagccaggcgcttccgtgaagatgtcctgcaaggccagcggctacaccttcaccagctactacatccactggatcaagcagacccctggacagggcctggaatgggtgggagtgatctaccccggcaacgacgacatcagctacaaccagaagttccagggcaaggccaccctgaccgccgacaagtctagcaccaccgcctacatgcaactgtccagcctgaccagcgaggacagcgccgtgtactactgcgccagagaagtgcggctgcggtacttcgatgtgtggggccagggaaccaccgtgaccgtgtcatct

SEQ ID NO: 327 - DNA, 366 bp, Artificial Sequence
  Synthetic Polynucleotides
caggtgcagctggtgcagagcggtgccgaagtgaagaaaccaggtgcatccgttaaagtttcatgtaaggctagtggatataccttcaccaattacggaatgaactgggtgaaacaggcccctggccagggactgaagtggatggggtggattaacacctacaccggggagccgacttatgcagacgactttaaggggcgggtcacgatgacctccgacacctccaccagtaccgcctacctggagctgcacaaccttaggtcagacgataccgccgtgtattactgtgcccgatggtcttggtccgacggatactatgtctacttcgactattggggccaggggaccacagttaccgtgtcctct

SEQ ID NO: 328 - DNA, 357 bp, Artificial Sequence
  Synthetic Polynucleotides
caagttcagctggttcagtctggggccgaagtgaagaaacctggcagcagcgtgaaggtgtcctgcaaagcaagcggcggcaccttcagcgattacgccatctcttgggtccgacaggcccctggacaaggactggaatggatgggcagaatcatccccatcctgggcgtcgccaattacgcccagaaattccagggccgcgtgacaatcaccgccgacaagtctaccagaaccgcctacatggaactgagcagcctgagaagcgaggacaccgccgtgtactactgcgccagaaattgggccgacgccttcgacatttggggccagggaacaatggtcaccgtgtctagcgcctcc

SEQ ID NO: 329 - DNA, 366 bp, Artificial Sequence
  Synthetic Polynucleotides
gaagtgaaactccagcagagcggccctgagctggttaagcctggcaccagcgtgaaggtgtcctgtaaagccagcggctactccttcaccgactacaacatgtactgggtcaagcagagccacggcaagagcctggaatggatcggctacatcgacccctacaaaggcggcaccatctacaaccagaagttcaagggcaaagccacactgaccgtggacaagagcagcagcaccgccttcatgcacctgaacagcctgaccagcgaggacagcgccgtgtactattgcgccagagagatgattaccgcctactacttcgactactggggccagggaagcagcgtgaccgttagctctctggaaaga

SEQ ID NO: 330 - DNA, 351 bp, Artificial Sequence
  Synthetic Polynucleotides
caggtgcaactggtgcagtctggggccgaagtgaagaaacctggggcctctgtgaaggtgtcctgcaaagccagcggctacacctttaccaactacgacatcaactgggtccgacaggctccaggccaaggactggaatggatcggctggatctatcctggcgacggcagcaccaagtacaacgagaagttcaaggccaaggccacactgaccgccgataccagcacaagcaccgcctacatggaactgcggagcctgagaagcgacgacaccgccgtgtactattgtgcctccggctacgaggacgctatggactattggggccagggcaccaccgtgacagtgtctagt

SEQ ID NO: 331 - DNA, 351 bp, Artificial Sequence
  Synthetic Polynucleotides
caagtgcaactggttcagagcggagccgaagtgaagaaacctggcagcagcgtgaaggtgtcctgcaaagcctctggcggcatcttcagcaaccacgccatctcttgggtccgacaggctcctggacaaggactggaatggatgggcggcatcatccccatcttcggcacagccaattacgcccagaaattccagggcagagtgaccatcaccgccgacgagtctaccagcaccgccttcatggaactgagcagcctgagaagcgaggacaccgccgtgtactattgcgccagagaatgggccgacgtgttcgacatttggggccagggaacaatggtcaccgtgtcctct

SEQ ID NO: 332 - DNA, 351 bp, Artificial Sequence
  Synthetic Polynucleotides
gaagttcagctccagcagagcggagccgagcttgtgaaacctggcgcttccgtgaagatgagctgcaaagccttcggctacaccttcaccacctttccaatcgagtggatgaagcagagccacggcaagagcctggaatggatcggcaactttcacccctacaacgaccagaccaagtacaacgaagagttcaagggcagagccaagctgaccatcgacagatccagcagcaccgtgtacctggaactgggcagactgacctccgatgacagcgccgtgtactactgtgccagaggctactactacgccttcgacttttggggccagggcaccacactgacagtgtctagc

SEQ ID NO: 333 - DNA, 351 bp, Artificial Sequence
  Synthetic Polynucleotides
gaggttcagctccagcagagcggagccgagcttgtgaaacctggcgcttccgtgaagatgagctgcaaagccttcggctacaccttcaccacctttccaatcgagtggatgaagcagagccacggcaagagcctggaatggatcggcaactttcacccctacaacgaccagaccaagtacaacgaagagttcaagggcagagccaagctgaccatcgacagatccagcagcaccgtgtacctggaactgggcagactgacctccgatgacagcgccgtgtactactgtgccagaggctactactacgccttcgacttttggggccagggcaccacactgacagtgtctagc

SEQ ID NO: 334 - DNA, 354 bp, Artificial Sequence
  Synthetic Polynucleotides
gaagtgcaactggttgaatctggcggcgctctgattcagcctggcggatctctgagactgagctgtgtggcctccggctttaccatcagcggcaactacatgagctgggtccgacaggcccctggcaaaggacttgaatgggtgtccctgatctacagcggcgacagcacctattacgccgacagcgtgaagggcagattcaccatcagccgggacatcagcaagaacaccgtgtacctccagatgaactccctgagagtggaagataccgccgtgtactactgcgtccgcgacggctactacgtgtccgatatggttgtgtggggcaagggcaccaccgtgacagtctcttct

SEQ ID NO: 335 - DNA, 366 bp, Artificial Sequence
  Synthetic Polynucleotides
cagatccaactggtgcagagcggcagcgagctgaagaaacctggggccagcgtgaaggtgtcctgcaaggccagcggctacacctttaccaactacggcatgaactgggtgcgccaggcccctggacagggcctgaaatggatgggctggatcaacaccaacaccggcgagcctaagtacgccgaagagttcaagggcagattcgccctgagcctggacaccagcgtgtccacagcctacctccagatcaacagcctgaaggccgaggataccgccgtgtacttctgcgccagaggctacggcaactacgccagaggggcttggctggcctattggggccagggaacactcgtgaccgtgtcctct

SEQ ID NO: 336 - DNA, 342 bp, Artificial Sequence
  Synthetic Polynucleotides
gaagtgcaactggtggaaagcgggggaggacttgtgaagcctggcggctctctgagactgagctgtgccgcctctggcttcaccttcagcagctacgacatgagctgggtgcgccaggctcctggcaagggactggaatgggtgtccaccatcagcagcggcggcagctacacctactacctggacagcatcaagggccggttcaccatctccagagacaacgccaagaacagcctgtacctccagatgaactccctgcgggccgaggacacagccgtgtattattgcgccagacagggcctggattactggggcagaggcacccttgtgaccgtgtcctct

SEQ ID NO: 337 - DNA, 363 bp, Artificial Sequence
  Synthetic Polynucleotides
caggtgcagctgaaagagagcggccctgagctggaaaagcctggggccagcgtgaagattagctgcaaggccagcggctacagcttcaccgcctacagcatgaactgggtcaagcagaacaacggcatgagcctggaatggatcggcagcatcgacccctactacggcgacaccaaatacgcccagaagttcaagggcaaggccaccctgaccgtggataaggccagcagcaccgcctacctccagctgaagtctctgaccagcgaggacagcgccgtgtactactgcgccagacggatgattaccaccggcgactggtacttcgacgtgtggggagccggaaccaccgtgacagtgtctagc

SEQ ID NO: 338 - DNA, 363 bp, Artificial Sequence; identical to SEQ ID NO: 337
  Synthetic Polynucleotides

SEQ ID NO: 339 - DNA, 354 bp, Artificial Sequence
  Synthetic Polynucleotides
caggtgcagctggtgcagtctggggccgaagtgaagaaacctggggccagcgtgaaggtgtcctgcaaggccagcggatacacctttaccaactacggcatgaactgggtgcgccaggcccctggacagggcctggaatggatgggctggatcaacacctacaccggcgagcccacatacgccgacgccttcaagggcagattcgccttcagcctggacaccagcacctccaccgcctacctccagatcaacagcctgcggagcgacgacaccgccgtgtattattgcgccagagattacggcgactacgggatggactattggggccagggaaccaccgtgaccgtgtcctct

SEQ ID NO: 340 - DNA, 339 bp, Artificial Sequence
  Synthetic Polynucleotides
caggtgcaactgcagcagcctggcgctgaacttgtgcggccaggcgcctctgtgaagctgagctgtaaagccagcggctacaccttcaccagctactggatgaactgggtcaagcagcgcccaggccagggcctggaatggatcggaatgatcgaccccagcgacagcgagacacactacaaccacatcttcaaggacaaggccaccctgaccgtggacaagtccagcagcacagcctacctgcaactgtccagcctgaccagcgaggacagcgccgtgtactactgcgcccggaacctgtatctgtggggccagggaacaagcgtgaccgtgtctagc

SEQ ID NO: 341 - DNA, 351 bp, Artificial Sequence
  Synthetic Polynucleotides
gaagtccaacttgtggagtctggagggggcctggtgcagcccggcggctctctcagactgtcttgtgcggcaagcggctacaccttcagctcttactggatagaatgggtgaggcaggcacctggaaagggactggagtggattggagagattctgccaggagggggagatacaaattacaatgaaatcttcaaggggcgggccaccttttcagcggataccagcaagaatacagcttacctgcagatgaatagcctccgggcagaagataccgctgtttattattgcacgagacgggtgccaataagactggactattgggggcaagggactcttgtcaccgtcagttca

SEQ ID NO: 342 - DNA, 342 bp, Artificial Sequence
  Synthetic Polynucleotides
caagtgcaactggttcagagcggagccgaagtgaagaaacctggggcctctgtgaaggtgtcctgcaaggccagcggctacaccttcaaggacacctacatccactgggtccgacaggcccctggacaaggacttgagtggatgggcagaatcgaccccgccaacggcaacaccaaatacgaccccaagttccagggcagagtgaccatgaccagagacaccagcatcagcaccgcctacatggaactgagccggctgagatccgatgacaccgccgtgtactattgcgctagaagaggcggagtggattggggccagggaacactggttaccgtgtctagt

SEQ ID NO: 343 - DNA, 369 bp, Artificial Sequence
  Synthetic Polynucleotides
gaagtgcaactccagcagagcgtggccgagcttgtgaagcctggcgcttccgtgaagatgtcctgcaaggtgtccggctacaccctgacagaccacaccatccactggatgaagcagcggcctgagcagggcctggaatggatcggctacatctaccccagggacggcatcaccggctacaacgagaagttcaagggcaaggccacactgaccgccgacaccagcagcagcacagcctacatgcaactgaacagcctgaccagcgaggacagcgccgtgtacttctgtgccagatggggctacagctacagaaactacgcctactactacgactactggggccagggcacaaccctgaccgtgtctagt

SEQ ID NO: 344 - DNA, 375 bp, Artificial Sequence
  Synthetic Polynucleotides
caggtgcaactccaggaatctggccccggactggctaagcccagcgagacactgagcctgacctgtaccgtgtccggcgacagcatcaccagctactactggtcctggatcagacagccccctggcaagggcctggaatggatcggctacatctactacagcggcagcaccaactacaaccccagcctgaagtccagagtgaccatcagcgtggacaccagcaagaaccagttctccctgaagctgagcagcgtgacagccgccgacaccgccgtgtattattgcgccagagatcagcggagaatcgccgctgccggcacccacttttacggcatggatgtgtggggccagggcaccaccgtgaccgtgtcatct

SEQ ID NO: 345 - DNA, 348 bp, Artificial Sequence
  Synthetic Polynucleotides
caggtgcaactgctggaatctggcggcggactggtgcagcctggcggatctctgagactgagctgtgccgccagcggcttcaccttcagcagctacgccatgagctgggtgcgccaggcccctggaaaaggactggaatgggtgtccgtgatccggtccagcggcagcagcacctattacgccgatagcgtgaagggccggttcaccatcagccgggacaacagcaagaacaccctgtacctccagatgaacagcctgcgggccgaggacaccgccgtgtactattgtgctaggggaggcggctacttcgactactggggccagggaacactcgtgaccgtgtcctct

SEQ ID NO: 346 - DNA, 354 bp, Artificial Sequence
  Synthetic Polynucleotides
caggtgcaactgctggaatctggcggcggactggtgcagcctggcggatctctgagactgagctgtgccgccagcggcttcaccttcagcagccacggaatgcactgggtgcgccaggcccctggaaagggactggaatgggtgtccgtgatctccggcagcggcagcaataccggctacgccgatagcgtgaagggccggttcaccatcagccgggacaacagcaagaacaccctgtacctccagatgaacagcctgcgggccgaggacaccgccgtgtactattgtgccagacagtggggcagctacgccttcgattcttggggccagggcaccctcgtgaccgtgtcatct

SEQ ID NO: 347 - DNA, 354 bp, Artificial Sequence
  Synthetic Polynucleotides
caggtgcagctggaagagtctggacccgagcttgtgaagcctggggccagcgtgaagctgtcctgtaaagccagcggctacaccttcaccgagtacatcatccactgggtcaagcagcggagcggccagggcctggaatggatcggctggttttaccctggctccggcagcatcaagtacaacgagaagttcaaggacaaggccaccctgaccgccgacaagtccagcagcaccgtgtacatggaactgagcggcctgaccagcgaggacagcgccgtgtatttctgcgccagacacgacggctacagctacttcgactattggggccagggcaccacactgaccgtgtcctct

SEQ ID NO: 348 - DNA, 345 bp, Artificial Sequence
  Synthetic Polynucleotides
gaatctggaagaggactggtgcagcctggcggcagcagaaagctgtcttgtgccgccagcggcttcaccttcagcaccagcggaatgcactgggtgcgccaggcccctgagaagggactggaatgggtggcctacatcagctccggcagcaccaccatctaccacgccgataccgtgaagggccggttcaccatcagccgggacaaccccaagaataccctgttcctccagatgaccagcctgcggagcgaggacaccgccatgtactattgctgcgccagaagcggccagttcggcaactacttcgactactggggccagggcaccaccctgaccgtgtcatct

SEQ ID NO: 349 - DNA, 360 bp, Artificial Sequence
  Synthetic Polynucleotides
gaggtgcaactgcagcagtctggccccgagcttgtgaagcctggcgcctccgtgaagatgagctgcaaggccagcggctacacctttaccagctacttcatccactgggtcaagcagaaacccggccagggcctggaatggatcggcttcatcaacccttacaacgacggcagcaagtacaacgagaagttcaagggcaaggccaccctgaccagcgacaagagcagcagcaccgcctacatggaactgtccagcctgacatccgaggacagcgccgtgtactactgcaccagggacgacggctactacggctacgccatggactactggggccagggaacaagcgtcaccgtgtcctct

SEQ ID NO: 350 - DNA, 360 bp, Artificial Sequence
  Synthetic Polynucleotides
gaagtgcaactccagcagagcggccctgagcttgtgaagcctggcgcttccgtgaagatgagctgcaaggccagcggctacaccttcaccagctacgtgatgcactgggtcaagcagaaacctggacagggcctggaatggatcggctacatcaacccctacaacgacggcaccaagtacaacgagaagttcaagggcaaggccaccctgacaagcgacaccagcagcagcaccgcctacatggaactgaacagcctgaccagcgaggacagcgccgtgtacttctgcgccagacccatctacttcgacaacgactacttcgattactggggccagggcaccaccctgaaggtgtcctct

SEQ ID NO: 351 - DNA, 363 bp, Artificial Sequence
  Synthetic Polynucleotides
gaagtgcaactggttcagagcggagccgaagtgaagaaacctggggcctctgtgaaggtgtcctgcaaagccagcggctacacctttaccgactactacctggacgtggtcgtgcggcaagctcctggacaaggactggaatggatcggcagagtgaacccctacaacggcggcaccatctacaaccagaaattcaagggaagagtgaccctgaccagagacaccagcacctccacagcctacctggaactgagcagcctgagaagcgaagataccgccgtgtactactgcgccagggaccactacagatatgaccctctgctggactactggggccagggaaccctggttacagtgtctagt

SEQ ID NO: 352 - DNA, 366 bp, Artificial Sequence
  Synthetic Polynucleotides
gaagtgcaactggttcagagcggagccgaagtgaagaaacctggggcctctgtgaaggtgtcctgcaaggccagcggctacagcttcaccgactattatatgcactgggtccgacaggctccaggccagggacttgagtggatcggcagaatcaacccctacaacggcgctgccttctacagccagaacttcaaggatagagtgaccctgaccgtggacaccagcaccagcacagcctacctggaactgagcagcctgagaagcgaggacaccgccgtgtactactgcgccattgagagaggcgctgacctggaaggctacgctatggattattggggccagggaaccctggtcaccgtgtcatct

SEQ ID NO: 353 - DNA, 369 bp, Artificial Sequence
  Synthetic Polynucleotides
caagttcagctgcaagagtctggccctggcctggtcaagcctagcgaaacactgagcctgacctgcgccgtgtctggctactctatcaccagcgcctactattggaactggatcagacagcctcctggcaaaggactggaatggatcggctacatcagctacgacggcagaaacaactacaaccccagcctgaagaaccggatcaccatcaatcccgacaccagcaagaaccagttcagcctccagctgaacagcgtgacccctgaggataccgccgtgtactactgtgccagagaaggcgactacgacgtgggcaactactacgctatggactactggggccagggaaccctggtcacagtctcttct

SEQ ID NO: 354 - DNA, 369 bp, Artificial Sequence
  Synthetic Polynucleotides
gaagtgcaactggtggaaagtggcggcggactggtgcaacctggaagaagcctgagactgtcctgtgccgccagcggctactctatcacaagcgcctactactggaactgggtccgacaggctcctggcaaaggactggaatgggtgtcctacatcagctacgacggcagaaacaactacaaccccagcctgaagaaccgcttcaccatcagccgggacaacgccaagaagtccctgtacctccagatgaacagcctgagagccgaggacacagccctgtactattgcgccaaagagggcgactacgacgtcggcaactactacgctatggactactggggccagggaaccaccgtgactgtctcttct

SEQ ID NO: 355 - DNA, 366 bp, Artificial Sequence
  Synthetic Polynucleotides
caggtgcaactgcaggaatctggccctggcctcgtgaagcccagcgagacactgagcctgacctgcacagtgtccggcggcagcattagcagcagcaattactactggggctggattcggcagccccctggcaagggactggaatggatcggagccatctactacagcggcagcacctactacaaccccagcctgaagtccagagtggctatcagcgtggacaccagcaagaaccagttctccctgaagctgagcagcgtgacagccgccgataccgccgtgtactactgcgccagacggatcggagtggccggacagtggtacttcgacctgtggggcagaggaaccctcgtgaccgtgtctagc

SEQ ID NO: 356 - DNA, 366 bp, Artificial Sequence
  Synthetic Polynucleotides
cagatccagttggtgcagtctggacctgacctgaagaagcctggagagacagtcaagatcagttgcaaggcttctgggtataccttcacaaacactggaatgaactgggtgaagcaggctccaggaaagggtttaaagtggatgggctggataaatacctacactggagagccaacatacgctgatgacttcaagggacggtttaccttctctttggaaacctctgccagcactgcctatttgcagatcaacaacctcaaaaatgaggacacggctacatatttctgtacaagatggggctacggtagtagcctttattatgctatggactactggggtcaaggaacctcagtcaccgtctcctca

SEQ ID NO: 357 - DNA, 357 bp, Artificial Sequence
  Synthetic Polynucleotides
gaagtgcaactggtggaatcaggcggcggactggtgcagcctggcggatctctgagactgagctgtgccgccagcggcttcgacttcagccggtactggatgagctgggtgcgccaggcccctggcaaaggactggaatggatcggcgagatcaaccccgacagcagcaccatcaactacgcccccagcctgaaggacaagttcatcatcagccgggacaacgccaagaacagcctgtacctccagatgaactccctgcgggccgaggacaccgccgtgtactattgcgccagacccgacggcaactactggtacttcgacgtgtggggccagggaaccctcgtgaccgtgtcatct

SEQ ID NO: 358 - DNA, 360 bp, Artificial Sequence
  Synthetic Polynucleotides
caggtgcagctgcagcagcccggcgccgagctggtgagacccggcgccagcgtgaagctgagctgcaaggccagcggctacagcttcaccacctactggatgaactgggtgaagcagagacccggccagggcctggagtggatcggcatgatccaccccagcgacagcgagaccagactgaaccagaagttcaaggacaaggccaccctgaccgtggacaagagcagcagcaccgcctacatgcagctgagcagccccaccagcgaggacagcgccgtgtactactgcgccagaagcaccatgatcgccaccagagccatggactactggggccagggcaccagcgtgaccgtgagcagc

SEQ ID NO: 359 - DNA, 360 bp, Artificial Sequence
  Synthetic Polynucleotides
caagttcaactggttcagagcggagccgaagtgaagaaacctggggcctctgtgaaggtgtcctgcaaagccagcggctacgcctttagcagctcctggatgaactgggtccgacaggctcctggacagggcctcgaatggatcggcagaatctatcctggcgacggcgacaccaagtacaacggcaagttcaagggcaaagccacactgaccgccgacaagagcacaagcaccgcctacatggaactgagcagcctgagaagcgaggacaccgccgtgtactactgtgccagatccaccatgatcgccaccggcgctatggattattggggccagggaaccctggtcaccgtgtcatct

SEQ ID NO: 360 - DNA, 351 bp, Artificial Sequence
  Synthetic Polynucleotides
gaagtgcagctggttgagtctggtggcggactggttcaacctggcggaagcctgagactgtcttgtgccgccagcggcttcaccttcagcgactactatatggcctgggtccgacaggcccctggcaaaggacttgaatgggtcgccgagatcaactacgacggcagcagcacctactacgtggacagcgtgaagggcagattcaccatcagccgggacaacgccaagaacagcctgtacctccagatgaactccctgagagccgaggataccgccgtgtactactgcgccagagacagaggcttctacttcgactattggggccagggcaccaccgtgacagtctcttct

SEQ ID NO: 361 - DNA, 351 bp, Artificial Sequence
  Synthetic Polynucleotides
gaagtgcagctcgttgagtctggtggcggactggttcaacctggcggaagcctgagactgtcttgtgccgccagcggcttcaccttcagcgactactatatggcctgggtccgacaggcccctggcaaaggacttgaatgggtcgccagcatcaactacgacggcgagagcacctactacgtggacagcgtgaagggcagattcaccatcagccgggacaacgccaagaacagcctgtacctccagatgaactccctgagagccgaggataccgccgtgtactactgcgccagagacagaggctactacttcgactattggggccagggcaccaccgtgacagtctcttct

SEQ ID NO: 362 - DNA, 351 bp, Artificial Sequence
  Synthetic Polynucleotides
gaagtgcagctcgttgagtctggtggcggactggttcaacctggcggaagcctgagactgtcttgtgccgccagcggcttcaccttcagcgactactatatggcctgggtccgacaggcccctggcaaaggacttgaatgggtcgccgacatcaactacgatggcggcagcacctactacctggacagcctgaagtcccggttcaccatctccagagacaacgccaagaacagcctgtacctccagatgaactccctgagagccgaggataccgccgtgtactactgcgccagagacagaggctactacttcgactattggggccagggcaccctggtcacagtctcttct

SEQ ID NO: 363 - DNA, 363 bp, Artificial Sequence
  Synthetic Polynucleotides
caggttcagctccagcagtctggcgctgagcttgctagacctggcgcttctgtgaagctgagctgcaaggccagcggctacaccttcaccagctactggatgcagtgggtcaagcagaggccaggccaaggactggaatggatcggagccatctatcccggcgacggcgataccagatacacccagaagttcaagggcaaagccacactgaccgccgacaagagcagctccacagcctacatgcaactgagcagcctggcttccgaggacagcgccgtgtactattgtgccagaggcaaggtgtactacggcagcaaccctttcgcctattggggccagggaaccctggttacagtgtctgct

SEQ ID NO: 364 - DNA, 360 bp, Artificial Sequence
  Synthetic Polynucleotides
caggttcagctccagcagtctggccctgagcttgtgaaacctggcgcttccgtgaagattagctgcaaggccagcggctacgccttcagcagctcctggatgaactgggtcaagcagaggccaggccagggcctcgaatggatcggcagaatctatcctggcgacggcgacaccaagtacaacggcaagttcaagggcaaagccacactgaccgccgacaagtctagcagcaccgcctatatgcagctcagcagcctgacctctgtggacagcgccgtgtacttctgtgcccggtctaccatgattgccaccggcgctatggattactggggccagggaacaagcgtgaccgtgtcatct

SEQ ID NO: 365 - DNA, 360 bp, Artificial Sequence
  Synthetic Polynucleotides
caggtgcaactggtgcagagcggagccgaagtgaagaaacctggggccagcgtgaaggtgtcctgcaaggtgtccggctacaccctgaccgagctgagcattcactgggtgcgccaggcccctggcaagggactggaatggatgggcggcttcgaccccgaagagaacgagatcgtgtacgcccagcggttccagggcagagtgacaatgaccgaggacaccagcaccgacaccgcctacatggaactgagcagcctgcggagcgaggataccgccgtgtactactgtgccatcgtgggcagcttcagcggaatcgcctacagaccttggggccagggcacaatggtcaccgtgtctagc

SEQ ID NO: 366 - DNA, 360 bp, Artificial Sequence
  Synthetic Polynucleotides
caggtgcaactggtgcagagcggagccgaagtgaagaaacctggggccagcgtgaaggtgtcctgcaaggtgtccggctacaccctgaccgagctgagcattcactgggtgcgccaggcccctggcaagggactggaatggatgggcggcttcgaccccgaagagaacgagatcgtgtacgcccagcggttccagggcagagtgacaatgaccgaggacaccagcaccgacaccgcctacatggaactgagcagcctgcggagcgaggataccgccgtgtactactgcgccatcgtgggcagcttcagccctctgacactgggcctgtggggccagggaactatggtcaccgtgtccagc

SEQ ID NO: 367 - DNA, 372 bp, Artificial Sequence
  Synthetic Polynucleotides
cagatcaccctgaaagagtccggccccaccctcgtgaagcctacccagaccctgacactgacctgcaccttcagcggcttcagcctgagcacaagcggcatgggcgtgggctggatcagacagcctcctggaaaggccctggaatggctggcccacatttggtgggacgacgtgaagcggtacagccccagcctgaagtcccggctgaccattaccaaggacaccagcaagaaccaggtggtgctgaccatgacaaacatggaccccgtggacaccgccacatattactgcgcccggatcgtgtccttcgacaacgacgtggtgtccgctatggactactggggccagggaaccctcgtgaccgtgtctagt

SEQ ID NO: 368 - DNA, 354 bp, Artificial Sequence
  Synthetic Polynucleotides
caggtgcaactggtgcagagcggagccgaagtgaagaaacctggggccagcgtgaaggtgtcctgcaaggccagcggctacacctttaccaactacggcatgaactgggtgcgccaggctcctggacagggcctggaatggatgggctggatcaacacctacaccggcgagcccacctacgccgacgacttcaagggcagagtgaccatgaccaccgacaccagcacctccaccgcctacatggaactgcggagcctgagaagcgacgacaccgccgtgtattattgcgcccggatcggcgacagcagccccagcgattattggggccagggaaccctcgtgaccgtgtcctct

SEQ ID NO: 369 - DNA, 345 bp, Artificial Sequence
  Synthetic Polynucleotides
gaagtgcaactgctggaatctggcggcggactggtgcagcctggcggatctctgagactgagctgtgccgccagcggcttcacctttagcggctacgccatgagctgggtgcgccaggctcctggcaaaggcctggaatgggtgtccgagatcgcccctcccggcctgaataccagatacgccgatagcgtgaagggccggttcaccatcagccgggacaacagcaagaacaccctgtacctgcagatgaacagcctgcgggccgaggataccgccgtgtactactgcgccaagagcgacaccgccttcgactactggggacagggaacccttgtgaccgtgtcc

SEQ ID NO: 370 - DNA, 357 bp, Artificial Sequence
  Synthetic Polynucleotides
caggtgcagctgaagcagagcggacctggcctggtgcagcctagccagagcctgtccatcacctgtaccgtgtccggcttcagcctgaccaactacggcgtgcactgggtgcgccagagccctggaaaaggactggaatggctgggagtgatttggagcggcggcaacaccgactacaacacccccttcaccagcagactgtctatcaacaaggacaacagcaagagccaggtgttcttcaagatgaacagcctccagagcaacgacaccgccatctactactgtgctagagccctgacctactatgactacgagttcgcctactggggccagggcacactcgtgacagtgtctgct

SEQ ID NO: 371 - DNA, 369 bp, Artificial Sequence
  Synthetic Polynucleotides
caggtgcagctccagcagtctggggccgaagtgaagaaacccggcagcagcgtgaaggtgtcctgcaaggccagcggctacacctttaccaactactacatctactgggtgcgccaggccccaggccagggactggaatggatcggcggcatcaatcctaccagcggcggcagcaacttcaacgagaagttcaagacccgcgtgacaatcaccgccgacgagagcagcaccaccgcctacatggaactgagcagcctgcggagcgaggataccgccttctacttctgcacccggcagggcctgtggttcgactctgatggcagaggcttcgacttctggggccagggaaccaccgtgaccgtgtctagt

SEQ ID NO: 372 - DNA, 348 bp, Artificial Sequence
  Synthetic Polynucleotides
gaggtgcaggtgctggaaagtggcggaggactggtgcagcctggcggctctctgagactgtcttgtgccgccagcggcttcaccttcagcagctacgccatgagctgggtgcgccaggcccctggaaaaggactggaatgggtgtccgccatcagcggctctggcgggtctaccaactacgccgatagcgtgaagggccggttcaccatcagccgggacaacagcaagaacaccctgtacctccagatgaacagcctgcgggccgaggacaccgccgtgtattattgtgccggcagcagcgggtggagcgagtattggggacagggcaccctcgtgaccgtgtcctct

SEQ ID NO: 373 - DNA, 342 bp, Artificial Sequence
  Synthetic Polynucleotides
gagatccagctggtgcagagcggagccgaagtgaagaagcctggcgagagcctgcggatcagctgcaagggcagcggcttcaacatcgaggactactacatccactgggtgcgccagatgcccggcaagggcctggaatggatgggcagaatcgaccccgagaacgacgagactaagtacggccccatcttccagggccacgtgaccatcagcgccgacaccagcatcaacaccgtgtacctccagtggtccagcctgaaggccagcgacaccgccatgtactactgcgcctttagaggcggcgtgtactggggccagggcaccacagtgacagtgtctagc

SEQ ID NO: 374 - DNA, 381 bp, Artificial Sequence
  Synthetic Polynucleotides
gaggtgcaactgctggaatctgggggcggagtggtgcagcctggcagaagcctgagactgagctgtgccgccagcggcttcaccttcagctcctacggaatgcactgggtgcgccaggcccctggcaaaggactggaatgggtggccgtgatctcctacgacggcagcaacaagtactacgccgacagcgtgaagggccggttcaccatcagccgggacaacagcaagaacaccctgtacctgcagatgaacagcctgcgggccgaggacaccgccgtgtactactgcgccaaggatatgggctggggcagcggctggcggccttactactactacggcatggacgtgtggggccagggcaccaccgtgacagtgtcatct

SEQ ID NO: 375 - DNA, 360 bp, Artificial Sequence
  Synthetic Polynucleotides
gaagtgcagctgctggaacagtctggcgccgaacttgtgcggcctggcaccagcgtgaagatcagctgtaaagccagcggctacgccttcaccaactactggctgggctgggtcaagcagaggcctggacacggcctggaatggatcggcgacatctttcccggctccggcaacatccactacaacgagaagttcaagggcaaggccaccctgaccgccgacaagtctagcagcaccgcctacatgcagctgtccagcctgacctttgaggacagcgccgtgtatttctgtgcccggctgcggaactgggacgagcccatggattattggggccagggcaccaccgtgaccgtgtctagt

SEQ ID NO: 376 - DNA, 351 bp, Artificial Sequence
  Synthetic Polynucleotides
gaagtgaagctggacgagacaggcggagggctggtgcagcctggcagacctatgaagctgagctgtgtggcctccggcttcaccttcagcgactactggatgaactgggtgcgccagtcccccgagaagggcctggaatgggtggcccagatcagaaacaagccctacaactacgaaacctactacagcgacagcgtgaagggccggttcaccatcagcagggacgacagcaagagcagcgtgtacctccagatgaacaacctgagggtggaagatatgggcatctactactgcaccggcagctactacggcatggactactggggccagggcaccagcgtgaccgtgtct

SEQ ID NO: 377 - DNA, 354 bp, Artificial Sequence
  Synthetic Polynucleotides
ggcgtgaagctggacgagacaggcggaggacttgttcaacctggcggagccatgaagctgagctgtgtgaccagcggctttaccttcggccactactggatgaactgggtccgacagtcccctgagaaaggactggaatgggtcgcccagttcagaaacaagccctacaactacgaaacctactacagcgacagcgtgaagggcagattcaccatcagccgggacgacagcaagtccagcgtgtacctccagatgaacaacctgcgcgtggaagataccggcatctactactgtaccggggccagctacggcatggaatatctcggccagggcaccagcgtgaccgtgtctaca

SEQ ID NO: 378 - DNA, 378 bp, Artificial Sequence
  Synthetic Polynucleotides
caggtgcaactggtggaatctggcggcaatctggttcagcctggcggctctctgagactgtcttgtgccgccagcggcttcaccttcggcagcttttctatgagctgggtccgacaagctcctggcggaggacttgaatgggtggcaggactgtctgccagaagcagcctgacacactacgccgactctgtgaagggcagattcaccatcagccgggacaacgccaagaacagcgtgtacctccagatgaacagcctgagagtggaagataccgccgtgtactactgcgccagaagaagctacgacagcagcggctactggggccacttctacagctacatggatgtgtggggccagggcaccctggttacagtttct

SEQ ID NO: 379 - DNA, 372 bp, Artificial Sequence
  Synthetic Polynucleotides
gtgcacgaggtccagcttgtgcagtccggggcagaggtcaagaagcctggttctagcgtaaaagtgagttgcaaagcctcaggtgggacattttcatcctacgcgatcagttgggttagacaggctcctggtcaagggctggaatggatgggcggaattattccaatcttcggaacagcgaattacgcgcagaagttccagggtagagtaaccatcactgctgacaagtccacctccaccgcatacatggaattgtctagtctccggagcgaggatacggcggtgtattattgtgctacgttcgccctgtttggcttccgcgaacaggctttcgacatctgggggcagggcacgacagtcacggttagtagt

SEQ ID NO: 380 - DNA, 366 bp, Artificial Sequence
  Synthetic Polynucleotides
agggcacacctggtgcagtctggcaccgccatgaagaaacctggcgcttccgtcagagtgtcctgtcagacaagcggctacaccttcacagcccacatcctgttctggttcagacaggccccaggcagaggactggaatgggtcggatggatcaagccccagtacggggccgtgaatttcggcggaggcttcagagacagagtgaccctgaccagggacgtgtaccgggaaatcgcctacatggacatccggggcctgaagcctgatgacaccgccgtgtactactgcgccagggatagaagctacggcgacagctcttgggctctcgatgcttggggacagggcacaacagtggtggtgtctgct

SEQ ID NO: 381 - DNA, 354 bp, Artificial Sequence
  Synthetic Polynucleotides
caggtccaactggtgcagagcggagccgaggtcgtgaagcctggcgcttccgtgaagattagctgcaaagccagcggctacacctttaccggctactttatgaactgggtcaagcagagccctggccagagcctggaatggatcggcagaatccacccctacgacggcgacaccttctacaaccagaagttccagggcaaggccaccctgacagtggacaagagcagcaacaccgcccacatggaactgctgagcctgaccagcgaggacttcgccgtgtactactgcaccagatacgacggcagccgggctatggactattggggccagggcaccaccgtgaccgtgtctagt

SEQ ID NO: 382 - DNA, 372 bp, Artificial Sequence
  Synthetic Polynucleotides
caggtgcaactggtgcagagcggagccgaagtgaagaaacctggggccagcgtgaaggtgtcctgcaaggccagcggctacacctttaccacctacggcatctcttgggtgcgccaggctcctggacagggactggaatggatgggctggatcagcgcctacaacggccacaccaactacgcccagatgctccagggcagagtgaccatgaccaccgacaccagcacctccaccgcctacatggaactgcggggcctgagaagcgacgacaccgccgtgtattattgcgccagagaagcctacgcctcctacggcagcggcagctactggaccgattattggggccagggcaccctcgtgaccgtgtctagt

SEQ ID NO: 383 - DNA, 339 bp, Artificial Sequence
  Synthetic Polynucleotides
gaagtgcagctggtgcagtctggcgctgaggtggaaaagcctggggccagcgtgaagattagctgcaaggccagcggcagcagcttcaccggctacaacatgaactgggtgcgccagaacatcggcaagagcctggaatggatcggagccatcgacccctactacggcggcaccagctacaaccagaagttcaagggcagagccaccctgaccgtggacaagagcaccagcaccgcctacatgcacctgaagtccctgcggagcgaggacaccgccgtgtactactgtgtgtccggcatggaatattggggccagggcaccagcgtgaccgtgtctagt

SEQ ID NO: 384 - DNA, 363 bp, Artificial Sequence
  Synthetic Polynucleotides
caggtgcagctggtggaatctggacctggcgtggtgcagcctggcagaagcctgagaatcagctgtgccgtgtccggcttcagcgtgaccaactacggcgtgcactgggtgcgccagccacctggaaaaggactggaatggctgggcgtgatctgggctggcggcatcaccaactacaacagcgccttcatgtcccggctgaccatctccaaggacaacagcaagaacaccgtgtacctccagatgaacagcctgcgggccgaggacaccgccatgtactactgtgcttccagaggcggccactacggctacgccctggattattggggccagggaaccctcgtgaccgtgtcctctacgcgt

SEQ ID NO: 385 - DNA, 357 bp, Artificial Sequence
  Synthetic Polynucleotides
gaagtgaccctggtggaaagcggcggagacttcgtgaagcctggcggctctctgaaggtgtcctgtgccgccagcggcttcgcctttagccactacgccatgagctgggtgcgccagacccctgccaagagactggaatgggtggcctacatcagcagcggcggctccggcacctactactccgatagcgtgaagggccggttcaccatcagccgggacaacgccaagaacaccctgtacctccagatgcggagcctgcggagcgaggacagcgccatgtatttctgcaccagagtgaagctgggcacctattacttcgactcttggggccagggcaccaccctgaccgtgtcatct

SEQ ID NO: 386 - DNA, 369 bp, Artificial Sequence
  Synthetic Polynucleotides
cagagcgtgaaagagtctgagggcggcctgttcaagcccaccgataccctgaccctgacctgcaccgtgtccggcttcagcctgagcagacacgccctgacatgggtgcgccaggcccctggaaatggcctggaatggatcggagccatcgacaacgccggcaccacctactatgcctcttgggccaagtccagaagcaccatcacccggaacaccgacctgcacaccgtgaccctgaagatgaccagcctgaccgccagcgacaccgccacctacttttgcgccagagtgttctacgacatcaacagcggctactacctggacggcatggacctgtggggacctggcacacttgtgaccgtgtccagc

SEQ ID NO: 387 - DNA, 354 bp, Artificial Sequence
  Synthetic Polynucleotides
gagcaactgaaagagtctggcggcggactgttcaagcccaccgataccctgaccctgacctgcaccgtgtccggcttcagcctgagctactacggcgtgaactgggtgcgccaggcccctggcaatggcctggaatggatcggcacaatcggcggcagcggcgacacctactatgcctcttgggccaagtccagaagcaccatcatcagaaacaccaacgagaacaccgtgaccctgaagatgaccagcctgacagccgccgacaccgccacctacttttgcgtcagatacgccaacatcggctacgagtatttcaacgtgtggggacccggcaccctcgtgaccgtgtcatct

SEQ ID NO: 388 - DNA, 363 bp, Artificial Sequence
  Synthetic Polynucleotides
gaagtgcaactggtggaatcaggcggcggactggtgcagcctggcgagtctctgagactgagctgtgtggcctccggcttcaccttcagccggtacaagatgaactgggtgcgccaggcccctggcaagggactggaatgggtgtcctacatcagccgcagcggcagagacatctactacgccgacagcgtgaagggccggttcaccatcagcagagacaacgccaagaacagcctgtacctccagatgaactccctgcgggacgaggacaccgccgtgtactactgtgccggaaccgtgaccacctattactacttcggcatggacgtgtggggccacggcaccaccgtgacagtgtcatct

SEQ ID NO: 389 - DNA, 366 bp, Artificial Sequence
  Synthetic Polynucleotides
gaagtgcaactggtggaatccgggggaggctctgtgcagcctggcgagtctctgagactgagctgtgtggcctccggcttcaccttcagccggtacaagatgaactgggtgcgccaggcccctggcaagggactggaatgggtgtcctacatcagccgcagcggcagagacatctactacgccgacagcgtgaagggccggttcaccatcagcagagacaacgccaagaacagcctgtacctccagatgaactccctgcgggacgaggacaccgccgtgtactactgtgccggaaccgtgaccacctattactacgacttcggcatggacgtgtggggccagggcacaaccgtgacagtgtctagc

SEQ ID NO: 390 - DNA, 372 bp, Artificial Sequence
  Synthetic Polynucleotides
gaagtgcaactggtgcagagcggcggaggctctctgacactgtcttgtgctgcctccggcgtggtgcagcctggcagattcaccttcagcagctacggaatgcactgggtgcgccaggcccctggaaagggactggaatgggtgtccgtgatctcttacgacggcagcaacaagtattacgccgacagcgtgaagggccggttcaccatctccagagacaacagcaagaacaccctgtacctccagatgaacagcctgcggaccgaggacaccgccgtgtactactgtgccaagaccctgtccgctggcgagtggattggaggcggagccttcgatatctggggccacggcacaatggtcaccgtgtcctct

SEQ ID NO: 391 - DNA, 357 bp, Artificial Sequence
  Synthetic Polynucleotides
caagtgaagctccaggaatctggcggcggactcgtgaagcctggcggctctctgaagctgagctgtgccgccagcggcttcaccttcagcagctacggcatgagctgggtgcgccagacccccgacaagagactggaatgggtggcaaccatcagcagcggcggcagctacacctactaccccgatagcgtgaagggccggttcaccatctccagagacaacgccaagaacaccctgtacctccagatgagcagcctgaagtccgaggataccgccatgtactactgcgccagaggcaactgggagggctggtacttcgatgtgtggggccagggcaccaccgtgaccgtgtcatct

SEQ ID NO: 392 - DNA, 345 bp, Artificial Sequence
  Synthetic Polynucleotides
caggtgcagctccagcagtctggcgctgaactcgtgcggcctggcgcttctgtgaagctgtcttgcaaggccagcggctacaccttcaacgactacgagatgcactgggtcaagcagacccctgtgcacggcctgaagtggatcggagccctggaacccaagaccggcgataccgcctacagccagaagttcaagggcaaggccaccctgaccgccgacaagagcagcagcacagcctacatggaactgcggagcctgaccagcgaggacagcgccgtgtactactgcaccagctgctactactacacctacagcggccagggcaccctcgtgacagtgtctgct

SEQ ID NO: 393 - DNA, 357 bp, Artificial Sequence
  Synthetic Polynucleotides
caggtgcaactccaggaatctggccctggcctcgtgaagcctagccagaccctgagcctgacctgtaccgtgtctggcggcagcatcagcagcttcaactactactggtcctggatcagacaccaccctggcaagggcctggaatggatcggctacatctactacagcggcagcacctacagcaaccccagcctgaagtcccgcgtgaccatctccgtggacaccagcaagaaccagtttagcctgaccctgtccagcgtgacagccgccgataccgccgtgtactactgcgccagaggctacaactggaactacttcgactactggggccagggaaccctcgtgaccgtgtctagt

SEQ ID NO: 394 - DNA, 348 bp, Artificial Sequence
  Synthetic Polynucleotides
gaagtgcagctcgttgagtctggcggcggactgattcaacctggcggaagcctgagactgagctgtgccgcttccggcttcaccttcagcaactacgccatgaactgggttcgacaggcccctggcaaaggactggaatgggtgtccaccatcaacggcagaggcagcagcaccatctacgccgattctgtgaagggcagattcaccatcagccgggacaacagcaagaacaccctgtacctccagatgaactccctgagagccgaggacaccgccacctattactgtgcccggtacatcagcagaggactgggcgattcttggggccagggcacactggttacagtg

SEQ ID NO: 395 - DNA, 351 bp, Artificial Sequence
  Synthetic Polynucleotides
gaagttcagctggttgaatctggcggcggactggttaagcctggcggatctctgagactgtcttgtgccgccagcggcttcaccttcagcgattactacatgagctggatcagacaggcccctggcaaaggactggaatgggtgtcctacatcagcagcagcggctccaccatctactacgccgatagcgtgaagggcagattcaccatcagccgggacaacgccaagaacagcctgtacctccagatgaactccctgagagccgaggacaccgccgtgtactattgcgccagaggctacggcaaagcctacgatcaatggggccagggcacactggtcaccgtttcttct

SEQ ID NO: 396 - DNA, 342 bp, Artificial Sequence
  Synthetic Polynucleotides
gaagttcaactggtggaaaccggcggcaacctggttcaacctggcgcttctctgagactgagctgtgccgccagcggctttagctttagcggaacagccatgcactgggtccgacaggcacctggcaaaggactggaatgggtgtccaccatcagcagcacaggcagaagcacctactaccgggacagcgtgaagggcagattcaccatctccagagacaacagcaagaacaccctgtacctccagatgaacagcctgagaggcgaggacaccgccgtgtactattgtgccagagtgtccttcgactactggggccagggaaccctggtcacagtctcttct

SEQ ID NO: 397 - DNA, 354 bp, Artificial Sequence
  Synthetic Polynucleotides
gaagttcagctggttgaaagcggcggagcctttgttcagcctggcggatctctgagactgagctgtgccgccagcggcttcacattttccagctacgccatgacctgggtccgacaggctcctggcaaaggactggaatgggtgtccaccatctccggcagaggcagaagcaccttctacgccgatagcgtgaagggcagattcacaatcagccgggacaacagcaagaacaccctgtacctccagatgaacagcctgagagccgaggataccgccgtgtactactgtgcccggtactatcacgctggcgcctttgatctttggggccagggaacactggtcaccgtgtcatct

SEQ ID NO: 398 - DNA, 360 bp, Artificial Sequence
  Synthetic Polynucleotides
gaagtgcaactggtggaatctggcggcggactggtgcagcctggcggatctctgagactgagctgtgccgccagcggcttcaacatcaaggacacctacatccactgggtgcgccaggcccctggaaagggactggaatgggtggcccggatctaccccaccaacggctacaccagatacgccgacagcgtgaagggccggttcaccatcagcgccgacaccagcaagaataccgcctacctccagatgaacagcctgcgggccgaggataccgccgtgtactactgctcaagatggggaggcgacggcttctacgctatggacgtgtggggccagggcacccttgtgaccgtgtcatct

SEQ ID NO: 399 - DNA, 387 bp, Artificial Sequence
  Synthetic Polynucleotides
caggtgcagctgctccagtctggcgctgccgtgacaaagcctggcgcttctgtgcgggtgtcctgtgaagccagcggctacaacatccgggactacttcatccactggtggcggcaggctccaggccagggactccagtgggtgggatggatcaaccccaagaccggccagcccaacaaccccagacagttccagggcagagtgtccctgaccagacacgccagctgggacttcgacaccttcagcttctacatggatctgaaggccctgcggagcgacgataccgccgtgtacttctgcgccagacagagaagcgactactgggatttcgacgtgtggggcagcggcacccaagtgacagtgtctagcgccagcaccaagggaccc

SEQ ID NO: 400 - DNA, 354 bp, Artificial Sequence
  Synthetic Polynucleotides
gaggtgcaactggtggaaacaggcggcggactggtgcagcctggcgagtctctgagactgagctgtgccgccagcggcttcaccttcagcgactacgagatgaactgggtgcgccaggcccctggaaagggcctggaatgggtgtcctacatcagcagctccggcagcaccatctactacgccgacagcgtgaagggccggtttaccatctaccgggacaacgccaagaacagcctgtacctccagatgaactccctgcgggccgaggacaccgccctgtactattgtgccagagcctggggcgtgggaccccctgattattggggacagggcaccctcgtgaccgtgtcctct

SEQ ID NO: 401 - DNA, 405 bp, Artificial Sequence
  Synthetic Polynucleotides
cagccccagctccaggaatctggccccacactggtggaagccagcgagacactgagcctgacctgtgccgtgtccggcgattctaccgccgcctgcaatagcttctggggctgggtgcgccagcctcctggaaagggactggaatgggtgggaagcctgagccactgcgccagctattggaaccggggctggacctaccacaaccccagcctgaagtccagactgaccctggccctggacacccccaagaacctggtgttcctgaagctgaacagcgtgacagccgccgacaccgccacctactactgtgccagatttggcggcgaggtgctgcggtacaccgactggcctaaacctgcctgggtggacctgtggggcagaggaacactcgtgaccgtgtccagc

SEQ ID NO: 402 - DNA, 363 bp, Artificial Sequence
  Synthetic Polynucleotides
caggtgcagctggtgcagtctggcggccagatgaagaaacccggcgagagcatgagaatcagctgtcgggcctccggctacgagttcatcgactgcaccctgaactggatcagactggcccctggcaagcggcctgagtggatgggatggctgaagcctagaggcggagccgtgaactacgccagacctctccagggcagagtgaccatgaccagggacgtgtacagcgataccgccttcctggaactgcggagcctgaccgtggatgataccgccgtgtacttctgcaccagaggcaagaactgcgattacaactgggacttcgagcactggggcagaggcacccctgtgatcgtgtctagc

SEQ ID NO: 403 - DNA, 384 bp, Artificial Sequence
  Synthetic Polynucleotides
ctggaacagagcggagccgaagtgaagaaacccggcagcagcgtgcaggtgtcctgcaaagcaagcggcggcaccttctctatgtacggcttcaactgggtgcgccaggctcctggacacggcctggaatggatgggcggcatcatccccatcttcggcacctccaactacgcccagaaattccggggcagagtgaccttcaccgccgaccaggccacaagcaccgcctacatggaactgaccaacctgcggagcgacgacaccgccgtgtattattgcgccagagacttcggccccgactgggaggatggcgacagctacgatggcagcggcagaggcttcttcgacttctggggccagggaacccttgtgaccgtgtcctca

SEQ ID NO: 404 - DNA, 369 bp, Artificial Sequence
  Synthetic Polynucleotides
caagttcaactggttcaatcaggcggaggcgtggtgcaacctggtggctctctgagagtgtcttgtgctgcctctggcgtgaccctgagcgactatggaatgcactgggtccgacaggcccctggcaaaggacttgagtgggtcgccttcatcagaaacgacggcagcgacaagtattacgccgacagcgtgaagggcagattcaccatcagccgggacaacagcgagaaaaccgtgtctctccagatgtctagcctgagagccgaggacaccgccgtgtactactgtgccaagaatggcgagagcggccctctggactactggtatctggatctgtggggcagaggcaccctggtcacagtctcttct

SEQ ID NO: 405 - DNA, 366 bp, Artificial Sequence
  Synthetic Polynucleotides
gaagtgcaggtggaagtgtctggcggcggactggtgcagcctggcggatctatgagactgagctgtgccgtgtccggcttcaccttcagcaactactggatgaactgggtgcgccagtcccccgagaagggcctggaatggatcgccgagatccggctgaagtccaacaacttcgcccggtactacgccgagagcgtgaagggcagattcaccatcagccgggacaacagcaagaacagcctgtacctccagatgatctccctgagagccgaggacaccgccatctactactgcaccagctacggcaactacgtgggccactacttcgaccactggggccagggaacactgctgaccgtgtctagc

SEQ ID NO: 406 - DNA, 366 bp, Artificial Sequence
  Synthetic Polynucleotides
cttgaaatggcccaggttcagctccagcagtggggagctggactgctgaagcctagcgagacactgagcctgacctgtgctgtgtacggcggcagcttcagcggctactactggtcctggatcagacagcctcctggcaaaggactggaatggatcggcgagatcaaccacagcggctccaccaactacaaccccagcctgaagtccagagtgaccatcagcgtggacaccagcaagaaccagttctccctgaagctgagcagcgtgacagccgctgataccgccgtgtactattgcgctagagcccctcagtcttggtacgtgggagatgtgtggggccagggcacactggttacagtgtcatct

SEQ ID NO: 407 - DNA, 366 bp, Artificial Sequence
  Synthetic Polynucleotides
caagttcaactggttcagagcggagccgaagtgaagaaacctggcagcagcgtgaaggtgtcctgcaaagcaagcggcggcacctttagcagctacgccatctcttgggtccgacaggcacctggacaaggactggaatggatgggcggcatcatccccatcttcggcacagccaattacgcccagaaattccagggcagagtgaccatcaccgccgacgagtctacaagcaccgcctacatggaactgagcagcctgagaagcgaggacaccgccgtgtactattgtgccagaggcgtgtacggctacagcggctctgccccttatgatgagtggggccagggaaccctggtcaccgtttcttct

SEQ ID NO: 408 - DNA, 366 bp, Artificial Sequence
  Synthetic Polynucleotides
gaagtgcagctggtgcagtctggcgctgaggtgtccgtgaaggtgtcctgcaaagccagcggcggcaagaagcccggcagcacctttagcagctacaccatcagctgggtgcgccaggcacctggacagggcctggaatggatgggcggcatcatccccatcttcggcaccgccaactacgcccagaaattccagggcagagtgaccatcaccgccgacaagagcaccagcaccgcctacatggaactgagcagcctgcggagcgaggacacagccgtgtattattgtgccggcgacaccgacagcagcggctactatggcgctgtggactattggggccagggaaccctcgtgaccgtgtcctct

SEQ ID NO: 409 - DNA, 372 bp, Artificial Sequence
  Synthetic Polynucleotides
caggtgcaactggtgcagtctggcggcggagtggtgcagcctggaagaagcctgagactgagctgtgccgccagcggcttcaccttcagcagctacggaatgcactgggtgcgccaggcccctggcaaaggactggaatgggtggccgtgatctcctacgacggctccaacaagtattacgccgacagcgtgaagggccggttcaccatctccagagacaacagcaagaacaccctgtacctccagatgaacagcctgcgggccgaggacaccgccgtgtactattgcgccagagacttcgactacggcgacagctactactactatggcatggacgtgtggggccagggcacaaccgtgaccgtgtcatct

SEQ ID NO: 410 - DNA, 354 bp, Artificial Sequence
  Synthetic Polynucleotides
gaagtgcaactgctggaatctggcggcggactggtgcagcctggcggatctctgagactgagctgtgccgccagcggcttcacctttagctggtacagcatgacctgggtgcgccaggcccctggcaaaggactggaatgggtgtccagcatcgtgccctggggcgatttcacccagtacgccgatagcgtgaagggccggttcaccatcagccgggacaacagcaagaacaccctgtacctgcagatgaacagcctgcgggccgaggacaccgccgtgtactattgtgccaagggacctggctggggcagcttcgatctgtggggcagaggaacccttgtgaccgtgtccagc

SEQ ID NO: 411 - DNA, 348 bp, Artificial Sequence
  Synthetic Polynucleotides
gaagtgcaactggtggaatctggcggcggactggtgcagcctggcggatctctgagactgagctgtgccgccagcggcttcagcctgaccaaatacggcgtgcactgggtgcgccaggcccctggaaaaggactggaatgggtgggagtgaagtgggctggcggctccaccgactacaacagcgccctgatgagccggttcaccatcagcaaggacaacgccaagaacagcctgtacctccagatgaactccctgcgggccgaggacaccgccgtgtactactgtgccagagatcaccgggacgctatggactactggggccagggaacactcgtgaccgtgtcctct

SEQ ID NO: 412 - DNA, 366 bp, Artificial Sequence
  Synthetic Polynucleotides
gaagtgcaactggtggaatcaggcggcggactggtgcagcctggcggatctctgagactgagctgtgccgccagcggcttcaccttcagcagaaacggcatgagctgggtgcgccaggcccctggaaaaggactggaatgggtggcaaccgtgtccagcggcggcagctacatctactacgccgacagcgtgaagggccggttcaccatctccagagacaacgccaagaacagcctgtacctccagatgaactccctgcgggccgaggacaccgccgtgtactattgtgccagacagggcaccaccgccctggctaccagattcttcgatgtgtggggccagggcaccctcgtgaccgtgtcatct

SEQ ID NO: 413 - DNA, 321 bp, Artificial Sequence
  Synthetic Polynucleotides
gacattcaaatgacgcagagcccctcctctctgtcagcgagcgtgggagatagtgtcacgattacttgtcaggccagccaagacatttcctcatatctgaactggtatcagcagaagcccggcaaggcccccgaactgttgatctactacggcagcgagttggaatccggcgttccttctcgcttttccgggtccggctctggaacagatttcaccttcaccatttctagccttgaagcagaagacgccgccacttactactgcgggcaaggtaaccgattgccgtacaccttcggccagggtacaaaagtggaaatcgag

SEQ ID NO: 414 - DNA, 384 bp, Artificial Sequence
  Synthetic Polynucleotides
caagttcagctccagcagtctggccctggcctggttaagcctagccagacactgagcctgacctgtgccatcagcggcgatagcgtgtccagctacaacgccgtgtggaactggatcagacagagcccatccagaggactggaatggctgggcagaacctactacagaagcggctggtacaacgactacgccgagagcgtgaagtcccggatcaccatcaatcccgacaccagcaagaaccagttcagcctgcaactgaacagcgtgacccctgaggataccgccgtgtactactgtgctagaagcggccacatcaccgtgttcggcgtgaacgtggacgccttcgatatgtggggccagggaacaatggtcaccgtgtctagt

SEQ ID NO: 415 - DNA, 363 bp, Artificial Sequence
  Synthetic Polynucleotides
gaggttcagctccagcagtctgggactgtgctggcaaggcctgggacttccgtgaagatgtcctgcagggcttctggctacagctttaccaccttctggatgcactgggtaaaacagaggcctggacagggtccagaatggattggtgctatttatcctgaaaatagtgatactaggtacaacccgactttcaaggacaaggccgaactgactgcagtcacatccgccaacactgtctacatggaactcagcagcctgacagatgaggactctgcggtctattactgtacaagaccgtccctctatgctatggactactggggtcaaggaacctcagtcaccgtctcctcagccaaaacaaca

SEQ ID NO: 416 - DNA, 366 bp, Artificial Sequence
  Synthetic Polynucleotides
cagatccagctggtgcagagcggccctgacctgaagaaacccggcgagacagtgaagatcagttgcaaggcctccggctacaccttcaccaacacaggcatgaactgggtcaagcaggcccctggcaagggcctgaagtggatgggctggatcaacacctacaccggcgagcccacctacgccgacgacttcaagggccggttcaccttcagcctggaaaccagcgccagcaccgcctacctgcagatcaacaacctgaagaacgaggacaccgccacctatttctgcaccagatggggctacggcagcagcctgtactacgccatggactactggggccagggcaccagcgtgaccgtgtcctct

SEQ ID NO: 417 - DNA, 351 bp, Artificial Sequence
  Synthetic Polynucleotides
gaagtgcaactggtgcagtccggcggagggctggtgcagagcggaggatctctgagactgagctgcagagccagcggctacaccttcacccggtactggatgctgtgggtgcgccagaggccaggcaagggactggaatgggtggccgagatcaacccccggaacgaccggaccaactacaacgagaagttcaagacccggttcaccatcagcgtggacagaagcaagaacaccctgtacctgcagatggacagcctgcgggccgaggataccgccgtgtacttttgtgctctgggaggcggctacgctatggactactggggccagggaacccttgtgaccgtgtcctct

SEQ ID NO: 418 - DNA, 354 bp, Artificial Sequence
  Synthetic Polynucleotides
caggtgcaactggtgcagagcggagccgagcttgtgaagcctggcgcttccgtgaagatgagctgcaaagccagcggctacatcttcaccaactacaacatccactgggtcaagaagtccccaggccagggcctggaatggatcggagccatctaccccggaaacggcgacgccccttacagccagaagttccaggacagagccaccctgaccgccgacaccagcagcagcaccacctacatggaactgagcagcctgaccagcgaggacagcgccgtgtactattgcgtgcgggccaactgggatgtggccttcgcctattggggccagggcacactggtgtccgtgtcctct

SEQ ID NO: 419 - DNA, 357 bp, Artificial Sequence
  Synthetic Polynucleotides
caggtgcaactccagcagtctggcgcttccgtgaaggtgtcctgcaaggccagcgaactcgtgcggcctggcacaggctacgccttcaccaattacctgatcgagtgggtcaagcagaggcccggacagggcctggaatggatcggagtgattaacccaggcagcggcggcaccaactacaacgagaagttcaagggcaaggccaccctgaccgccgacaagagcagcagcacagcctacatgcaactgagcagcctgaccagcgacgacagcgccgtgtacttctgcgcccggtacagaagctacgactggtacttcgacgtgtggggagccggcaccaccgtgacagtgtcatct

SEQ ID NO: 420 - DNA, 354 bp, Artificial Sequence
  Synthetic Polynucleotides
gaggtgcaactggtggaatctggcggcggagtggtgcagcctggcagaagcctgagactgagctgtagcagcagcggccctaccttcagcgactactacatgtactgggtgcgccaggcccctggcaagggactggaatgggtggcctacatgagcaacgtgggagccatcaccgattaccccgacaccgtgaagggcagacccaccatcagccgggacaacagcaagaataccctgttcctgatggacagcctgcggcccgaggataccggcgtgtacttttgcgccagaggcaccagggacggcagttggttcgcctattggggccagggcacacccgtgaccgtgtctagt

SEQ ID NO: 421 - DNA, 357 bp, Artificial Sequence
  Synthetic Polynucleotides
caggtacagttgaaagaaagcgggcctggactggtagcgccttcccaatctctctccatcacgtgcaccatctctggcttctccctgacttcctatggagttcactgggtgaggcagccccccggcaagggactggaatggctggtcgtcatctggtccgacgggtccacaacctacaactccgctctgaaaagtcggctctctatttctaaagataatagcaagagccaggtgtttctgaaaatgaactctctgcagaccgatgatacggccatttactactgcgcttcacactatggctcaaccttggcattcgcttcctggggccacggaacactggtgaccgtttccgcagcc

SEQ ID NO: 422 - DNA, 381 bp, Artificial Sequence
  Synthetic Polynucleotides
gaggtacagctggaggaaagcggtggaggactggtgcaacctggagggtctatgaagctctcttgcgtagcttctgggttcacgttctccaattactggatgaactgggtgcggcagtcccccgagaaaggcctggaatgggtagcagaaattcggttcaagtcccataactatgctacacactttgccgagtctgtcaaaggccggttcactattagtcgagacgacagcaagtcttcagtctacctgcagatgaataacttgcgggcagaggacacaggtatctactactgcaccaggagaatcggcaactccgactatgactggtggtactttgacgtctggggagcaggcaccagcgtgacggtgagttcagcctca

SEQ ID NO: 423 - DNA, 360 bp, Artificial Sequence
  Synthetic Polynucleotides
gaagtgcaactccagcagagcggagccgaagtgaagaaacccggcagctccgtgaaggtgtcctgcaaggcttccggcggcaccttcagcagctacgccatttcttgggtgcgccaggcccctggacagggcctggaatggatgggcagaatcatccccatcctgggaatcgccaactacgcccagaaattccagggccgcgtgaccatcaccgccgacaagagcacaagcaccgcctacatggaactgagcagcctgcggagcgaggacaccgccgtgtactactgcgccagagatgtgggcagcggctcctacagcctggactattggggccagggcaccctcgtgaccgtgtctagt

SEQ ID NO: 424 - DNA, 354 bp, Artificial Sequence
  Synthetic Polynucleotides
caactccaactccaggaaagcggccctggcctcgtgaagcctagcgagacactgagcctgacctgcaccgtgtctggcggcagcatctccagcagctcctactactggggctggatcagacagccccctggcaagggcctggaatggatcggctccatctactacagcggaagcacctactacaaccccagcctgaagtcccgcgtgaccatcagcgtggacaccagcaagaaccagttctccctgaagctgagcagcgtgacagccgccgataccgccgtgtactactgtgccagacatgtgggccacgagctggattactggggccagggcacactcgtgaccgtgtctagt

SEQ ID NO: 425 - DNA, 357 bp, Artificial Sequence
  Synthetic Polynucleotides
caggtgcaactgcaggaatctggccctggcctcgtgaagcccagcgagacactgagcctgacctgtaccgtgtctggcggctctgtgtccagcggcagctactactggtcctggatcagacagccccctggcaagggcctggaatggatcggctacatctactacagcggctccaccaactacaaccccagcctgaagtcccgcgtgaccatctccgtggacaccagcaagaaccagttctccctgaagctgagcagcgtgacagccgccgataccgccgtgtactactgtgccagagagggcaagaacggggccttcgatatctggggccagggcacaatggtcaccgtgtcctct

SEQ ID NO: 426 - DNA, 357 bp, Artificial Sequence
  Synthetic Polynucleotides
caggtgcaactgcaggaatctggccctggcctcgtgaagcccagcgagacactgagcctgacctgtaccgtgtctggcggctctgtgtccagcggcagctactactggtcctggatcagacagccccctggcaagggcctggaatggatcggctacatctactacagcggctccaccaactacaaccccagcctgaagtcccgcgtgaccatctccgtggacaccagcaagaaccagttctccctgaagctgagcagcgtgacagccgccgataccgccgtgtactactgtgccagagagggcaagaacggggccttcgacatctggggccagggcacaatggtcaccgtgtcctct

SEQ ID NO: 427 - DNA, 354 bp, Artificial Sequence
  Synthetic Polynucleotides
gatgtgcagctccaggaatctggccccggactcgtgaagcctagccagagcctgagcctgacatgcaccgtgaccggctacagcatcaccatcgactacacctggaactggatcagacagttccccggcaacaaactggaatggatgggctacatcacctacagcggcagcaccgactacaaccccagcctgaagtccagaagctccatcaccagagacacctctatgaaccagttcttcttgcagctgaacagcgtgaccaccgaggacaccgccacctactattgcgccagactgggcagaagatacgccctggactattggggccagggcaccagcgtgacagtgtcctct

SEQ ID NO: 428 - DNA, 354 bp, Artificial Sequence
  Synthetic Polynucleotides
gatgtgcagctccaggaaagcggccctggcctcgtgaagcctagccagagcctgagcctgacatgcaccgtgaccggctacagcatcaccagcgactacacctggaactggatcagacagttccccggcaacaagctggaatggatgggctacatcacctacagcggcagcaccagctacaaccccagcctgaagtcccggaactccatcaccagagacaccagcaagaaccagttcttcttgcagctgaacagcgtgaccaccgaggacaccgccacctactactgcgccagactgggcagacggtacaccatggactattggggccagggcacctccgtgaccgtgtctagc

SEQ ID NO: 429 - DNA, 354 bp, Artificial Sequence
  Synthetic Polynucleotides
gacgtgcagctgcaggagagcggccccggcctggtgaagcccagccagagcctgagcctgacctgcaccgtgaccggctacagcatcaccagcgactacacctggaactggatcagacagttccccggcaacaagctggagtggatgggctacatcacctacagcggcagcaccagctacaaccccagcctgaagagcagaaacagcatcaccagagacaccagcaagaaccagttcttcctgcagctgaacagcgtgaccaccgaggacaccgccacctactactgcgccagactgggcagaagatacacaatggactactggggccagggcaccagcgtgaccgtgagcagc

SEQ ID NO: 430 - DNA, 360 bp, Artificial Sequence
  Synthetic Polynucleotides
gaggtgcagctggtggaatctgggggcggcctggtccaacctaagggatcactcaagctctcttgtgcggccagcggattctctttcaatacctatgctatgaattgggtgagacaggcgcccggaaagggcctcgaatggatagcccatatccggtcaaaatcaaacaatttcgcaacctactatgcggactccgtgaaggaccgattttccatctcccgagatgcctccgagaatattctgttcctgcagatgaataacctcaagacagaggacaccgccatgtactactgtgtgcgccagggcggtgactttcccatggattactgggggcaggggaccagcgtgaccgtgagctct

SEQ ID NO: 431 - DNA, 345 bp, Artificial Sequence
  Synthetic Polynucleotides
caggttcaactgcagcagtctggacctgaactggtgaagcctggggcctcagtgaagatgtcctgcaaggcttctggctacgcattcagtagttcctggttgaactgggtgaggcagaggcctggaaagggtcttgagtggattggacggatttatcctggagatggagaaaatcactataatgggaaattcaagggcaaggccacactgactgcagacaaatcctccagcacaggctacatgcaactcagcagcctgacgtctgaggactctgcggtctacttctgtgcaagttattatgaagggggttattggggccaagggactctaatcactgtctctgca

SEQ ID NO: 432 - DNA, 354 bp, Artificial Sequence
  Synthetic Polynucleotides
caggtccagctcgtccagtctggacccgaagtcaagaagccaggcgcctctgtgaaggtttcttgtaaggccagcggatatacattcactaattcatggatgaactgggtgaggcagcgccctggcaaggggcttgagtggatcgggcggatttacccaggggatggcgagacaatttacaacgggaaatttcgggtgagagtgacgatcaccgcagacgaatctacaagcacggcctacatggagttgtcctctctcaggagtgaggacaccgccgtctactattgtgctagaggttatgacgactattcattcgcatactggggccagggcaccaccgtcacagtatcatct

SEQ ID NO: 433 - DNA, 339 bp, Artificial Sequence
  Synthetic Polynucleotides
caggtgcagctgcagcagtcgggcccaggactggtgaagccttcggagaccctgtccctcacctgcactgtctctggtgactccatcagtagttactactggagctggatcaggcagcccccagggaagggactggagtggattgggtatatctattacagtgggagcaccaactacaacccctccctcaagagtcgagtcaccatatcagtagacacgtccaagagccagttctccctgaagctgagctctgtgaccgccgcagacacggccgtgtattactgtgcgcgcggcaggtacttcgatgtctggggacgaggcactatggtgactagcagc

SEQ ID NO: 434 - DNA, 345 bp, Artificial Sequence
  Synthetic Polynucleotides
gaggtcaagctggtagagagtggaggtgggctggttaaaccaggggggagcagaaaactgagttgtgccgcaagtggcttcaccttttctagctataccatgagctgggtaagacaaactccagcaaagcgccttgagtgggtcgcaacaattagcagcggatcttctactatttattacgctgacactgttaagggccggtttaccatatcaagagacaacgccaagaatacccttttccttcaaatgacttcactgcggtccgaggatacggcaatgtactattgtgcacgacggtggtttctcgactgctggggccaggggactacccttaccgtgtctagt

SEQ ID NO: 435 - DNA, 369 bp, Artificial Sequence
  Synthetic Polynucleotides
gaagtgcaactggtgcagagcggagccgaagtgaagaaacccggcagctccgtgaaggtgtcctgcaaggcttccggcggcaccttcagcagctacgccatttcttgggtgcgccaggcccctggacagggcctggaatggatgggcggcatcatccccatcttcggcaccgccaactacgcccagaaattccagggcagagtgaccatcaccgccgacgagagcaccagcaccgcctacatggaactgagcagcctgcggagcgaggacacagccgtgtattattgcgccagaggccccgagtattgcatcaacggcgtgtgcagcctggacgtgtggggccagggaacaaccgtgaccgtgtctagc

SEQ ID NO: 436 - DNA, 363 bp, Artificial Sequence
  Synthetic Polynucleotides
gaagtgcagctggtgcagtctggggccgaagtgaagaaacccggcagctccgtgaaggtgtcctgcaaggcttccggcggcaccttcagcagctacgccatttcttgggtgcgccaggcccctggacagggactggaatggatgggcggcatcatccccatcttcggcaccgccaactacgcccagaaattccagggcagagtgaccatcaccgccgacgagagcaccagcaccgcctacatggaactgagcagcctgcggagcgaggacacagccgtgtattattgcgccgtgcactacggcgactacgtgttcagcagcatggacgtgtggggccagggcacaaccgtgaccgtgtcatct

SEQ ID NO: 437 - DNA, 366 bp, Artificial Sequence
  Synthetic Polynucleotides
gtgaagctgcaggaatctggcggcggattcgtgaagcctggcggctctctgaaggtgtcctgtgccgccagcggcttcaccttcagcagctacgccatgtcctgggtgcgcctgagccccgagatgagactggaatgggtggcaaccatcagctccgcaggcggctacatcttctacagcgactccgtgcagggccggttcaccatctccagagacaacgccaagaacaccctgcatctgcagatgggcagcctgagaagcggcgacaccgccatgtactattgcgccagacagggcttcggcaactacggcgactactacgctatggactactggggccagggaaccaccgtgaccgtgtctagt

SEQ ID NO: 438 - DNA, 345 bp, Artificial Sequence
  Synthetic Polynucleotides
caagtgcatctccaggaaagcggacccggcctcgtgaagcctagcgagacactgagcctgacctgcaccgtgtccgacgacagcatcagcagctactactggtcctggatcagacagccccctggcaagggcctggaatggatcggccacatcagctacagcggcagcgccaactacaaccccagcctgaagtccagagtgaccatctccgtggacaccagcaagaaccagttctccctgaagctgagcagcgtgacagccgccgacaccgccgtgtattattgcgccaactgggacgacgccttcaacatctggggccagggcacaatggtcaccgtgtctagc

SEQ ID NO: 439 - DNA, 342 bp, Artificial Sequence
  Synthetic Polynucleotides
gtgcaactccaagagtccggccctgacctcgtgaagcctagccagtctctgagcctgacctgcaccgtgaccggctacagcatcaccagcggctactcttggcactggatcagacagttccccggcaacaagctggaatggatgggctacatccactacagcggcgacaccgactacaaccccagcctgaagtcccggttctccatcaccagagacaccagcaagaaccagttcttcttgcaactgaactccgtgaccaccgaggacaccgccacctactactgtgccacccctggcggctttgtgtactggggccagggaacactcgtgaccgtgtcctct

SEQ ID NO: 440 - DNA, 354 bp, Artificial Sequence
  Synthetic Polynucleotides
gtgcagctgctggaatctggcggcggactggtgcagcctggcggatctctgagactgagctgtgccgcctccggcttcaccttcagcacctaccagatgagctgggtgcgccaggcccctggcaaaggactggaatgggtgtccgggatcgtgtccagcggcggctctacagcctacgccgatagcgtgaagggccggttcaccatcagccgggacaacagcaagaacaccctgtacctgcagatgaacagcctgagagccgaggacaccgccgtgtactattgtgccggcgagctgctgccctactacggcatggatgtgtggggccagggcaccaccgtgaccgtgtcatct

SEQ ID NO: 441 - DNA, 357 bp, Artificial Sequence
  Synthetic Polynucleotides
gaagtgcagctgctggaatctggcggcggactggtgcagcctggcggatctctgagactgagctgtgccgccagcggcttcaccttcagcacctacgagatgcactgggtgcgccaggcccctggcaaaggactggaatgggtgtccgtgatcctgagcagcggcggagagacaaactacgccgacagcgtgaagggccggttcaccatcagccgggacaacagcaagaacaccctgtacctccagatgaacagcctgcgggccgaggacaccgccgtgtactattgtgccggaatgctgctgccctactacggcatggatgtgtggggccagggcaccaccgtgaccgtgtcatct

SEQ ID NO: 442 - DNA, 339 bp, Artificial Sequence
  Synthetic Polynucleotides
caggtgtacctggtggaaagcggagggggcgtggtgcagcctggaagaagcctgagactgagctgtgccgccagcggcttcaccttcagcaactacggaatgcactgggtgcgccaggcccctggcaaaggactggaatgggtggccctgatttggtacgacggcagcaacaagtattacgccgacagcgtgaagggccggttcaccatcagccgggacaacagcaagaacaccctgtacctccagatgaccagcctgcgggtggaagataccgccgtgtattattgcgccagcaacgtggaccactggggccagggaacactcgtgaccgtgtctagc

SEQ ID NO: 443 - DNA, 330 bp, Artificial Sequence
  Synthetic Polynucleotides
caggtgcagctggtggaaagtgggggaggatggcagcctggcagaagcctgagactggactgcaaggccagcggcatcaccttcagcaacagcggaatgcactgggtgcgccaggcccctggaaagggactggaatgggtggccgtgatctatgacggcagcaagcggtactacgccgacagcgtgaagggccggttcatcagccgggacaacagcaagaataccctgttcctccagatgaacagcctgcgggccgaggacacagccgtgtattattgcgccaccaacgacgactactggggccagggaacactcgtgaccgtgtcctct

SEQ ID NO: 444 - DNA, 354 bp, Artificial Sequence
  Synthetic Polynucleotides
gaagtgcagctggttgaatcaggtggcggcctggttcaacctggcggatctctgagactgagctgtgccgccagcggcttcacctttagcgacagctggattcactgggtccgacaggcccctggcaaaggacttgaatgggtcgcctggatcagcccttatggcggcagcacctattacgccgacagcgtgaagggcagattcaccatcagcgccgacaccagcaagaacaccgcctacctccagatgaactccctgagagccgaagataccgccgtgtactactgcgccagaaggcattggcctggcggctttgattattggggccagggcacactggtcaccgtgtcatct

SEQ ID NO: 445 - DNA, 345 bp, Artificial Sequence
  Synthetic Polynucleotides
caatctctggaagaaagcggaggcagactggtcaagcccgacgagacactgaccatcacctgtaccgtgtccggcatcgacctgagcagcaatggactgacctgggtccgacaagctcctggcgaaggactggaatggatcggcaccatcaacaaggacgccagcgcctactatgcctcctgggccaaaggcaggctgaccatctctaagcccagctccacaaaggtggacctgaagatcacaagccccaccaccgaggacaccgccacatacttttgtggccggatcgccttcaagaccggcacctctatttggggacctggcacactggtcaccgtgtctagt

SEQ ID NO: 446 - DNA, 321 bp, Artificial Sequence
  Synthetic Polynucleotides
gaagtgaagctggaagagtctggcggcgaccttgtgaagcctggcggcagcctgaagctgagctgtgccgccagcggctttaccttctccggctacggcatgagctgggtgcgccagacccccgacaagagactggaatgggtggcaaccatcagcagcggcggcagctacacctactatcccgacagcgtgaagggccggttcaccatctccagagacaacgccaagaacaccctgtacctgcagatgtcctccctgaagtccgaggacaccgccatgtactattgcgccaggcacgaaggcggctactacggcagttct

SEQ ID NO: 447 - DNA, 402 bp, Artificial Sequence
  Synthetic Polynucleotides
gtggctgctcctagatgggtgctgagccaggtgcagctccaggaatctggccccggactcgtgaagcctagccagaccctgagcctgacctgtaccgtgtctggcggcagcatcagcagcggcggctactactggatctggatcagacagcaccctggcaagggcctggaatggatcggctacatctactacaacggcaacacctactataaccccagcctgaagtcccgcgtgaccatgagcgtggacaccagcaagaaccagttctccctgaagctgtccagcgtgacagccgccgataccgccgtgtactactgcgccagagatggcatcaccatgatccggggctactattacggcatggacgtgtggggccagggaaccaccgtgaccgtgtcatct

SEQ ID NO: 448 - DNA, 390 bp, Artificial Sequence
  Synthetic Polynucleotides
ggactccagtgtgtggccgctcctagatgggtgctgagccaggtgcaactccagcagtggggagccggactgctgaagcctagcgagacactgagcctgacatgcgccgtgtacggcggcagcttcagcggcaattactggtcctggatcagacagccccctggcaagggcctggaatggatcggcgagatcaaccacagcggcagcaccaactacaaccccagcctgaagtccagagtgaccatcagcgtggacaccagcaagaaccagttctccctgaagctgagcagcgtgacagccgccgacaccgccgtgtattactgtgccagaggcggctcctacaattacttcgactactggggccagggaaccctcgtgaccgtgtctagt

SEQ ID NO: 449 - DNA, 369 bp, Artificial Sequence
  Synthetic Polynucleotides
caggtgcaactggtggaatctggcggaggcgtggtgcagcctggcagaagcctgagactgagctgtgccgccagcggcttcgccttcagcagatacggaatgcactgggtgcgccaggcccctggcaaaggactggaatgggtggccgtgatttggtacgacggcagcaacaagtactacgccgacagcgtgaagggccggttcaccatcagccgggacaacagcaagaacacccagtacctgcagatgaacagcctgcgggccgaggataccgccgtgtactattgtgccagaggcggcgacttcctgtactactactattacggcatggacgtgtggggccagggaaccaccgtgaccgtgtcatct

SEQ ID NO: 450 - DNA, 345 bp, Artificial Sequence
  Synthetic Polynucleotides
gaagtgcaactggtgcagagcggccctgaagtgaagaaacccggcgctaccgtgaagattagctgcaagaccagcggctacaccttcaccgagtacaccatccactgggtcaagcaggcccctggcaagggcctggaatggatcggcaacatcaaccccaacaacggcggcaccacctacaaccagaagttcgaggacaaggccaccctgaccgtggacaagagcaccgacaccgcctacatggaactgagcagcctgcggagcgaggataccgccgtgtactattgtgccgccggatggaacttcgactactggggacagggcaccctgctgaccgtgtctagt

SEQ ID NO: 451 - DNA, 360 bp, Artificial Sequence
  Synthetic Polynucleotides
cagatcaccctgaaagagtccggccccaccctcgtgaagcctacccagaccctgacactgacctgcaccttcagcggcttcagcctgagcaccagcaacatgggcgtgggctggatcagacagcctcccggaaaagccctggaatggctggcccacatttggtgggacgacgacaagtactacagccccagcctgaagtcccggctgacaatcaccaaggacaccagcaagaaccaggtggtgctgaccatgaccaacatggaccccgtggacaccgccacctactattgcgtgcggagcaactacggctacgcttggtttgcctactggggccagggcaccctcgtgaccgtgtcatct

SEQ ID NO: 452 - DNA, 345 bp, Artificial Sequence
  Synthetic Polynucleotides
caggtgcaactccagcagagcggagccgaactcgtgcggcctggcgtgtccgtgaagattagctgcaagggctccggctacaggttcaccgactaccccatccactgggtcaagcagagccacgccaagagcctggaatggatcggcatcatcagcacctactacggcgacgtgaccaacaaccccaagttccggggcaaggccaccatgacagtggacaagagcagcaccaccgcctacatggaactggcccggctgaccagcgaggactccgccatctactactgcgcccggaacgacctgttcgcctattggggccagggcaccctcgtgacagtgtctgct

SEQ ID NO: 453 - DNA, 357 bp, Artificial Sequence
  Synthetic Polynucleotides
gaagtgaagctggtggaatcaggaggaggcctcgtgaaacctggcggctctctgaagctgagctgtgccgccagcggcttcaccttcagcagctacgccatgagctgggtgcgccagattcccgagaagcggctggaatgggtggcctccattagcagaggcggcaccacctactaccccgacagcgtgaagggccggttcaccatctccagagacaacgtgcggaacatcctgtacctccagatgagcagcctgcggagcgaggacaccgccatgtactactgcggcagatacgactacgacggctactacgctatggactactggggccagggcaccagcgtgaccgtgtcatct

SEQ ID NO: 454 - DNA, 360 bp, Artificial Sequence
  Synthetic Polynucleotides
gaagtgaagctccaggaaagcggccctgagctcgtgaagcctggcgcctctgtgaagatgagctgcaaggccagcggctacaccttcaccagctacgtgatgcactgggtcaagcagaagcccggccagggcctggaatggatcggctacatcaacccctacaacgacggcaccaagtacaacgagaagttcaagggcaaggccaccctgaccagcgacaagagcagcagcaccgcctacatggaactgagcagcctgacctccgaggacagcgccgtgtactactgcgcccggtggaaaatctactacggcaactacgaggactactggggccagggcacacccctgacagtgtctagt

SEQ ID NO: 455 - DNA, 369 bp, Artificial Sequence
  Synthetic Polynucleotides
caggtgcaactggtggaatctggcggaggctctgtgcagcctggcagaagcctgagactgagctgtgaagcctccggcttcaccttcgaggcttacgccatgcactgggtgcgccagccacctggcaaaggactggaatgggtgtccagcatcaactggaacagcggcagaatcgcctacgccgacagcgtgaagggccggttcaccatcagccgggacaacgccagaaacagcctgtacctccagatgaacagcctgcggctggaagataccgccttctactactgcgccaaggacatccggcggttcagcacaggcggagccgagtttgagtattggggccagggcaccctcgtgaccgtgtctagt

SEQ ID NO: 456 - DNA, 378 bp, Artificial Sequence
  Synthetic Polynucleotides
caggtgcaactgctggaaagcggagggggcgtggtgcagcctggaagaagcctgagactgagctgtgccgccagcggcttcaccttcagcttctacggaatgcactgggtgcgccaggcccctggcaaaggactggaatgggtggccgccatcagctacgacggcagcaacaagtattacgccgacagcgtgaagggccggttcaccatcagccgggacaacagcaagaacaccctgtacctccagatgaacagcctgcgggccgaggacacagccgtgtattattgcgccaagcggcccaaccagttctactgctccgacggcagatgctacagcatcgactactggggccagggaaccctcgtgaccgtgtctagt

SEQ ID NO: 457 - DNA, 357 bp, Artificial Sequence
  Synthetic Polynucleotides
caggtgcagctgaaagaatctggccctggactggtggcccctagccagtctctgagcatcacctgtaccgtgtccggcttcagcctgagttctcagggcgtgtactgggtccgacagcctcctggaaaaggactggaatggctgggagccatttgggctggcggcagcaccaattacaacagcgccctgatgagccggctgagcatctccaaggacaacagcaagagccaggtgttcctgaagatgaacagcctccagaccgacgacaccgccatgtactactgcgccagagtggatggctaccggggctacaacatggactattggggccagggcaccagcgtgacagtctcttct

SEQ ID NO: 458 - DNA, 360 bp, Artificial Sequence
  Synthetic Polynucleotides
caggtgcaactggtggaatctggcggcggagtggtgcagcctggcagaagcctgagactgagctgtgccgccagcggcttcacctttagcagctacgccatgcactgggtgcgccaggcccctggaaaaggcctggaatgggtggccgtgatctcctacgacggctccaacaagtattacgccgacagcgtgaagggccggttcaccatctccagagacaacagcaagaacaccctgtacctccagatgaacagcctgcgggccgaggacaccgccgtgtactattgtgccagggctcacaacagcagctcttggagcttcgactactggggccagggcaccctcgtgaccgtgtcatct

SEQ ID NO: 459 - DNA, 372 bp, Artificial Sequence
  Synthetic Polynucleotides
gaagtgcggctgcagcagtctggccccgacctgattaagcctggggccagcgtgaagatgagctgcaaggccagcggctacaccttcaccggctacgtgatgcactgggtcaagcagaggccaggccagggcctggaatggatcggcttcatcaacccctacaacgacgacatccagagcaacgagcggttccggggcaaggccaccctgaccagcgataagagcagcaccaccgcctacatggaactgagcagcctgacctccgaggacagcgccgtgtactactgtgctaggggagccggctacaacttcgacggggcctacagattcttcgacttttggggccagggcaccacactgaccgtgtcctct

SEQ ID NO: 460 - DNA, 357 bp, Artificial Sequence
  Synthetic Polynucleotides
caggtgcaactggtggaaagcggagccgaagtgaagaaacctggggccagcgtgaaggtgtcctgcaaggccagcggctacacctttaccggctactacatgcactgggtgcgccaggctccaggccagggactggaatggatgggccggatcaaccccaatagcggcggcaccaactacgcccagaaattccagggcagagtgaccatgaccagagacaccagcatcagcaccgcctacatggaactgagccggctgagaagcgacgacaccgccgtgtactactgcgccagccctagaggcagaggcagcgccttcgatatttggggccagggcacactcgtgaccgtgtcctct

SEQ ID NO: 461 - DNA, 354 bp, Artificial Sequence
  Synthetic Polynucleotides
gaagtgcaactggtggaaagcgggggaggcgtggtgcagccaggcggatctctgagactgagctgtgccgccagcggcttcaccttcagcagctacgccatgagctgggtgcgccaggcccctggaaaaggcctggaatgggtgtccgccatctctggctctggcggcagcacctactacgccgatagcgtgaagggccggttcagcatcagccgggacaacagcaagaacaccctgtacctccagatgaacagcctgcgggccgaggacaccgccgtgtactactgtgccagaaccagaagctccggggccttcgacatctggggccagggaacactcgtgaccgtgtcctct

SEQ ID NO: 462 - DNA, 357 bp, Artificial Sequence
  Synthetic Polynucleotides
gaagtgcaactccagcagagcggcccagagcttgtgaagcctggcgcttccgtgaagattagctgcaaagccagcggctacagcttcaccggctacttcatgaactgggtcaagcagagccacggcaagagcctggagtacatcggcagattcaacccctacaacggcgagacactgtacaaccagaagttcaagggcaaggccaccctgaccgtggacaagagcagcagcaccgtgcacatggaactgctgagcgtgaccagcgaggacagcgccgtgtactactgtggcagaagcggcaacgacgacgctatggactattggggccagggcaccagcgtgaccgtgtctagtgct

SEQ ID NO: 463 - DNA, 369 bp, Artificial Sequence
  Synthetic Polynucleotides
caggtgcaactggtgcagtctggcggcggagtggtgcagcctggaagaagcctgagactgtcctgtgccgccagcggcttcaccttcagcagctacgccatgcactgggtgcgccaggcccctggaaaaggactggaatgggtggccgtgatctcctacgacggcagcaacaagtattacgccgacagcgtgaagggccggttcaccatctccagagacaacagcaagaacaccctgtacctccagatgaacagcctgcgggccgaggacacagccgtgtattattgcgccagagagctgcggttcctggaatggtccagcgacgccttcgacatctggggccagggaacaatggtcaccgtgtcctcc

SEQ ID NO: 464 - DNA, 357 bp, Artificial Sequence
  Synthetic Polynucleotides
caggtgcagctggtgcagtctggggccgaagtgaagaaacccggcagcagcgtgaaggtgtcctgcaaggcttccggcggcaccttcagcagctacgccatttcttgggtgcgccaggccccaggacagggcctggaatggatgggctggatcaacgtgggcaacggcaacgccatctacagccagaaattccagggccgcgtgacaatcaccagagacaccagcgccaccaccgcctacatggaactgagcagcctgcggagcgaggacaccgccgtgtactactgtgccagggatggcgagagagcctgggacctggattattggggccagggcacactcgtgaccgtgtcctct

SEQ ID NO: 465 - DNA, 354 bp, Artificial Sequence
  Synthetic Polynucleotides
caagtgcaactggttcagagcggtgccgaagtgcggaagcctggcagctctgtgaaggtgtcctgtaaagcctccggcggcagcttcaacaactaccccatcttctgggtccgacaggcccctggacagggctttgaatggatgggcagaatcatccccatcctgggcatcaccgcctacgctcagaaattccagggccgcgtgacaatcaccgccgacaagtctacaagcacagcctacatggaactgaacagcctgcggagcgaggacaccgccgtgtattattgtgccggcggagatgacctggacgcctttgacatttggggccagggaacaatggtgtccgtgtcctct

SEQ ID NO: 466 - DNA, 363 bp, Artificial Sequence
  Synthetic Polynucleotides
caactccaggtgcaggaatctggccccggactcgtgaagcccagcgagacactgagcctgacctgtaccgtgtccggcggcagcatcagcaacagctacttctcctggggctggatcagacagccccctggcaagggcctggaatggatcggcagcttctactacggcgagaaaacctactacaaccccagcctgaagtccagagccaccatcagcatcgacaccagcaagagccagttctccctgaagctgagcagcgtgacagccgccgacaccgccgtgtattattgccccagaggccccaccatgatccggggcgtgatcgactcttggggccagggaacactcgtgaccgtgtcctct

SEQ ID NO: 467 - DNA, 369 bp, Artificial Sequence
  Synthetic Polynucleotides
caggtgcaactggtggaatctggcgggggagtggtgcagcctggcagatccctgagactgagctgtgccgccagcggcttcatcttcagcagatacggaatgcactgggtgcgccaggcccctggcaagggactgaaatgggtggccgtgatttggtacgacggcagcaacaagctgtacgccgacagcgtgaagggccggttcaccatcagcagagacaacagcaagaacaccctgtacctgcagatgaacagcctgcgggccgaggacaccgccgtgtactattgcgccagagactactacgacaacagccggcaccactggggcttcgactattggggccagggaacccttgtgaccgtgtcctct

SEQ ID NO: 468 - DNA, 360 bp, Artificial Sequence
  Synthetic Polynucleotides
caggtgcaactccagcagtctggcgctgagcttgtgcggcctggcacctctgtgaaggtgtcctgtaaagccagcggctacgtgttcaccaactactggatcgagtggatcaagcagcggccaggccagggcctggaatggatcggcgtgatgaatccaggcagcggcgagacaacctacaacgagaagttcaagggcaaggccaccctgaccgccgacaagagcagcagcacagcctacatgcaactgtcctccctgaccagcgtggacagcgccgtgtacttctgcgccagggaccacgaccgggactactacgctatggactactggggccagggcaccagcgtgaccgtgtcatct

SEQ ID NO: 469 - DNA, 348 bp, Artificial Sequence
  Synthetic Polynucleotides
caggtgcaactccagcagtccgacgccgagcttgtgaagcctggcgcttccgtgaagattagctgcaaggccagcggctacaccttcaccgaccacgccattcactgggtcaagcagaagcccgagcagggcctggaatggatcggctacttcagccccggcaacggcgacatcaagtacaacgagaagttcaagggcaaggccaccctgaccgccgacaagagcagcagcacagcctacatgcaactgaacagcctgaccagcgaggactccgccgtgtacttctgcaagcggagctacggcaactacgactactggggccagggcaccacactgaccgtgtctagt

SEQ ID NO: 470 - DNA, 348 bp, Artificial Sequence
  Synthetic Polynucleotides
caggtgcagctggtgcagtctggggccgaagtgaagaaaaccggcagcagcgtgaaggtgtcctgcaaggccagcggctacacctttaccgaccacgccattcacgtgtggcggcaggctccaggacaggccctggaatggatgggccacttcagccccggcaacaccgacatcaagtacaacgacaagttcaagggcagagtgaccctgaccgtggaccgcagcatgagcaccgcctacatggaactgagcagcctgcggagcgaggacaccgccatgtactattgcaagaccagcaccttctttttcgactactggggccagggaacaatggtcaccgtgtccagc

SEQ ID NO: 471 - DNA, 363 bp, Artificial Sequence
  Synthetic Polynucleotides
cagatccaactggtgcagagcggccacgaagtgaagaaacctggggccagcgtgaaggtgtcctgcaaagccagcggctacacctttaccaactacggcatgaactgggtgcgccaggcccctggacagggcctggaatggatgggctggatcaacaccaagaccggcgagcccacctacgccgaagagttcaagggcagattcgtgttcagcctggaaaccagcgcctccaccgcctacctccagatcagctctctgaaggccgaggacaccgccatgtacttttgcggcagaggcggctacggcagcagctactggtacttcgatgtgtggggccagggcaccaccgtgaccgtgtcatct

SEQ ID NO: 472 - DNA, 357 bp, Artificial Sequence
  Synthetic Polynucleotides
caggtgcaactccaggaatctggccctggccttgtgaagcccagcgagacactgagcctgacctgtaccgtgtccggcggcagcatcagctcttacggcgtgcactggattcggcagcctccaggcaagggcctggaatggatcggcgtgatctggacctccggcgtgaccgactacaacagcgccctgatgggcagagtgaccatctccgtggacaccagcaagaaccagttcagcctgaagctgagcagcgtgacagccgccgataccgccgtgtattattgcgccagagatggcgactacgaccgctacacaatggactactggggccagggaacccttgtgaccgtgtcctct

SEQ ID NO: 473 - DNA, 378 bp, Artificial Sequence
  Synthetic Polynucleotides
gaagtgcagctggtggaatctggcggcggactgattcagcctggcggctctctgagactgagctgtgccgcctctggcttcaccgtgtcctccaactacatgagctgggtgcgccaggcccctggcaagggactggaatgggtgtccgtgacatacagcggcggcagcaccagctacgccgatagcgtgaagggccggttcaccatcagccgggacaacagcaagaacaccctgtacctccagatgaacagcctgcgggccgaggacaccgccgtgtactattgtgccaggggaggccggtactgctccagcatcagctgctatgccagaagcggctgcgactactggggccagggaacactcgtgaccgtgtccagt

SEQ ID NO: 474 - DNA, 357 bp, Artificial Sequence
  Synthetic Polynucleotides
caggtgcagctggtgcagtctggggccgaagtgaagaagcctggacagagcctgaagatcagctgcaaggccagcggctacagcctgaccgacaactggattggctgggtgcgccagaagccaggcaagggcctggaatggatgggcatcatctaccccggcgacagcgacaccagatacagccctagcttccagggccaagtgaccatctccgccgacaagagcatcaacaccgcctacctccagtggtccagcctgaaagcctccgacaccgccatctactactgtgtgggactggactggaactacaaccccctgcggtactggggacctggcacactcgtgaccgtgtcctct

SEQ ID NO: 475 - DNA, 351 bp, Artificial Sequence
  Synthetic Polynucleotides
gaagtgcaactccagcagagcggccctgagcttgtgaagccaggggccagcatgaagattagctgcaaagccagcggctacagcttcagcgcctacaccatgaactgggtcaagcagagccacggcaagaacctggaatggatcggcctgattaacccctacaacggcggcaccaactacaaccaggaatttgagggcaaggccaccctgacagtgaacaagagcagcaacaccgccttcatggaactgctgagcctgaccagcgacgacagcgccgtgtactactgcgccagacgggactgggactacttcgactattggggccagggcaccacactgaccgtgtcctct

SEQ ID NO: 476 - DNA, 366 bp, Artificial Sequence
  Synthetic Polynucleotides
caggtgcaactggtggaatctggcggcggacttgtgaagccaggcggcagcctgagactgagctgtgccgccagcggcttcagcatcaccaccagcggctactactggacctggatcagacagttccccggcaagggcctggaatggatgggctacatcggctacaacagcaagacctactacaaccccgccctgaagtcccggatcaccatcagcagagacaacgccaagaacagcctgtacctgcagatgaactccctgagagccgaggataccgccgtgtactactgcgccagatccctgtacggcggctacaaggacgccttcgatagctggggccagggaacccttgtgaccgtgtctagc

SEQ ID NO: 477 - DNA, 363 bp, Artificial Sequence
  Synthetic Polynucleotides
gaagtgcaactggtggaaagcggaggcggcgtggtgcagcctggaagaagcctgagactgagctgtgccgccagcggcttcaccttccggtcctacggaatgcactgggtgcgccaggcccctggcaaaggactggaatgggtggccgtgatctcctacgacggctccaacaagtactacaccgacagcgtgaacggcagattcaccatcagcagagacaacagcaagaacaccctgtacctccagatgaacagcctgcgggccgaggacaccgccgtgtactattgtgctagaggcggaggctactacgagacaagcggccctgattactggggccagggcacactcgtgaccgtgtctagt

SEQ ID NO: 478 - DNA, 357 bp, Artificial Sequence
  Synthetic Polynucleotides
caactccaactccaggaaagcggccctggcctcgtgaagcctagcggcacactgagcctgacatgtgccgtgtctggcggcagcatcagcagcagcaactggtggtcttgggtgcgccagcctcctggcaagggcctggaatggatcggcgaaatctaccacagcggcagcaccaactacaaccccagcctgaagtccagagtgaccatcagcgtggacaagagcaagaaccagttctccctgaagctgagcagcgtgacagccgccgataccgccgtgtactattgcgtgggcagcccctacggcgactacgtgctggattattggggccagggcaccctcgtgaccgtgtctagt

SEQ ID NO: 479 - DNA, 369 bp, Artificial Sequence
  Synthetic Polynucleotides
gaagtgcagctggtggaaacaggcggaggcgtggtgcagcctggcagaagcctgagactgagctgtgccgccagcggcttcaccttcagcagctacggaatgcactgggtgcgccaggcccctggcaaaggactggaatgggtggccgtgatctcctacgacggcagcaacaagtattacgccgacagcgtgaagggccggttcaccatctccagagacaacagcaagaacaccctgtacctccagatgaacagcctgcgggccgaggacaccgccgtgtactattgcgccaaggacagatacggctggggcagcagcttcggccacttcgattattggggccagggcaccctcgtgaccgtgtctagt

SEQ ID NO: 480 - DNA, 369 bp, Artificial Sequence
  Synthetic Polynucleotides
caggtgcaactccagcagtctggccccggactcgtgaagcctagccagacactgagcctgacctgcgccatcagcggcgatagcgtgtccggcaatagcgccacctggaactggatcagacagagcccatctcggggcctggaatggctgggccggacctactaccgcagcaagtggaaccacgactacgccgagagcgtgaagtcccggatcaccatcaaccccgacaccagcaagaaccagttctccttgcaactgaacagcgtgacccccgaggacacagccgtgtattattgcgccagaggcgacagcagctcttggtacgccttcgactattggggccagggcaccctcgtgaccgtgtctagt

SEQ ID NO: 481 - DNA, 363 bp, Artificial Sequence
  Synthetic Polynucleotides
cagatgcaactggtgcagagcggagccgaagtgaaagagcctggcgagagcctgcggatctcctgcaagggcagcggctacagcttcaccaatttctggatctcttgggtgcgccagatgcccggcaagggcctggaatggatgggcagagtggaccccggctactcctacagcacctacagccctagcttccagggccacgtgaccatcagcgccgacaagagcaccagcaccgcctacctccagtggaacagcctgaaggccagcgacaccgccatgtactactgcgccagagtgcagtacagcggctattacgattggttcgacccctggggccagggcacactcgtgacagtgtcaagc

SEQ ID NO: 482 - DNA, 354 bp, Artificial Sequence
  Synthetic Polynucleotides
caggtgcagctggtgcagtctggggccgaagtgaagaagcctggcgagagcctgaagatcagctgcaagggctccggctacaacttctctaacaagtggatcggctgggtgcgccagctgcctggcagaggactggaatggatcgccatcatctaccccggctacagcgacatcacctacagccccagcttccagggccgcgtgacaatcagcgccgacaccagcatcaacaccgcctacctgcactggcacagcctgaaggccagcgacaccgccatgtactactgcgtgcggcatacagccctggctggcttcgattattggggcctgggcaccctcgtgaccgtgtctagt

SEQ ID NO: 483 - DNA, 357 bp, Artificial Sequence
  Synthetic Polynucleotides
caggtgcaactggtgcagtctggggccgaagtgaagaaacccggcagctccgtgaaggtgtcctgcaaggcttccggcggcaccttcagcagctacgccatttcttgggtgcgccaggcccctggacagggcctggaatggatgggcggcatcatccccatctttggcaccgccaactacgcccagaaattccagggccgcgtgaccatcaccgccgacgagtctacaagcaccgcctacatggaactgagcagcctgcggagcgaggataccgccgtgtactactgtgccagaagaatccccccctactacggcatggacgtgtggggccagggaaccaccgtgaccgtgtcatct

SEQ ID NO: 484 - DNA, 363 bp, Artificial Sequence
  Synthetic Polynucleotides
gaagtgcaactggtgcagtctggcggaggggtcatgcggcctggcggatctctgagactgtcttgtgccgccagcggcttcaccttcgacgactacggcatgagctgggtgcgccaggcccctggaaaaggcctggaatgggtgtccggcatcaactggaatggcggcagcaccggctacgccgattctgtgcggggcagattcaccatcagccgggacaacgccaagaacagcctgtacctgcagatgaactccctgcgggccgaggacaccgccctgtactattgcgccagagagcggggctacggctaccacgaccctcacgattattggggccagggcacccttgttaccgtgtcctct

SEQ ID NO: 485 - DNA, 363 bp, Artificial Sequence
  Synthetic Polynucleotides
gaagtgcaactggtgcagtctggcggaggggtcgtgcggcctggcggatctctgagactgtcttgtgccgccagcggcttcaccttcgacgactacggcatgagctgggtgcgccaggcccctggaaaaggcctggaatgggtgtccggcatcaactggaatggcggcagcaccggctacgccgattctgtgcggggcagattcaccatcagccgggacaacgccaagaacagcctgtacctgcagatgaactccctgcgggccgaggacaccgccctgtactattgcgccagagagcggggctacggctaccacgaccctcacgattattggggccagggcacccttgtcaccgtgtcctct

SEQ ID NO: 486 - DNA, 360 bp, Artificial Sequence
  Synthetic Polynucleotides
gacgtgcagctggtggagagcggcggcggcctggtgcagcccggcggcagcagaaagctgagctgcgccgccagcggcttcaccttcagcagcttcgggatgcactgggtgagacaggcccccgagaagggcctggagtgggtggcctacatcagcagcggcagcagcaccctgcactacgccgacaccgtgaagggcagattcaccatcagcagagacaaccccaagaacaccctgttcctgcagatgaccagcctgagaagcgaggacaccgccatgtactactgcgccagatggggcaactacccccactacgctatggactactggggccagggcaccagcgtgaccgtgagcagc

SEQ ID NO: 487 - DNA, 357 bp, Artificial Sequence
  Synthetic Polynucleotides
caggtgcaactggtggaatctggcgggggagtggtgcagcctggcagaagcctgagactgtcttgtgccgccagcggcttcaccttcagcagctacgacatgcactgggtgcgccaggcccctggcaaaggactggaatgggtggccgtgatctcctacgacggcaccaacgagtattacgccgacagcgtgaagggccggttcaccatctccagagacaccagcaagaacaccctgtacctccagatgaacagcctgcgggccgaggacacagccgtgtattattgcgccagagagcggtacttcgactggtccttcgactactggggccagggaaccctggtgtccgtgtctagt

SEQ ID NO: 488 - DNA, 354 bp, Artificial Sequence
  Synthetic Polynucleotides
gaagttcagctggtgcagagcggagccgaagtgaagaaacctggggcctctgtgaaggtgtcctgcaaggcttccggctacacctttaccagctacgccatgcactgggtccgacaggcacctggacaacggcttgaatggatgggctggatcaacgccggcaacggcaacaccaagtacagccagaaattccagggccgcgtgaccatcaccagagatacaagcgccagcaccgcctacatggaactgtctagcctgagatccgaggacaccgccgtgtactactgtgccagagacatcagctacggcagcttcgactattggggccagggcacactggtcaccgttagctct

SEQ ID NO: 489 - DNA, 363 bp, Artificial Sequence
  Synthetic Polynucleotides
caagtgaagctgcaacagagcggacccgagctggttaagccaggcgcttccgtgaagattagctgcaaggccagcggctacagcttcaccggctactacatgcactgggtcaagcagagccacggcaacatcctggactggatcggctacatctacccctacaacggcgtgtccagctacaaccagaagttcaagggcaaagccactctgaccgtggacaagagcagcagcaccgcctacatggaactgagaagcctgaccagcgaggacagcgccgtgtactattgtgccagagagcggggcctgtaccagctcagagcaatggattattggggccagggcaccagcgtgaccgtttcttct

SEQ ID NO: 490 - DNA, 339 bp, Artificial Sequence
  Synthetic Polynucleotides
gaagttcagctccaagagtctggccccgacctggtcaagcctagccaaagcctgagcctgacctgtaccgtgaccggctacagcatcacaagcggctatggatggcactggatcagacagttccccggcaacaaactggaatggatgggctacatccactacagcggcagcaccacctacaatcccagcctgaagtcccggatcagcatcagcagagacaccagcaagaaccagttcttcctgcaactgaacagcgtgaccaccgaggacaccgccacctactattgtgctcggagcctgagatattggggccagggcacaaccctgaccgtgtcatct

SEQ ID NO: 491 - DNA, 348 bp, Artificial Sequence
  Synthetic Polynucleotides
gaagtgcaactggttcagagcggagccgaagtgaagaaacctggggcctctgtgaaggtgtcctgcaaggcttccggctacacctttaccaatttctggattcactgggtccgacaggctccaggccaaggactggaatggatcggagagatcgaccccagcgacagctacaccaactacaaccagaaattcaaaggccgggtcaccatcaccagagacaccagcacaagcaccgcctacctggaactgagcagcctgagaagcgaggacaccgccgtgtactactgcgccagggaaatcaccaccgtggattattggggccagggaaccctggtcaccgtgtcatct

SEQ ID NO: 492 - DNA, 363 bp, Artificial Sequence
  Synthetic Polynucleotides
gaagttcagcttgtgcagagcggagccgaagtgaagaaacctggggcctctgtgaaggtgtcctgcaaagccagcggctacacctttaccagctactggatcggctgggtccgacaggctcctggacaaggactggaatggatcggcgacatctatcccggcggaggctacaccaactacaacgagaagttcaagggccgcgtgacaatcaccagagacacctctacaagcaccgcctacctggaactgagcagcctgagaagcgaggacaccgccgtgtactactgcgccagactggatggcagcagctacagaggcgctatggattcttggggccagggcacactggtcaccgtttcttct

SEQ ID NO: 493 - DNA, 363 bp, Artificial Sequence
  Synthetic Polynucleotides
gaagtgcaactggttgaatctggcggcggactggttcagcctggcggatctctgagactgagctgtgccgtgtctggctacagcatcaccagcggctactcttggaactggatcagacaggcccctggcaaaggactggaatgggtcgcctccatcacctacgatggcagcaccaactacaaccccagcgtgaagggcagaatcaccatcagcagggacgacagcaagaacaccttctacctgcaaatgaacagcctgagagccgaggacaccgccgtgtactattgtgccagaggcagccactacttcggccactggcattttgctgtgtggggccagggaaccctggtcacagtttcttct

SEQ ID NO: 494 - DNA, 354 bp, Artificial Sequence
  Synthetic Polynucleotides
gaagtgcagcttgttgaatctggcggcggactggctaagcctggcggatctctgagactgtcttgtgccgccagcggcttccggttcaccttcaacaactactacatggactgggtccgacaggcccctggacaaggacttgaatgggtgtccagaatcagcagcagcggcgaccctacttggtacgccgattctgtgaagggcagattcaccatcagcagagagaacgccaagaacaccctgttcctccagatgaactccctgagagccgaggacaccgccgtgtactattgtgcctctctgaccaccggcagcgattcttggggacagggcgtgctggttaccgtgtcatct

SEQ ID NO: 495 - DNA, 357 bp, Artificial Sequence
  Synthetic Polynucleotides
caagttcagctgcaacaatggggagccggcctgctgaagcctagcgaaacactgtctctgacctgcgccgtgttcggcggctctttcagcggctactactggtcctggatcagacagcctcctggcaaaggactggaatggatcggcgagatcaaccaccggggcaacaccaacgacaaccccagcctgaaaagcagagtgaccatcagcgtggacaccagcaagaaccagttcgccctgaagctgagcagcgtgacagccgctgataccgccgtgtattattgcgccagagagcggggctacacctacggcaatttcgatcactggggccagggcaccctggtcacagtttcttct

SEQ ID NO: 496 - DNA, 360 bp, Artificial Sequence
  Synthetic Polynucleotides
gaagttcagctccttgagtcaggtggcggcctggttcaacctggcggatctctgagactgagctgtgccgccagcggcttcacctttagcagatacgccatgaactgggtccgacaggcccctggcaaaggactggaatgggtgtccggcatctctggaagcggcggcagaacctactacgccgattctgtgaagggcagattcaccatcagccgggacaacagcaagaacaccctgtacctccagatgaacagcctgagagccgaggacacagccgtgtattattgcgccaaggaccgggacttttggagcggcccttttgactattggggccagggaaccctggtcaccgttagctct

SEQ ID NO: 497 - DNA, 372 bp, Artificial Sequence
  Synthetic Polynucleotides
caggtgcaactccaggaatctggccccggactcgtgaagcccagcgagacactgagcctgacctgtaccgtgtccggctacaccatcaccagcggctacgactggtcctggatcagacagcctcctggcaagggcctggaatggatcggctacatcaactacggcggctccaccaactacaagcccagcctgggaagccgcgtgacaatcagcgtggacacctccaagaaccagttcagcctgaagctgagcagcgtgacagccgccgataccgccgtgtactactgcgcccggtacaacgagtacaagagctacatctacgattggtacttcgacttctggggccagggaaccctcgtgaccgtgtctagt

SEQ ID NO: 498 - DNA, 354 bp, Artificial Sequence
  Synthetic Polynucleotides
caagtgcaactggttcagagcggcgctgaagtgaagaaacctggggcctctgtgaaggtgtcctgcaaggcttccggctacacctttaccagctacgacgtgcactgggtccgacaggctccaggacaaagactggaatggatgggatggctgcacgccgataccggcatcaccaagttcagccagaaattccagggccgcgtgacaatcaccagagacacatctgccagcaccgcctacatggaactgagcagcctgagaagcgaggacaccgccgtgtactactgcgccagagagagaatccagctttggttcgactactggggccagggaaccctggtcacagtctcttct

SEQ ID NO: 499 - DNA, 372 bp, Artificial Sequence
  Synthetic Polynucleotides
gaagtgcaactggtggaatctggaggctctctggtgcagccagggggaagcctgagactgtcttgtgccgcttccggcttcaccttcgacgactacgccatgagctgggtgcgccaggtgccaggcaaaggcctggaatgggtgtccagcatcaactggagcggcacccacaccgattacgccgactccgtgaaaggcagattcacaatcagcagaaacaacgccaacaataccctgtacctgcagatgaactccctgaagtctgaggatacagcagtgtattattgcgccaagaactggcgggacgccggcaccacttggtttgagaaaagcggctctgccggacagggaacccaagtgacagtgtcctcc

SEQ ID NO: 500 - DNA, 354 bp, Artificial Sequence
  Synthetic Polynucleotides
gaggtgcaactggtggaaagcggcggaggcctggtgcaggctggcggatctctgagactgagctgtgccgccagcggcatcaccttcagcatcaacacaatgggctggtacagacaggcccctggcaagcagagggaactggtggccctgatctccagcatcggcgacacctactacgccgacagcgtgaagggccggttcaccatcagccgggacaacgccaagaacaccgtgtacctccagatgaacagcctgaagcccgaggacaccgccgtgtactactgcaagcggttcagaacagccgcccagggcaccgattattggggccagggaacacaagtgaccgtgtcctct

SEQ ID NO: 501 - DNA, 357 bp, Artificial Sequence
  Synthetic Polynucleotides
gaagtgcaactggtggaatctgggggcggactggtgcagccaggcggaagtctgaggctgtcttgtgccgcctccggcagcatcttcggcttcaacgacatggcctggtatcggcaggctcccggaaaacagcgcgagctggtggctctgattagcagagtgggcgtgaccagcagcgccgactctgtgaagggcagattcacaatctccagagtgaacgccaaggatacagtgtacctccagatgaactctctgaaacctgaggatacagcagtgtactattgctacatggaccagcggctggacggcagcacactggcctactggggacagggaactcaagtgacagtgtctagc

SEQ ID NO: 502 - DNA, 360 bp, Artificial Sequence
  Synthetic Polynucleotides
gacgtgcaactcgtggaatccggcggaggcctggtgcagcctggcggatctctgagactgagctgtgccgccagcggctctatcggcggactgaatgccatggcctggtacagacaggcccctggcaaagaacgggaactggtggccggcatctttggcgtgggcagcaccagatacgccgacagcgtgaagggccggttcaccatcagccgggacaacagcaagaacaccgtgtacctgcagatgaacagcctgcggcccgaggataccgccgtgtactactgcagaatgtccagcgtgaccagaggctccagcgactactggggccagggaacacttgtgaccgtgtccagtctcgag

SEQ ID NO: 503 - DNA, 375 bp, Artificial Sequence
  Synthetic Polynucleotides
gaagtgcaactggtggagtccggcggtggactggtacagcctgggggttcactgcgcctgtcctgcgccgccagcggaagaacctattacctcaatgctatgggttggttccgccaggccccaggaaaggagcgcgagttcgtggcggctattgactggtccgaggggaacaaggactatgctgattccgtgaagggcaggtttaccatcagccgggataattcaaaaaatactgtttatttgcagatgaactctcttagaccagaagacactgctgtctattactgcgccgctgacacccctccttggggaccactgatttatatcgaaagctatgattcctgggggcagggcacactcgtcaccgtgagtagc

SEQ ID NO: 504 - DNA, 369 bp, Artificial Sequence
  Synthetic Polynucleotides
gaggtgcaactggtggaatccgggggaggcagcgtgcaggctgggggatcactgagactgtcttgtgctgcctccggcgacacctacggcagctattggatgggatggtttcggcaggctcccggaaaagaacgggaaggcgtggccgccatcaacagaggcggcggatacaccgtgtacgccgactctgtgaagggcagattcacaatctccagagacacagccaagaatactgtgtacctgcagatgaactccctgcgccccgacgataccgccgactattattgcgccgcttccggcgtgctgggcggcctgcatgaggactggttcaattattggggacagggaacacttgtgacagtgtccagc

SEQ ID NO: 505 - DNA, 366 bp, Artificial Sequence
  Synthetic Polynucleotides
gttcagctcgtggaaagcggtggcggaagtgtgcaggccggaggcagtttgcgcctgagctgcgctgcttccggcgatacatacgggtcttactggatgggctggtttaggcaggcacctggacaagaaagagaagctgtggccgctattaacaggggaggtggctataccgtttatgctgattccgtgaagggccgattcacaatctcccgggataacgccaaaaacactctgtacctgcagatgaactcccttaggcccgatgacacagccgattactattgtgcggcctccggcgtgctgggtggtctgcatgaggattggttcaactactgggggcaaggcaccctcgtaaccgtgagtagc

SEQ ID NO: 506 - DNA, 372 bp, Artificial Sequence
  Synthetic Polynucleotides
gaggtgcaactggtggaaagcggcggaggctctgtgcagacaggcggctctctgagactgacctgtgccgccagcggcagaaccagcagatcctatggcatgggctggttcagacaggcccctggcaaagaacgcgagttcgtgtccggcatctcttggagaggcgacagcaccggctacgccgatagcgtgaagggccggttcaccatcagccgggacaacgccaagaacaccgtggacctgcagatgaacagcctgaagcccgaggacaccgccatctactactgtgccgctgccgccggatctgcttggtacggcacactgtacgagtacgactactggggccagggcacccttgtgaccgtgtcatct

SEQ ID NO: 507 - DNA, 372 bp, Artificial Sequence
  Synthetic Polynucleotides
gaggtgcagctcgtagaatctggaggtggttccgtgcaagccggaggatcattgcgactgacctgcgcagcgagcggatctacttctcgctcttacggtatgggatggttcagacaggctcctgggaaagagcgcgagttcgtttcaggcatctcctggaggggggacagcaccggctacgcagatagcgtgaagggcaggttcacgatcagccgagacaacgccaaaaacaccgtcgatctgcaaatgaatagtctgaagcccgaagatactgcgatctactactgtgccgccgcagcagggtccacctggtacggcacactctacgagtacgactactgggggcagggaaccctggtaaccgtgtcctct

SEQ ID NO: 508 - DNA, 375 bp, Artificial Sequence
  Synthetic Polynucleotides
gatgttcagttggtggagtctggtggcggtttggtgcagccaggtggctccctgcgactcagttgtgcagcctccgggttcattctggattactacgctattggttggtttcgacaggcccccggaaaggagagagagggcgtgctctgcattgatgccagcgacgacattacctactacgccgattctgtgaagggccgcttcaccatcagtagagacaatagcaagaatacagtctacctgcagatgaactccctgcgcccagaagacactgccgtctactactgtgctacccctatcgggctttcttcctcttgccttctcgaatatgactacgattactgggggcaggggacgctggtcaccgtgtctagc

SEQ ID NO: 509 - DNA, 378 bp, Artificial Sequence
  Synthetic Polynucleotides
gaggtgcaactggtggaaagcggcggaggactggtgcaggctggcgatagcctgagactgagctgtgccgcctccggcagagccttcagcagatatgccatgggctggttcagacaggcccctggcaaagaacgcgagttcgtggccgccatcggctggggacctagcaagaccaactacgccgacagcgtgaagggccggttcaccatcagccgggacaacgccaagaacaccgtgtacctgcagatgaacaccctgaagcccgaggacaccgccgtgtactcttgcgccgccaagttcgtgaacaccgacagcacctggtcccgcagcgagatgtacacctattggggccagggcaccctcgtgaccgtgtctagt

SEQ ID NO: 510 - DNA, 366 bp, Artificial Sequence
  Synthetic Polynucleotides
gaggtgcagctggtagaatccggcgggggacttgtacaggctggtggtagtctgagactgagctgtgtggcctccggcatcagcagcagcaagcggaacatgggatggtataggcaagcccctggtaagcagagggaatccgtggctacaatcagcagcggcggcaacaaggactacaccgacgccgtgaaggacaggttcaccatctccagggacaccaccaagaacaccgtgtacctgcagatgaactccctcaagcccgaggacaccgccgtgtactactgcaagatcgaggccggcacaggctgggccaccagaagaggctacacatactgggggcagggaacactggtgaccgtgagctcc

SEQ ID NO: 511 - DNA, 336 bp, Artificial Sequence
  Synthetic Polynucleotides
caggtgcaactggtgcagtctggcggagggctggtgcagccagggggatctctgagactgagctgtgccgccagcgacttcgacttcgccgcctacgagatgagctgggtgcgccaggctcctggacagggactggaatgggtggccatcatcagccacgacggcatcgacaagtattacaccgacagcgtgaagggccggttcaccatcagccgggacaacagcaagaacaccctgtacctgcagatgaataccctgcgggccgaggacaccgccacctactattgcctgagactgggagccgtgggccagggcacacttgtgacagtgtctagc

SEQ ID NO: 512 - DNA, 360 bp, Artificial Sequence
  Synthetic Polynucleotides
caggtgcaactggtgcagagcggaggcggactggtgcagcctgggggcagtctgaggctgtcttgtgccgcctccgatttcgccttcgatgattacgagatgtcttgggtgcggcaggccccaggcaaagccctggaatggatcggcgacatcaaccacagcggcaccaccatctacaaccccagcctgaagtccagagtgaccatctccagagacaactccaagaatactctgtacctgcagatgaacacactgagagccgaagatacagccatctactactgcgccagaccccactacggcgactacagcgacgccttcgacatctggggccagggaaccatggtcaccgtgtcctct

SEQ ID NO: 513 - DNA, 345 bp, Artificial Sequence
  Synthetic Polynucleotides
gaggtgcagctcgtggaatcaggcggaggtcttgtacagccaggaaattctcttcggctgtcttgcgccgcgagcgggttcaccttcagcagcttcggaatgagctgggtaagacaggcaccggggaaaggcctggagtgggtgagctcaatcagtgggagcgggtcagataccctgtacgcggattccgtgaagggcagattcacaatctctcgggacaatgctaagacaacactttaccttcagatgaactctctgcgacccgaggataccgctgtctactactgtacaataggaggttctctgtccagaagttctcaagggacactggtgaccgtctccagc

SEQ ID NO: 514 - DNA, 348 bp, Artificial Sequence
  Synthetic Polynucleotides
gaagttcaactggtggaatccggtggaggactggtgcaagcgggcggctcactgcgccttagctgtgctgccagcggcagtatcttcagcggcaatgtaatgggttggtacaggcgacaagccccaggcaaggagcgagagtgggtagccgcgattgcaagtgggggcagcatctactacagagattctgtgaaaggccgcttcactattagtcgggacaacgcaaaaaacacggtgtatctccaaatgaacagcttgaagccagaggacactgctgtctactattgtaacagtcatcccccaactctcccctattgggggctgggcactcaggtcaccgtgagttcc

SEQ ID NO: 515 - DNA, 378 bp, Artificial Sequence
  Synthetic Polynucleotides
gaagtgcaactggtggaatctggagggggaagcgtgcaggcaggcggatctctgagactgtcctgcaccacatctggcagagccctgaatatgtacgtgatgggatggtttcggcaggctcccggcaacgagcgggaatttgtggccgctacaagcagcagcggcggcagcacaagctaccccgattctgtgaagggcagattcacaatctcccgcgataatgccaagaatactgtgtacctgcagatgaatagtctgaagcctgaagatacagccgcctacagatgtgccgccagcccctacgtgtccacccccaccatgaacatcctggaagagtacagatactggggcctgggaacacaagtgacagtgtccagc

SEQ ID NO: 516 - DNA, 363 bp, Artificial Sequence
  Synthetic Polynucleotides
gaggttcagttggtcgaatcaggcgggggcctcgtccaacccggcggaagcctgcggctgtcttgcgcagcaagtggtagtgtgttcaagatcaacgttatggcctggtatcgccaggctccgggaaaagggagagagctggttgcggggatcattagcggtggctccaccagctacgctgacagtgtgaagggaaggttcactatatcacgcgacaacgcaaagaatacattgtacctccagatgaatagcttgcggcccgaagacacggcagtctactattgtgcctttatcacaacagagagcgactatgacctgggccgccggtattgggggcagggaacccttgtgaccgtttcatcc

SEQ ID NO: 517 - DNA, 798 bp, Artificial Sequence
  Synthetic Polynucleotides
gaggtgcaactggtggaaagcggcggaggctctgtgcagacaggcggctctctgagactgacctgtgccgccagcggcagaaccagcagatcctatggcatgggctggttcagacaggcccctggcaaagaacgcgagttcgtgtccggcatctcttggagaggcgacagcaccggctacgccgatagcgtgaagggccggttcaccatcagccgggacaacgccaagaacaccgtggacctgcagatgaacagcctgaagcccgaggacaccgccatctactactgtgccgctgccgccggatctgcttggtacggcacactgtacgagtacgactactggggccagggcacccttgtgaccgtgtcatctctcgagggcggaggcggaagtggaggcggaggatctggcggcggaggctctttcgaagaggtgcaactggtggaatccgggggaggcagcgtgcaggctgggggatcactgagactgtcttgtgctgcctccggcgacacctacggcagctattggatgggatggtttcggcaggctcccggaaaagaacgggaaggcgtggccgccatcaacagaggcggcggatacaccgtgtacgccgactctgtgaagggcagattcacaatctccagagacacagccaagaatactgtgtacctgcagatgaactccctgcgccccgacgataccgccgactattattgcgccgcttccggcgtgctgggcggcctgcatgaggactggttcaattattggggacagggaacacttgtgacagtgtccagc

SEQ ID NO: 518 - DNA, 855 bp, Artificial Sequence
  Synthetic Polynucleotides
gaggtgcagctcgtagaatctggaggtggttccgtgcaagccggaggatcattgcgactgacctgcgcagcgagcggatctacttctcgctcttacggtatgggatggttcagacaggctcctgggaaagagcgcgagttcgtttcaggcatctcctggaggggggacagcaccggctacgcagatagcgtgaagggcaggttcacgatcagccgagacaacgccaaaaacaccgtcgatctgcaaatgaatagtctgaagcccgaagatactgcgatctactactgtgccgccgcagcagggtccacctggtacggcacactctacgagtacgactactgggggcagggaaccctggtaaccgtgtcctctctcgagggaggaggcggctccgggggaggcggaagtggaggcggaggatctgggtctggaggaagcggatctggaggctcagggtcagggggctcaggcagtggaggctctttcgaagttcagctcgtggaaagcggtggcggaagtgtgcaggccggaggcagtttgcgcctgagctgcgctgcttccggcgatacatacgggtcttactggatgggctggtttaggcaggcacctggacaagaaagagaagctgtggccgctattaacaggggaggtggctataccgtttatgctgattccgtgaagggccgattcacaatctcccgggataacgccaaaaacactctgtacctgcagatgaactcccttaggcccgatgacacagccgattactattgtgcggcctccggcgtgctgggtggtctgcatgaggattggttcaactactgggggcaaggcaccctcgtaaccgtgagtagc

SEQ ID NO: 519 - DNA, 825 bp, Artificial Sequence
  Synthetic Polynucleotides
gaggtgcaactggtggaaagcggcggaggcctggtgcaggctggcggatctctgagactgagctgtgccgccagcggcatcaccttcagcatcaacacaatgggctggtacagacaggcccctggcaagcagagggaactggtggccctgatctccagcatcggcgacacctactacgccgacagcgtgaagggccggttcaccatcagccgggacaacgccaagaacaccgtgtacctccagatgaacagcctgaagcccgaggacaccgccgtgtactactgcaagcggttcagaacagccgcccagggcaccgattattggggccagggaacacaagtgaccgtgtcctctctcgagggaggaggcggctccgggggaggcggaagtggaggcggaggatctgggtctggaggaagcggatctggaggctcagggtcagggggctcaggcagtggaggctctttcgaagtgcaactggtggaatctgggggcggactggtgcagccaggcggaagtctgaggctgtcttgtgccgcctccggcagcatcttcggcttcaacgacatggcctggtatcggcaggctcccggaaaacagcgcgagctggtggctctgattagcagagtgggcgtgaccagcagcgccgactctgtgaagggcagattcacaatctccagagtgaacgccaaggatacagtgtacctccagatgaactctctgaaacctgaggatacagcagtgtactattgctacatggaccagcggctggacggcagcacactggcctactggggacagggaactcaagtgacagtgtctagc

SEQ ID NO: 520 - DNA, 726 bp, Artificial Sequence
  Synthetic Polynucleotides
gacatccagatgacccagagccccagcagcctgtctgccagcgtgggcgacagagtgaccatcacctgtagagccagccaggacgtgaacaccgccgtggcctggtatcagcagaagcctggcaaggcccccaagctgctgatctacagcgccagcttcctggaaagcggcgtgcccagcagattcagcggaagcagaagcggcaccgacttcaccctgaccatcagctccctccagcccgaggacttcgccacctactactgccagcagcactacaccacccctcccaccttcggccagaccaaggtggaaatcaagagaggcggaggcggaagtggaggcggaggatctggcggcggaggctctgaagtgcaactggtggaatctggcggcggactggtgcagcctggcggatctctgagactgagctgtgccgccagcggcttcaacatcaaggacacctacatccactgggtgcgccaggcccctggaaagggactggaatgggtggcccggatctaccccaccaacggctacaccagatacgccgacagcgtgaagggccggttcaccatcagcgccgacaccagcaagaataccgcctacctccagatgaacagcctgcgggccgaggataccgccgtgtactactgctcaagatggggaggcgacggcttctacgctatggacgtgtggggccagggcacccttgtgaccgtgtcatct

SEQ ID NO: 521 - DNA, 840 bp, Artificial Sequence
  Synthetic Polynucleotides
gacgtgcaactcgtggaatccggcggaggcctggtgcagcctggcggatctctgagactgagctgtgccgccagcggctctatcggcggactgaatgccatggcctggtacagacaggcccctggcaaagaacgggaactggtggccggcatctttggcgtgggcagcaccagatacgccgacagcgtgaagggccggttcaccatcagccgggacaacagcaagaacaccgtgtacctgcagatgaacagcctgcggcccgaggataccgccgtgtactactgcagaatgtccagcgtgaccagaggctccagcgactactggggccagggaacacttgtgaccgtgtccagtctcgagggaggaggcggctccgggggaggcggaagtggaggcggaggatctgggtctggaggaagcggatctggaggctcagggtcagggggctcaggcagtggaggctctttcgaagtgcaactggtggaatctggaggctctctggtgcagccagggggaagcctgagactgtcttgtgccgcttccggcttcaccttcgacgactacgccatgagctgggtgcgccaggtgccaggcaaaggcctggaatgggtgtccagcatcaactggagcggcacccacaccgattacgccgactccgtgaaaggcagattcacaatcagcagaaacaacgccaacaataccctgtacctgcagatgaactccctgaagtctgaggatacagcagtgtattattgcgccaagaactggcgggacgccggcaccacttggtttgagaaaagcggctctgccggacagggaacccaagtgacagtgtcctcc

SEQ ID NO: 522 - DNA, 864 bp, Artificial Sequence
  Synthetic Polynucleotides
gatgttcagttggtggagtctggtggcggtttggtgcagccaggtggctccctgcgactcagttgtgcagcctccgggttcattctggattactacgctattggttggtttcgacaggcccccggaaaggagagagagggcgtgctctgcattgatgccagcgacgacattacctactacgccgattctgtgaagggccgcttcaccatcagtagagacaatagcaagaatacagtctacctgcagatgaactccctgcgcccagaagacactgccgtctactactgtgctacccctatcgggctttcttcctcttgccttctcgaatatgactacgattactgggggcaggggacgctggtcaccgtgtctagcctcgagggaggtagcggctccgggggaggcggaagtggaggcggaggatctgggtctggaggaagcggatctggaggctcagggtcagggggctcaggcagtggaggctctttcgaagtgcaactggtggagtccggcggtggactggtacagcctgggggttcactgcgcctgtcctgcgccgccagcggaagaacctattacctcaatgctatgggttggttccgccaggccccaggaaaggagcgcgagttcgtggcggctattgactggtccgaggggaacaaggactatgctgattccgtgaagggcaggtttaccatcagccgggataattcaaaaaatactgtttatttgcagatgaactctcttagaccagaagacactgctgtctattactgcgccgctgacacccctccttggggaccactgatttatatcgaaagctatgattcctgggggcagggcacactcgtcaccgtgagtagc

SEQ ID NO: 523 - DNA, 813 bp, Artificial Sequence
  Synthetic Polynucleotides
caggtgcaactggtgcagtctggcggagggctggtgcagccagggggatctctgagactgagctgtgccgccagcgacttcgacttcgccgcctacgagatgagctgggtgcgccaggctcctggacagggactggaatgggtggccatcatcagccacgacggcatcgacaagtattacaccgacagcgtgaagggccggttcaccatcagccgggacaacagcaagaacaccctgtacctgcagatgaataccctgcgggccgaggacaccgccacctactattgcctgagactgggagccgtgggccagggcacacttgtgacagtgtctagcctcgagggaggaggcggctccgggggaggcggaagtggaggcggaggatctgggtctggaggaagcggatctggaggctcagggtcagggggctcaggcagtggaggcagcttcgaacaggtgcaactggtgcagagcggaggcggactggtgcagcctgggggcagtctgaggctgtcttgtgccgcctccgatttcgccttcgatgattacgagatgtcttgggtgcggcaggccccaggcaaagccctggaatggatcggcgacatcaaccacagcggcaccaccatctacaaccccagcctgaagtccagagtgaccatctccagagacaactccaagaatactctgtacctgcagatgaacacactgagagccgaagatacagccatctactactgcgccagaccccactacggcgactacagcgacgccttcgacatctggggccagggaaccatggtcaccgtgtcctct

SEQ ID NO: 524 - DNA, 372 bp, Artificial Sequence
  Synthetic Polynucleotides
ggctctgacctgggcatcaagctgctgttcgccgctgccaagggccaggacgacgaagtgcggattctgctggctgctggggccgacgtgaacgccaaggatttcgagggctacacccccctgcacgtggccgcctatgatggacacctggaaatcgtggaagtgctgctgaaggctggcgctgatgtgaatgccaaagacagccagggccggacccctctgcatgaagccgcctacagcggccatctggaaattgtggaagtgctgctgaaagccggggcagacgtgaacgctcaggacgacgctggcgagacaccagccgatctggctgcagcttggggccacgaagatatcgccgaggtgctgcagaag

SEQ ID NO: 525 - DNA, 378 bp, Artificial Sequence
  Synthetic Polynucleotides
agaagcgatctgggaaagaagctgctggaagctgccagagccggacaggatgatgaagtgcgcatcctgatggcaaacggcgcagatgtgaacgcaaaggacgagtacggcctgacccccctgtacctggctacagcccacgggcacctggaaattgtggaagtgctgctgaagaacggcgctgacgtgaacgccgtggacgccatcggctttaccccactgcatctggccgctttcatcgggcatctcgaaatcgcagaggtgctgctgaaacacggggccgatgtgaatgcccaggacaagttcggcaagaccgccttcgacatcagcatcggcaacggcaacgaggacctggccgagatcctgcagaaactgaac

SEQ ID NO: 526 - DNA, 174 bp, Artificial Sequence
  Synthetic Polynucleotides
gtggacaacaagttcaacaaagagcggtacagcgcctactacgagatttggcaactgcccaacctgaacgtgcggcagaaggccgccttcatcggatctctgcaggacgaccctagccagagcgccaatctgctggccgaggccaagaagctgaacgacgcccaggcccctaaa

SEQ ID NO: 527 - DNA, 153 bp, Artificial Sequence
  Synthetic Polynucleotides
tacgccaaagagatgcggaacgcctactgggagatcgccctgctgcccaatctgaccaaccagcagaagagagcccccatcagaaagctgtacgacgacccctcccagagcagcgagctgctgtctgaggctaaaaaactgaacgatagccag

SEQ ID NO: 528 - DNA, 153 bp, Artificial Sequence
  Synthetic Polynucleotides
tatgccaaagaaatgtggattgcctgggaggaaatccgcaacctgcctaatctgaatggctggcagatgaccgcctttatcgctaagctgctggatgaccccagccagtcctctgagctgctgagcgaagcaaagaaactgaatgactcccag

SEQ ID NO: 529 - DNA, 807 bp, Artificial Sequence
  Synthetic Polynucleotides
gaacctctagtggtgaaggtggaagagggagataacgctgtgctgcagtgcctcaaggggacctcagatggccccactcagcagctgacctggtctcgggagtccccgcttaaacccttcttaaaactcagcctggggctgccaggcctgggaatccacatgaggcccctggccatctggcttttcatcttcaacgtctctcaacagatggggggcttctacctgtgccagccggggcccccctctgagaaggcctggcagcctggctggacagtcaatgtggagggcagcggggagctgttccggtggaatgtttcggacctaggtggcctgggctgtggcctgaagaacaggtcctcagagggccccagctccccttccgggaagctcatgagccccaagctgtatgtgtgggccaaagaccgccctgaaatctgggagggagagcctccgtgtctcccaccgagggacagcctgaaccagagcctcagccaggacctcaccatggcccctggctccacactctggctgtcctgtggggtaccccctgactctgtgtccaggggccccctctcctggacccatgtgcaccccaaggggcctaagtcattgctgagcctagagctgaaggacgatcgcccggccagagatatgtgggtaatggagacgggtctgttgttgccccgggccacagctcaagacgctggaaagtattattgtcaccgtggcaacctgaccatgtcattccacctcgagatcactgctcggccagtactatggcactggctgctgaggactggtggctgg

SEQ ID NO: 530 - DNA, 1470 bp, Artificial Sequence
  Synthetic Polynucleotides
atgccctcctgggccctcttcatggtcacctcctgcctcctcctggcccctcaaaacctggcccaagtcagcagccaagatgtctccttgctggcatcagactcagagcccctgaagtgtttctcccgaacatttgaggacctcacttgcttctgggatgaggaagaggcagcgcccagtgggacataccagctgctgtatgcctacccgcgggagaagccccgtgcttgccccctgagttcccagagcatgccccactttggaacccgatacgtgtgccagtttccagaccaggaggaagtgcgtctcttctttccgctgcacctctgggtgaagaatgtgttcctaaaccagactcggactcagcgagtcctctttgtggacagtgtaggcctgccggctccccccagtatcatcaaggccatgggtgggagccagccaggggaacttcagatcagctgggaggagccagctccagaaatcagtgatttcctgaggtacgaactccgctatggccccagagatcccaagaactccactggtcccacggtcatacagctgattgccacagaaacctgctgccctgctctgcagaggcctcactcagcctctgctctggaccagtctccatgtgctcagcccacaatgccctggcaagatggaccaaagcagacctccccaagtagagaagcttcagctctgacagcagagggtggaagctgcctcatctcaggactccagcctggcaactcctactggctgcagctgcgcagcgaacctgatgggatctccctcggtggctcctggggatcctggtccctccctgtgactgtggacctgcctggagatgcagtggcacttggactgcaatgctttaccttggacctgaagaatgttacctgtcaatggcagcaacaggaccatgctagctcccaaggcttcttctaccacagcagggcacggtgctgccccagagacaggtaccccatctgggagaactgcgaagaggaagagaaaacaaatccaggactacagaccccacagttctctcgctgccacttcaagtcacgaaatgacagcattattcacatccttgtggaggtgaccacagccccgggtactgttcacagctacctgggctcccctttctggatccaccaggctgtgcgcctccccaccccaaacttgcactggagggagatctccagtgggcatctggaattggagtggcagcacccatcgtcctgggcagcccaagagacctgttatcaactccgatacacaggagaaggccatcaggactggaaggtgctggagccgcctctcggggcccgaggagggaccctggagctgcgcccgcgatctcgctaccgtttacagctgcgcgccaggctcaacggccccacctaccaaggtccctggagctcgtggtcggacccaactagggtggagaccgccaccgagaccgcc

SEQ ID NO: 531 - DNA, 501 bp, Artificial Sequence
  Synthetic Polynucleotides
atggccttaccagtgaccgccttgctcctgccgctggccttgctgctccacgccgccaggccgggctggtttctggacagccctgacagaccctggaatcctccaacattcagccccgctctgctggtggttaccgagggcgataatgccaccttcacctgtagcttcagcaacaccagcgagagcttcgtgctgaactggtacagaatgagccccagcaaccagaccgacaagctggccgcctttcctgaggatagaagccagcctggacaggactgccggttcagagttacccagctgcctaacggcagagacttccacatgagcgttgtgcgggccagaagaaacgacagcggcacatatctgtgcggagccatctctctggcccctaaggctcagatcaaagagagcctgagagccgagctgagagtgacagaaagacgggccgaagtgcccacagctcacccttcaccttctccaagacctgccggccagttccag

SEQ ID NO: 532 - DNA, 438 bp, Artificial Sequence
  Synthetic Polynucleotides
ggctggtttctggacagccctgacagaccctggaatcctccaacattcagccccgctctgctggtggttaccgagggcgataatgccaccttcacctgtagcttcagcaacaccagcgagagcttcgtgctgaactggtacagaatgagccccagcaaccagaccgacaagctggccgcctttcctgaggatagaagccagcctggacaggactgccggttcagagttacccagctgcctaacggcagagacttccacatgagcgttgtgcgggccagaagaaacgacagcggcacatatctgtgcggagccatctctctggcccctaaggctcagatcaaagagagcctgagagccgagctgagagtgacagaaagacgggccgaagtgcccacagctcacccttcaccttctccaagacctgccggccagttccag

SEQ ID NO: 533 - DNA, 501 bp, Artificial Sequence
  Synthetic Polynucleotides
atgcagatcccacaggcgccctggccagtcgtctgggcggtgctacaactgggctggcggccaggatggttcttagactccccagacaggccctggaacccccccaccttctccccagccctgctcgtggtgaccgaaggggacaacgccaccttcacctgcagcttctccaacacatcggagagcttcgtgctaaactggtaccgcatgagccccagcaaccagacggacaagctggccgccttccccgaggaccgcagccagcccggccaggactgccgcttccgtgtcacacaactgcccaacgggcgtgacttccacatgagcgtggtcagggcccggcgcaatgacagcggcacctacctctgtggggccatctccctggcccccaaggcgcagatcaaagagagcctgcgggcagagctcagggtgacagagagaagggcagaagtgcccacagcccaccccagcccctcacccaggccagccggccagttccaa

SEQ ID NO: 534 - DNA, 486 bp, Artificial Sequence
  Synthetic Polynucleotides
atggcctgtctgggcttccagagacacaaggcccagctcaacctggctaccagaacctggccttgtactctgctgttcttcctgctgttcatccccgtgttctgcaaggccatgcatgtggctcagcctgctgtggtgctggcctctagtagaggaatcgccagcttcgtgtgcgagtacgcctctcctggaaaggccactgaagtgcgcgtgaccgttctgagacaggccgatagccaagtgaccgaagtgtgcgccgccacctacatgatgggcaacgagctgaccttcctggacgacagcatctgtaccggcaccagcagcggcaatcaagtgaacctgaccatccagggcctgagagctatggacaccggcctgtacatctgcaaggtggaactgatgtaccctcctccttactacctcggcatcggcaacggcacccaaatctacgtgatcgaccccgagccttgtcctgacagcgatttc

SEQ ID NO: 535 - DNA, 723 bp, Artificial Sequence
  Synthetic Polynucleotides
atgaggcgcgcggcgctctggctctggctgtgcgcgctggcgctgagcctgcagccggccctgccgcaaattgtggctactaatttgccccctgaagatcaagatggctctggggatgactctgacaacttctccggctcaggtgcaggtgctttgcaagatatcaccttgtcacagcagaccccctccacttggaaggacacgcagctcctgacggctattcccacgtctccagaacccaccggcctggaggctacagctgcctccacctccaccctgccggctggagaggggcccaaggagggagaggctgtagtcctgccagaagtggagcctggcctcaccgcccgggagcaggaggccaccccccgacccagggagaccacacagctcccgaccactcatcaggcctcaacgaccacagccaccacggcccaggagcccgccacctcccacccccacagggacatgcagcctggccaccatgagacctcaacccctgcaggacccagccaagctgaccttcacactccccacacagaggatggaggtccttctgccaccgagagggctgctgaggatggagcctccagtcagctcccagcagcagagggctctggggagcaggacttcacctttgaaacctcgggggagaatacggctgtagtggccgtggagcctgaccgccggaaccagtccccagtggatcagggggccacgggg

SEQ ID NO: 536 - DNA, 900 bp, Artificial Sequence
  Synthetic Polynucleotides
atggtgctgctgtggctgaccctgctgctgatcgccctgccttgtctgctgcagaccaaagaggaccccaacccccccatcaccaacctgcggatgaaggccaaagcccagcaactgacctgggacctgaaccggaacgtgaccgacatcgagtgcgtgaaggacgccgactactccatgcccgccgtgaacaacagctactgccagttcggagccatcagcctgtgcgaagtgaccaactacaccgtgcgggtggcaaacccccccttctccacctggattctgttccccgagaacagcggcaagccctgggctggcgctgagaatctgacctgctggattcacgacgtggactttctgagctgctcctgggctgtgggacctggcgctcctgccgatgtgcagtacgacctgtacctgaatgtggctaaccggcggcagcagtacgagtgcctgcactacaagaccgacgcccagggcaccagaatcggctgcagattcgacgacatcagcagactgagcagcggcagccagtccagccacatccttgtgcggggaagaagcgccgccttcggcatcccttgcaccgacaagttcgtggtgttcagccagatcgagatcctgaccccccccaacatgaccgccaagtgcaacaagacccacagcttcatgcactggaagatgcggagccacttcaaccggaagttcagatacgagctgcagatccagaaacggatgcagcccgtgattaccgaacaagtgcgggaccggaccagcttccaactgctgaaccctggcacctacacagtgcagatccgggccagagaacgggtgtacgagttcctgagcgcctggtccaccccccagagattcgagtgcgatcaggaagagggggccaac

SEQ ID NO: 537 - DNA, 2127 bp, Artificial Sequence
  Synthetic Polynucleotides
atgggcccttggagccgcagcctctcggcgctgctgctgctgctgcaggtctcctcttggctctgccaggagccggagccctgccaccctggctttgacgccgagagctacacgttcacggtgccccggcgccacctggagagaggccgcgtcctgggcagagtgaattttgaagattgcaccggtcgacaaaggacagcctatttttccctcgacacccgattcaaagtgggcacagatggtgtgattacagtcaaaaggcctctacggtttcataacccacagatccatttcttggtctacgcctgggactccacctacagaaagttttccaccaaagtcacgctgaatacagtggggcaccaccaccgccccccgccccatcaggcctccgtttctggaatccaagcagaattgctcacatttcccaactcctctcctggcctcagaagacagaagagagactgggttattcctcccatcagctgcccagaaaatgaaaaaggcccatttcctaaaaacctggttcagatcaaatccaacaaagacaaagaaggcaaggttttctacagcatcactggccaaggagctgacacaccccctgttggtgtctttattattgaaagagaaacaggatggctgaaggtgacagagcctctggatagagaacgcattgccacatacactctcttctctcacgctgtgtcatccaacgggaatgcagttgaggatccaatggagattttgatcacggtaaccgatcagaatgacaacaagcccgaattcacccaggaggtctttaaggggtctgtcatggaaggtgctcttccaggaacctctgtgatggaggtcacagccacagacgcggacgatgatgtgaacacctacaatgccgccatcgcttacaccatcctcagccaagatcctgagctccctgacaaaaatatgttcaccattaacaggaacacaggagtcatcagtgtggtcaccactgggctggaccgagagagtttccctacgtataccctggtggttcaagctgctgaccttcaaggtgaggggttaagcacaacagcaacagctgtgatcacagtcactgacaccaacgataatcctccgatcttcaatcccaccacgtacaagggtcaggtgcctgagaacgaggctaacgtcgtaatcaccacactgaaagtgactgatgctgatgcccccaataccccagcgtgggaggctgtatacaccatattgaatgatgatggtggacaatttgtcgtcaccacaaatccagtgaacaacgatggcattttgaaaacagcaaagggcttggattttgaggccaagcagcagtacattctacacgtagcagtgacgaatgtggtaccttttgaggtctctctcaccacctccacagccaccgtcaccgtggatgtgctggatgtgaatgaagcccccatctttgtgcctcctgaaaagagagtggaagtgtccgaggactttggcgtgggccaggaaatcacatcctacactgcccaggagccagacacatttatggaacagaaaataacatatcggatttggagagacactgccaactggctggagattaatccggacactggtgccatttccactcgggctgagctggacagggaggattttgagcacgtgaagaacagcacgtacacagccctaatcatagctacagacaatggttctccagttgctactggaacagggacacttctgctgatcctgtctgatgtgaatgacaacgcccccataccagaacctcgaactatattcttctgtgagaggaatccaaagcctcaggtcataaacatcattgatgcagaccttcctcccaatacatctcccttcacagcagaactaacacacggggcgagtgccaactggaccattcagtacaacgacccaacccaagaatctatcattttgaagccaaagatggccttagaggtgggtgactacaaaatcaatctcaagctcatggataaccagaataaagaccaagtgaccaccttagaggtcagcgtgtgtgactgtgaaggggccgctggcgtctgtaggaaggcacagcctgtcgaagcaggattgcaaattcctgcc

SEQ ID NO: 538 - DNA, 717 bp, Artificial Sequence
  Synthetic Polynucleotides
atgtcagctccaagattactgatttccatcattatcatggtgtctgcttcaagtagttcatgcatgggtggaaagcagatgacacagaactattcaacaatttttgcagaaggtaacatttcacagcctgtactgatggatataaatgctgtgctttgttgccctcctatcgcattaagaaatttgatcataataacatgggaaataatcctgagaggccagccttcctgcacaaaagcctacaagaaagaaacaaatgagaccaaggaaaccaactgtactgttgagagaataacctgggtctctagacctgatcagaattcggaccttcagattcttccggtggacaccactcatgacgggtattacagaggcatagtggtaacacctgatgggaatttccatcgtggatatcacctccaagtgttagttacacccgaagtgaacctatttcaaagcaggaatataactgcagtatgcaaggcagttacagggaagccagctgcccagatctcctggatcccagagggatctattcttgccactaagcaagaatactggggcaatggcacagtgacggttaagagtacatgcccctgggagggccacaagtctactgtgacctgccatgtctcccatttgactggcaacaagagtctgtccgtaaagttgaattcaggtctcagaacctcaggatctccagcgttgtccttactg

SEQ ID NO: 539 - DNA, 1464 bp, Artificial Sequence
  Synthetic Polynucleotides
atggaatgtctctactatttcctgggatttctgctcctggctgcaagattgccacttgatgccgccaaacgatttcatgatgtgctgggcaatgaaagaccttctgcttacatgagggagcacaatcaattaaatggctggtcttctgatgaaaatgactggaatgaaaaactctacccagtgtggaagcggggagacatgaggtggaaaaactcctggaagggaggccgtgtgcaggcggtcctgaccagtgactcaccagccctcgtgggctcaaatataacatttgcggtgaacctgatattccctagatgccaaaaggaagatgccaatggcaacatagtctatgagaagaactgcagaaatgaggctggtttatctgctgatccgtatgtttacaactggacagcatggtcagaggacagtgacggggaaaatggcaccggccaaagccatcataacgtcttccctgatgggaaaccttttcctcaccaccccggatggagaagatggaatttcatctacgtcttccacacacttggtcagtatttccagaaattgggacgatgttcagtgagagtttctgtgaacacagccaatgtgacacttgggcctcaactcatggaagtgactgtctacagaagacatggacgggcatatgttcccatcgcacaagtgaaagatgtgtacgtggtaacagatcagattcctgtgtttgtgactatgttccagaagaacgatcgaaattcatccgacgaaaccttcctcaaagatctccccattatgtttgatgtcctgattcatgatcctagccacttcctcaattattctaccattaactacaagtggagcttcggggataatactggcctgtttgtttccaccaatcatactgtgaatcacacgtatgtgctcaatggaaccttcagccttaacctcactgtgaaagctgcagcaccaggaccttgtccgccaccgccaccaccacccagaccttcaaaacccaccccttctttaggacctgctggtgacaaccccctggagctgagtaggattcctgatgaaaactgccagattaacagatatggccactttcaagccaccatcacaattgtagagggaatcttagaggttaacatcatccagatgacagacgtcctgatgccggtgccatggcctgaaagctccctaatagactttgtcgtgacctgccaagggagcattcccacggaggtctgtaccatcatttctgaccccacctgcgagatcacccagaacacagtctgcagccctgtggatgtggatgagatgtgtctgctgactgtgagacgaaccttcaatgggtctgggacgtactgtgtgaacctcaccctgggggatgacacaagcctggctctcacgagcaccctgatttctgttcctgacagagacccagcctcgcctttaaggatggcaaacagcgcc

SEQ ID NO: 540 - DNA, 1992 bp, Artificial Sequence
  Synthetic Polynucleotides
atgggagctgcgcggggatccccggccagaccccgccggttgcctctgctcagcgtcctgctgctgccgctgctgggcggtacccagacagccattgtcttcatcaagcagccgtcctcccaggatgcactgcaggggcgccgggcgctgcttcgctgtgaggttgaggctccgggcccggtacatgtgtactggctgctcgatggggcccctgtccaggacacggagcggcgtttcgcccagggcagcagcctgagctttgcagctgtggaccggctgcaggactctggcaccttccagtgtgtggctcgggatgatgtcactggagaagaagcccgcagtgccaacgcctccttcaacatcaaatggattgaggcaggtcctgtggtcctgaagcatccagcctcggaagctgagatccagccacagacccaggtcacacttcgttgccacattgatgggcaccctcggcccacctaccaatggttccgagatgggacccccctttctgatggtcagagcaaccacacagtcagcagcaaggagcggaacctgacgctccggccagctggtcctgagcatagtgggctgtattcctgctgcgcccacagtgcttttggccaggcttgcagcagccagaacttcaccttgagcattgctgatgaaagctttgccagggtggtgctggcaccccaggacgtggtagtagcgaggtatgaggaggccatgttccattgccagttctcagcccagccacccccgagcctgcagtggctctttgaggatgagactcccatcactaaccgcagtcgccccccacacctccgcagagccacagtgtttgccaacgggtctctgctgctgacccaggtccggccacgcaatgcagggatctaccgctgcattggccaggggcagaggggcccacccatcatcctggaagccacacttcacctagcagagattgaagacatgccgctatttgagccacgggtgtttacagctggcagcgaggagcgtgtgacctgccttccccccaagggtctgccagagcccagcgtgtggtgggagcacgcgggagtccggctgcccacccatggcagggtctaccagaagggccacgagctggtgttggccaatattgctgaaagtgatgctggtgtctacacctgccacgcggccaacctggctggtcagcggagacaggatgtcaacatcactgtggccactgtgccctcctggctgaagaagccccaagacagccagctggaggagggcaaacccggctacttggattgcctgacccaggccacaccaaaacctacagttgtctggtacagaaaccagatgctcatctcagaggactcacggttcgaggtcttcaagaatgggaccttgcgcatcaacagcgtggaggtgtatgatgggacatggtaccgttgtatgagcagcaccccagccggcagcatcgaggcgcaagcccgtgtccaagtgctggatgggagcagcctcccagagtgggtgacagacaacgctgggaccctgcattttgcccgggtgactcgagatgacgctggcaactacacttgcattgcctccaacgggccgcagggccagattcgtgcccatgtccagctcactgtggcagtttttatcaccttcaaagtggaaccagagcgtacgactgtgtaccagggccacacagccctactgcagtgcgaggcccagggggaccccaagccgctgattcagtggaaaggcaaggaccgcatcctggaccccaccaagctgggacccaggatgcacatcttccagaatggctccctggtgatccatgacgtggcccctgaggactcaggccgctacacctgcattgcaggcaacagctgcaacatcaagcacacggaggcccccctctatgtcgtggacaagcctgtgccggaggagtcggagggccctggcagccctcccccctacaagatgatccagacc

SEQ ID NO: 541 - DNA, 756 bp, Artificial Sequence
  Synthetic Polynucleotides
atgccgctgctgctactgctgcccctgctgtgggcaggggccctggctatggatccaaatttctggctgcaagtgcaggagtcagtgacggtacaggagggtttgtgcgtcctcgtgccctgcactttcttccatcccataccctactacgacaagaactccccagttcatggttactggttccgggaaggagccattatatccggggactctccagtggccacaaacaagctagatcaagaagtacaggaggagactcagggcagattccgcctccttggggatcccagtaggaacaactgctccctgagcatcgtagacgccaggaggagggataatggttcatacttctttcggatggagagaggaagtaccaaatacagttacaaatctccccagctctctgtgcatgtgacagacttgacccacaggcccaaaatcctcatccctggcactctagaacccggccactccaaaaacctgacctgctctgtgtcctgggcctgtgagcagggaacacccccgatcttctcctggttgtcagctgcccccacctccctgggccccaggactactcactcctcggtgctcataatcaccccacggccccaggaccacggcaccaacctgacctgtcaggtgaagttcgctggagctggtgtgactacggagagaaccatccagctcaacgtcacctatgttccacagaacccaacaactggtatctttccaggagatggctcagggaaacaagag

SEQ ID NO: 542 - DNA, 870 bp, Artificial Sequence
  Synthetic Polynucleotides
atgctggtccgcaggggcgcgcgcgcagggcccaggatgccgcggggctggaccgcgctttgcttgctgagtttgctgccttctgggttcatgagtcttgacaacaacggtactgctaccccagagttacctacccagggaacattttcaaatgtttctacaaatgtatcctaccaagaaactacaacacctagtacccttggaagtaccagcctgcaccctgtgtctcaacatggcaatgaggccacaacaaacatcacagaaacgacagtcaaattcacatctacctctgtgataacctcagtttatggaaacacaaactcttctgtccagtcacagacctctgtaatcagcacagtgttcaccaccccagccaacgtttcaactccagagacaaccttgaagcctagcctgtcacctggaaatgtttcagacctttcaaccactagcactagccttgcaacatctcccactaaaccctatacatcatcttctcctatcctaagtgacatcaaggcagaaatcaaatgttcaggcatcagagaagtgaaattgactcagggcatctgcctggagcaaaataagacctccagctgtgcggagtttaagaaggacaggggagagggcctggcccgagtgctgtgtggggaggagcaggctgatgctgatgctggggcccaggtatgctccctgctccttgcccagtctgaggtgaggcctcagtgtctactgctggtcttggccaacagaacagaaatttccagcaaactccaacttatgaaaaagcaccaatctgacctgaaaaagctggggatcctagatttcactgagcaagatgttgcaagccaccagagctattcccaaaagacc

SEQ ID NO: 543 - DNA, 804 bp, Artificial Sequence
  Synthetic Polynucleotides
atggcgcccccgcaggtcctcgcgttcgggcttctgcttgccgcggcgacggcgacttttgccgcagctcaggaagaatgtgtctgtgaaaactacaagctggccgtaaactgctttgtgaataataatcgtcaatgccagtgtacttcagttggtgcacaaaatactgtcatttgctcaaagctggctgccaaatgtttggtgatgaaggcagaaatgaatggctcaaaacttgggagaagagcaaaacctgaaggggccctccagaacaatgatgggctttatgatcctgactgcgatgagagcgggctctttaaggccaagcagtgcaacggcacctccacgtgctggtgtgtgaacactgctggggtcagaagaacagacaaggacactgaaataacctgctctgagcgagtgagaacctactggatcatcattgaactaaaacacaaagcaagagaaaaaccttatgatagtaaaagtttgcggactgcacttcagaaggagatcacaacgcgttatcaactggatccaaaatttatcacgagtattttgtatgagaataatgttatcactattgatctggttcaaaattcttctcaaaaaactcagaatgatgtggacatagctgatgtggcttattattttgaaaaagatgttaaaggtgaatccttgtttcattctaagaaaatggacctgacagtaaatggggaacaactggatctggatcctggtcaaactttaatttattatgttgatgaaaaagcacctgaattctcaatgcagggtctaaaacaggcgcgc

SEQ ID NO: 544 - DNA, 795 bp, Artificial Sequence
  Synthetic Polynucleotides
atgtctgaagaagttacttatgcagatcttcaattccagaactccagtgagatggaaaaaatcccagaaattggcaaatttggggaaaaagcacctccagctccctctcatgtatggcgtccagcagccttgtttctgactcttctgtgccttctgttgctcattggattgggagtcttggcaagcatgtttcacgtaactttgaagatagaaatgaaaaaaatgaacaaactacaaaacatcagtgaagagctccagagaaatatttctctacaactgatgagtaacatgaatatctccaacaagatcaggaacctctccaccacactgcaaacaatagccaccaaattatgtcgtgagctatatagcaaagaacaagagcacaaatgtaagccttgtccaaggagatggatttggcataaggacagctgttatttcctaagtgatgatgtccaaacatggcaggagagtaaaatggcctgtgctgctcagaatgccagcctgttgaagataaacaacaaaaatgcattggaatttataaaatcccagagtagatcatatgactattggctgggattatctcctgaagaagattccactcgtggtatgagagtggataatataatcaactcctctgcctgggttataagaaacgcacctgacttaaataacatgtattgtggatatataaatagactatatgttcaatattatcactgcacttataaacaaagaatgatatgtgagaagatggccaatccagtgcagcttggttctacatattttagggaggca

SEQ ID NO: 545 - DNA, 489 bp, Artificial Sequence
  Synthetic Polynucleotides
atggccttaccagtgaccgccttgctcctgccgctggccttgctgctccacgccgccaggccgttcgaatgtcctgccggcatctacgcccctatctgttctggcggagggggatcttgtgggggaggcggcagcaagatcagccacttcctgaagatggaaagcctgaacttcatcagagcccacaccccctacatcaacatctacaactgcgagcccgccaaccccagcgagaagaacagccccagcacccagtattgctacagcatccagagcggaggcggcggaagttgtggaggcggaggctctcctgctggaatctatgctcctatcggaggcggaggctccaagatttcccactttctgaaaatggaatctctgaatttcatccgggctcacacaccttacatcaatatctataactgcgaacctgccaatccctctgagaagaactccccatccacacagtattgctattccatccagtcc

SEQ ID NO: 546 - DNA, 315 bp, Artificial Sequence
  Synthetic Polynucleotides
atggccttaccagtgaccgccttgctcctgccgctggccttgctgctccacgccgccaggccgttcgaatgtcctgccggcatctacgcccctatctgttctggcggagggggatcttgtgggggaggcggcagcaagatcagccacttcctgaagatggaaagcctgaacttcatcagagcccacaccccctacatcaacatctacaactgcgagcccgccaaccccagcgagaagaacagccccagcacccagtattgctacagcatccagagcggaggcggcggaagttgtggaggcggaggctctacgcgt

SEQ ID NO: 547 - DNA, 1545 bp, Artificial Sequence
  Synthetic Polynucleotides
atgtctctgtggctcctagagggggttccaatgaggcaggctgctgtcacctcgacctccttgaccatcaagtctgtcttcacccggagcgagctcaagttctccccacagtggagtcaccatgggaagattgtgacctgccagcttcaggatgcagatgggaagttcctctccaatgacacggtgcagctgaacgtgaagcacaccccgaagttggagatcaaggtcactcccagtgatgccatagtgagggagggggactctgtgaccatgacctgcgaggtcagcagcagcaacccggagtacacgacggtatcctggctcaaggatgggacctcgctgaagaagcagaatacattcacgctaaacctgcgcgaagtgaccaaggaccagagtgggaagtactgctgtcaggtctccaatgacgtgggcccgggaaggtcggaagaagtgttcctgcaagtgcagtatgccccggaaccttccacggttcagatcctccactcaccggctgtggagggaagtcaagtcgagtttctttgcatgtcactggccaatcctcttccaacaaattacacgtggtaccacaatgggaaagaaatgcagggaaggacagaggagaaagtccacatcccaaagatcctcccctggcacgctgggacttattcctgtgtggcagaaaacattcttggtactggacagaggggcccgggagctgagctggatgtccagtatcctcccaagaaggtgaccacagtgattcaaaaccccatgccgattcgagaaggagacacagtgaccctttcctgtaactacaattccagtaaccccagtgttacccggtatgaatggaaaccccatggcgcctgggaggagccatcgcttggggtgctgaagatccaaaacgttggctgggacaacacaaccatcgcctgcgcagcttgtaatagttggtgctcgtgggcctcccctgtcgccctgaatgtccagtatgccccccgagacgtgagggtccggaaaatcaagcccctttccgagattcactctggaaactcggtcagcctccaatgtgacttctcaagcagccaccccaaagaagtccagttcttctgggagaaaaatggcaggcttctggggaaagaaagccagctgaattttgactccatctccccagaagatgctgggagttacagctgctgggtgaacaactccataggacagacagcgtccaaggcctggacacttgaagtgctgtatgcacccaggaggctgcgtgtgtccatgagcccgggggaccaagtgatggaggggaagagtgcaaccctgacctgtgagagcgacgccaaccctcccgtctcccactacacctggtttgactggaataaccaaagcctcccctaccacagccagaagctgagattggagccggtgaaggtccagcactcgggtgcctactggtgccaggggaccaacagtgtgggcaagggccgttcgcctctcagcaccctcaccgtctactatagcccggagaccatcggcaggcga

SEQ ID NO: 548 - DNA, 1239 bp, Artificial Sequence
  Synthetic Polynucleotides
atgaggccggcggacttgctgcagctggtgctgctgctcgacctgcccagggacctgggcggaatggggtgttcgtctccaccctgcgagtgccatcaggaggaggacttcagagtcacctgcaaggatattcaacgcatccccagcttaccgcccagtacgcagactctgaagcttattgagactcacctgagaactattccaagtcatgcattttctaatctgcccaatatttccagaatctacgtatctatagatgtgactctgcagcagctggaatcacactccttctacaatttgagtaaagtgactcacatagaaattcggaataccaggaacttaacttacatagaccctgatgccctcaaagagctccccctcctaaagttccttggcattttcaacactggacttaaaatgttccctgacctgaccaaagtttattccactgatatattctttattcttgaaattacagacaacccttacatgacgtcaatccctgtgaatgcttttcagggactatgcaatgaaaccttgacactgaagctgtacaacaatggctttacttcagtccaaggatatgctttcaatgggacaaagctggatgctgtttacctaaacaagaataaatacctgacagttattgacaaagatgcatttggaggagtatacagtggaccaagcttgctggacgtgtctcaaaccagtgtcactgcccttccatccaaaggcctggagcacctgaaggaactgatagcaagaaacacctggactcttaagaaacttccactttccttgagtttccttcacctcacacgggctgacctttcttacccaagccactgctgtgcttttaagaatcagaagaaaatcagaggaatccttgagtccttgatgtgtaatgagagcagtatgcagagcttgcgccagagaaaatctgtgaatgccttgaatagccccctccaccaggaatatgaagagaatctgggtgacagcattgttgggtacaaggaaaagtccaagttccaggatactcataacaacgctcattattacgtcttctttgaagaacaagaggatgagatcattggttttggccaggagctcaaaaacccccaggaagagactctacaagcttttgacagccattatgactacaccatatgtggggacagtgaagacatggtgtgtacccccaagtccgatgagttcaacccgtgtgaagacataatgggc

SEQ ID NO: 549 - DNA, 1083 bp, Artificial Sequence
  Synthetic Polynucleotides
atgcgaccctccgggacggccggggcagcgctcctggcgctgctggctgcgctctgcccggcgagtcgggctctggaggaaaagaaaggtaattatgtggtgacagatcacggctcgtgcgtccgagcctgtggggccgacagctatgagatggaggaagacggcgtccgcaagtgtaagaagtgcgaagggccttgccgcaaagtgtgtaacggaataggtattggtgaatttaaagactcactctccataaatgctacgaatattaaacacttcaaaaactgcacctccatcagtggcgatctccacatcctgccggtggcatttaggggtgactccttcacacatactcctcctctggatccacaggaactggatattctgaaaaccgtaaaggaaatcacagggtttttgctgattcaggcttggcctgaaaacaggacggacctccatgcctttgagaacctagaaatcatacgcggcaggaccaagcaacatggtcagttttctcttgcagtcgtcagcctgaacataacatccttgggattacgctccctcaaggagataagtgatggagatgtgataatttcaggaaacaaaaatttgtgctatgcaaatacaataaactggaaaaaactgtttgggacctccggtcagaaaaccaaaattataagcaacagaggtgaaaacagctgcaaggccacaggccaggtctgccatgccttgtgctcccccgagggctgctggggcccggagcccagggactgcgtctcttgccggaatgtcagccgaggcagggaatgcgtggacaagtgcaaccttctggagggtgagccaagggagtttgtggagaactctgagtgcatacagtgccacccagagtgcctgcctcaggccatgaacatcacctgcacaggacggggaccagacaactgtatccagtgtgcccactacattgacggcccccactgcgtcaagacctgcccggcaggagtcatgggagaaaacaacaccctggtctggaagtacgcagacgccggccatgtgtgccacctgtgccatccaaactgcacctacggatgc

SEQ ID NO: 550 - DNA, 163 bp, Artificial Sequence
  Synthetic Polynucleotides
atgttgcagatggctgggcagtgctcccaaaatgaatattttgacagtttgttgcatgcttgcataccttgtcaacttcgatgttcttctaatactcctcctctaacatgtcagcgttattgtaatgcaagtgtgaccaattcagtgaaaggaacgaatgcga

SEQ ID NO: 551 - DNA, 678 bp, Artificial Sequence
  Synthetic Polynucleotides
atggctggttccccaacatgcctcaccctcatctatatcctttggcagctcacagggtcagcagcctctggacccgtgaaagagctggtcggttccgttggtggggccgtgactttccccctgaagtccaaagtaaagcaagttgactctattgtctggaccttcaacacaacccctcttgtcaccatacagccagaagggggcactatcatagtgacccaaaatcgtaatagggagagagtagacttcccagatggaggctactccctgaagctcagcaaactgaagaagaatgactcagggatctactatgtggggatatacagctcatcactccagcagccctccacccaggagtacgtgctgcatgtctacgagcacctgtcaaagcctaaagtcaccatgggtctgcagagcaataagaatggcacctgtgtgaccaatctgacatgctgcatggaacatggggaagaggatgtgatttatacctggaaggccctggggcaagcagccaatgagtcccataatgggtccatcctccccatctcctggagatggggagaaagtgatatgaccttcatctgcgttgccaggaaccctgtcagcagaaacttctcaagccccatccttgccaggaagctctgtgaaggtgctgctgatgacccagattcctccatg

SEQ ID NO: 552 - DNA, 405 bp, Artificial Sequence
  Synthetic Polynucleotides
ctgttcaaccaggaagtgcagatccccctgaccgagagctactgcggcccctgccccaagaactggatctgctacaagaacaactgctaccagttcttcgacgagagcaagaattggtacgagagccaggcttcctgcatgagccagaacgccagcctgctgaaggtgtacagcaaagaggaccaggatctgctgaagctggtcaagagctaccactggatgggcctggtgcacatccccaccaacggctcttggcagtgggaggacggcagcatcctgagccccaacctgctgaccatcatcgagatgcagaagggcgactgcgccctgtacgccagcagcttcaagggctacatcgagaactgctccacccccaacacctacatctgtatgcagcggaccgtg

SEQ ID NO: 553 - DNA, 561 bp, Artificial Sequence
  Synthetic Polynucleotides
atggagctgactgaattgctcctcgtggtcatgcttctcctaactgcaaggctaacgctgtccagcccggctcctcctgcttgtgacctccgagtcctcagtaaactgcttcgtgactcccatgtccttcacagcagactgagccagtgcccagaggttcaccctttgcctacacctgtcctgctgcctgctgtggactttagcttgggagaatggaaaacccagatggaggagaccaaggcacaggacattctgggagcagtgacccttctgctggagggagtgatggcagcacggggacaactgggacccacttgcctctcatccctcctggggcagctttctggacaggtccgtctcctccttggggccctgcagagcctccttggaacccagcttcctccacagggcaggaccacagctcacaaggaccctaatgccatcttcctgagcttccaacacctgctccgaggaaaggtgcgtttcctgatgcttgtaggagggtccaccctctgcgtcaggcgggccccacccaccacagctgtccccagcagaacctct

SEQ ID NO: 554 - DNA, 561 bp, Artificial Sequence
  Synthetic Polynucleotides
atggagctgactgatttgctcctggcggccatgcttcttgcagtggcaagactaactctgtccagccccgtagctcctgcctgtgaccccagactcctaaataaactgctgcgtgactcccacctccttcacagccgactgagtcagtgtcccgacgtggaccctttgtctatccctgttctgctgcctgctgtggactttagcctgggagaatggaaaacccagacggaacagagcaaggcacaggacattctaggggcagtgtcccttctactggagggagtgatggcagcacgaggacagttggaaccctcctgcctctcatccctcctgggacagctttctgggcaggttcgcctcctcttgggggccctgcagggcctcctaggaacccagcttcctctacagggcaggaccacagctcacaaggaccccaatgccctcttcttgagcttgcaacaactgcttcggggaaaggtgcgcttcctgcttctggtagaaggtcccaccctctgtgtcagacggaccctgccaaccacagctgtcccaagcagtacttct

SEQ ID NO: 555 - DNA, 276 bp, Artificial Sequence
  Synthetic Polynucleotides
gctcctgatgtgcaggattgccctgagtgcaccctgcaagagaaccccttcttctcccaacctggcgctcctatcctccagtgcatgggctgctgcttcagccgggcttatcccacacctctgcggagcaagaaaaccatgctggtccagaaaaacgtgaccagcgagagcacctgttgtgtggctaagagctacaacagagtgaccgtgatgggcggcttcaaggtggaaaatcacaccgcctgccactgctccacctgttactaccacaagagc

SEQ ID NO: 556 - DNA, 495 bp, Artificial Sequence
  Synthetic Polynucleotides
atggaaatgttccagggcctgctgctgctcctgctgctttctatgggaggcacatgggccagcagagagatgctgaggcccagatgcagacccatcaatgccacactggccgtggaaaaagagggctgccctgtctgcatcaccgtgaacaccacaatctgcgccggctactgccccaccatgacaagagttctgcaaggcgtgctgcccgctctgcctcaggtcgtgtgcaactatcgggacgtccgcttcgagagcatcagactgcctggatgtcccagaggcgtgaaccctgtggtgtcttatgccgtggctctgagctgtcagtgcgccctgtgtagaagaagcaccaccgattgcggcggacccaaggatcaccctctgacctgtgacgaccctagattccaggccagcagcagctctaaagcccctccaccttctctgccatctccaagcagactgcccggacctagcgacacacctattctgcctcaa

SEQ ID NO: 557 - DNA, 333 bp, Artificial Sequence
  Synthetic Polynucleotides
aacagctgcgagctgaccaacatcacaatcgccatcgagaaagaggaatgccggttctgcatcagcatcaacaccacttggtgcgccggctactgctacacccgcgatctggtgtataaggaccccgccagacctaagatccagaaaacctgcaccttcaaagagctggtctacgagacagtcagagtgcctggatgtgcccaccacgccgatagcctgtacacataccctgtggctacccagtgccactgcggcaagtgtgatagcgacagcaccgattgcaccgtcagaggactgggacccagctactgtagcttcggcgagatgaaggaa

SEQ ID NO: 558 - DNA, 423 bp, Artificial Sequence
  Synthetic Polynucleotides
atggaaatgctccagggcctgctgctgctcctgctgctttctatgggcggagcttgggccagcagagagcctcttagaccttggtgtcaccccatcaacgccatcctggccgtggaaaaagagggctgccctgtctgcatcaccgtgaacaccacaatctgcgccggctactgccccaccatgatgagagtgctgcaagccgttctgcctcctctgcctcaggtcgtgtgcacctatcgggacgtccgcttcgagagcatcagactgcctggatgtcctagaggcgtggaccccgtggtgtcttttcctgtggctctgtcctgtagatgcggcccctgtagaagaagcaccagcgattgcggcggacccaaggatcaccctctgacatgcgatcacccacagctgagcggcctgttgtttctt

SEQ ID NO: 559 - DNA, 414 bp, Artificial Sequence
  Synthetic Polynucleotides
atgacagccctgttcctgatgtccatgctgttcggcctggcctgcggacaggccatgtctttctgtatccccaccgagtacaccatgcacatcgagagaagagagtgcgcctactgcctgaccatcaacaccacaatctgcgccggctactgcatgacacgggatattaacggcaagctgttcctgcctaagtacgccctgagccaggacgtgtgcacctaccgggacttcatctaccggaccgtggaaatccctggctgccctctgcatgtggccccttactttagctaccccgtggctctgagctgcaagtgcggcaagtgcaacaccgactacagcgactgtatccacgaggccatcaagaccaactactgcaccaagcctcagaaaagctacctcgtgggcttctctgtt

SEQ ID NO: 560 - DNA, 816 bp, Artificial Sequence
  Synthetic Polynucleotides
atggaaatgttccagggcctgctgctgctcctgctgctttctatgggaggcacatgggccagcagagagatgctgaggcccagatgcagacccatcaatgccacactggccgtggaaaaagagggctgccctgtctgcatcaccgtgaacaccacaatctgcgccggctactgccccaccatgacaagagttctgcaaggcgtgctgcccgctctgcctcaggtcgtgtgcaactatcgggacgtccgcttcgagagcatcagactgcctggatgtcccagaggcgtgaaccctgtggtgtcttatgccgtggctctgagctgtcagtgcgccctgtgtagaagaagcaccaccgattgcggcggacccaaggatcaccctctgacctgtgacgaccctagattccaggccagcagcagctctaaagcccctccaccttctctgccatctccaagcagactgcccggacctagcgacacacctattctgcctcaaggcggaggcggaagtggaggcggaggatctggcggcggaggctctgctcctgatgtgcaggattgccctgagtgcaccctgcaagagaaccccttcttctcccaacctggcgctcctatcctccagtgcatgggctgctgcttcagccgggcttatcccacacctctgcggagcaagaaaaccatgctggtccagaaaaacgtgaccagcgagagcacctgttgtgtggctaagagctacaacagagtgaccgtgatgggcggcttcaaggtggaaaatcacaccgcctgccactgctccacctgttactaccacaagagc

SEQ ID NO: 561 - DNA, 717 bp, Artificial Sequence
  Synthetic Polynucleotides
atggccttaccagtgaccgccttgctcctgccgctggccttgctgctccacgccgccaggccgaacagctgcgagctgaccaacatcacaatcgccatcgagaaagaggaatgccggttctgcatcagcatcaacaccacttggtgcgccggctactgctacacccgcgatctggtgtataaggaccccgccagacctaagatccagaaaacctgcaccttcaaagagctggtctacgagacagtcagagtgcctggatgtgcccaccacgccgatagcctgtacacataccctgtggctacccagtgccactgcggcaagtgtgatagcgacagcaccgattgcaccgtcagaggactgggacccagctactgtagcttcggcgagatgaaggaaggcggaggcggaagtggaggcggaggatctggcggcggaggctctgctcctgatgtgcaggattgccctgagtgcaccctgcaagagaaccccttcttctcccaacctggcgctcctatcctccagtgcatgggctgctgcttcagccgggcttatcccacacctctgcggagcaagaaaaccatgctggtccagaaaaacgtgaccagcgagagcacctgttgtgtggctaagagctacaacagagtgaccgtgatgggcggcttcaaggtggaaaatcacaccgcctgccactgctccacctgttactaccacaagagc

SEQ ID NO: 562 - DNA, 744 bp, Artificial Sequence
  Synthetic Polynucleotides
atggaaatgctccagggcctgctgctgctcctgctgctttctatgggcggagcttgggccagcagagagcctcttagaccttggtgtcaccccatcaacgccatcctggccgtggaaaaagagggctgccctgtctgcatcaccgtgaacaccacaatctgcgccggctactgccccaccatgatgagagtgctgcaagccgttctgcctcctctgcctcaggtcgtgtgcacctatcgggacgtccgcttcgagagcatcagactgcctggatgtcctagaggcgtggaccccgtggtgtcttttcctgtggctctgtcctgtagatgcggcccctgtagaagaagcaccagcgattgcggcggacccaaggatcaccctctgacatgcgatcacccacagctgagcggcctgttgtttcttggcggaggcggaagtggaggcggaggatctggcggcggaggctctgctcctgatgtgcaggattgccctgagtgcaccctgcaagagaaccccttcttctcccaacctggcgctcctatcctccagtgcatgggctgctgcttcagccgggcttatcccacacctctgcggagcaagaaaaccatgctggtccagaaaaacgtgaccagcgagagcacctgttgtgtggctaagagctacaacagagtgaccgtgatgggcggcttcaaggtggaaaatcacaccgcctgccactgctccacctgttactaccacaagagc

SEQ ID NO: 563 - DNA, 735 bp, Artificial Sequence
  Synthetic Polynucleotides
atgacagccctgttcctgatgtccatgctgttcggcctggcctgcggacaggccatgtctttctgtatccccaccgagtacaccatgcacatcgagagaagagagtgcgcctactgcctgaccatcaacaccacaatctgcgccggctactgcatgacacgggatattaacggcaagctgttcctgcctaagtacgccctgagccaggacgtgtgcacctaccgggacttcatctaccggaccgtggaaatccctggctgccctctgcatgtggccccttactttagctaccccgtggctctgagctgcaagtgcggcaagtgcaacaccgactacagcgactgtatccacgaggccatcaagaccaactactgcaccaagcctcagaaaagctacctcgtgggcttctctgttggcggaggcggaagtggaggcggaggatctggcggcggaggctctgctcctgatgtgcaggattgccctgagtgcaccctgcaagagaaccccttcttctcccaacctggcgctcctatcctccagtgcatgggctgctgcttcagccgggcttatcccacacctctgcggagcaagaaaaccatgctggtccagaaaaacgtgaccagcgagagcacctgttgtgtggctaagagctacaacagagtgaccgtgatgggcggcttcaaggtggaaaatcacaccgcctgccactgctccacctgttactaccacaagagc

SEQ ID NO: 564 - DNA, 726 bp, Artificial Sequence
  Synthetic Polynucleotides
gacatccagatgacacagactacatcctccctgtctgcctctctgggagacagagtcaccatcagttgcagggcaagtcaggacattagtaaatatttaaattggtatcagcagaaaccagatggaactgttaaactcctgatctaccatacatcaagattacactcaggagtcccatcaaggttcagtggcagtgggtctggaacagattattctctcaccattagcaacctggagcaagaagatattgccacttacttttgccaacagggtaatacgcttccgtacacgttcggaggggggaccaagctggagatcacaggtggcggtggctcgggcggtggtgggtcgggtggcggcggatctgaggtgaaactgcaggagtcaggacctggcctggtggcgccctcacagagcctgtccgtcacatgcactgtctcaggggtctcattacccgactatggtgtaagctggattcgccagcctccacgaaagggtctggagtggctgggagtaatatggggtagtgaaaccacatactataattcagctctcaaatccagactgaccatcatcaaggacaactccaagagccaagttttcttaaaaatgaacagtctgcaaactgatgacacagccatttactactgtgccaaacattattactacggtggtagctatgctatggactactggggtcaaggaacctcagtcaccgtctcctca

SEQ ID NO: 565 - DNA, 726 bp, Artificial Sequence
  Synthetic Polynucleotides
gagatcgtgatgacccagagccctgccaccctgtctctgagccctggcgaaagagccaccctgagctgtagagccagccaggacatcagcaagtacctgaactggtatcagcagaagcccggccaggcccccagactgctgatctaccacaccagcagactgcacagcggcatccccgccagattttctggctctggcagcggcaccgactacaccctgacaatcagcagcctccagcccgaggacttcgccgtgtacttctgtcagcaaggcaacaccctgccctacaccttcggccagggcaccaagctggaaatcaagggcggaggcggaagtggaggcggaggatctggcggcggaggctctcaggtgcaactccaggaatctggccctggcctcgtgaagcccagcgagacactgagcctgacctgtaccgtgtccggcgtgtccctgcctgactatggcgtgtcctggatcagacagccccctggcaagggcctggaatggatcggagtgatttggggcagcgaaaccacctactacaacagctccctgaagtccagagtgaccatctccaaggacaactccaagaaccaggtgtccctgaagctgagcagcgtgacagccgccgacaccgccgtgtattactgcgccaagcactactactacggcggcagctacgctatggactactggggccagggaaccctcgtgaccgtgtctagt

SEQ ID NO: 566 - DNA, 729 bp, Artificial Sequence
  Synthetic Polynucleotides
gacgagatcgtgctgacacagagccccgccaccctgtcactgtctccaggcgaaagagccaccctgagctgtagcgccagcagcagcgtgtcctacatgcactggtatcagcagaagcccggccaggcccccagactgctgatctacgataccagcaagctggcctccggcatccccgccagattttctggcagcggctccggcaccgacttcaccctgacaatcagcagcctggaacccgaggacgtggccgtgtactactgttttcaaggcagcgtgtaccccttcaccttcggccagggcaccaagctggaaatcaagagaggtggcggtggctcgggcggtggtgggtcgggtggcggcggatctcaggtgcagctccaggaatctggccctggcctcgtgaagcctagccagaccctgagcctgacctgtaccgtgtctggcggcagcatcagcacaagcggcatgggcgtgggctggatcagacagcaccctggcaagggcctggaatggatcggccacatttggtgggacgacgacaagcggtacaaccccgccctgaagtccagagtgaccatcagcgtggacaccagcaagaaccagttcagcctgaagctgagcagcgtgacagccgccgataccgccgtgtattattgcgcccggatggaactgtggtcctactacttcgactactggggccagggaaccctcgtgaccgtgtctagt

SEQ ID NO: 567 - DNA, 750 bp, Artificial Sequence
  Synthetic Polynucleotides
gacatccagctgacacagagccctgccagcctggccgtgtctctgggacagagagccaccatcagctgcaaggccagccagagcgtggactacgacggcgacagctacctgaactggtatcagcagatccccggccagccccccaagctgctgatctacgatgccagcaacctggtgtccggcatcccccctagattttccggcagcggctccggcaccgacttcaccctgaatatccaccccgtggaaaaggtggacgccgccacctaccactgccagcagagcaccgaagatccctggacctttggcggaggcaccaagctggaaatcaagggaggcggaggaagtggcggcggaggatctgggggaggcggaagccaggtacagctccaacagtcaggggccgagctggtacgcccagggtccagcgtcaaaatatcatgtaaggcatctggctacgccttcagctcttactggatgaattgggtgaaacaacggccaggccagggactggagtggattggtcaaatttggccaggagacggggacacaaattacaacggaaaattcaagggaaaggccacacttaccgccgatgaaagtagttcaaccgcttatatgcagctgtcctccctcgcttctgaggactctgctgtgtacttttgcgcacgccgagaaaccaccactgtgggaagatactactacgctatggattattggggacagggcacaaccgtgaccgttagcagt

SEQ ID NO: 568 - DNA, 747 bp, Artificial Sequence
  Synthetic Polynucleotides
gacatcgtgatgacccaggccgctcccagcatccctgtgacacctggcgagagcgtgtccatctcctgccggtctagcaagagcctgctgaacagcaacggcaatacctacctgtactggttcctccagcggccaggccagtctccccaactgctgatctaccggatgagcaacctggcctccggcgtgcccgatagattttctggcagcggctccggcaccgccttcaccctgagaatcagcagagtggaagccgaggacgtgggcgtgtactactgtatgcagcacctggaataccccttcaccttcggagccggcaccaagctggaactgaagagaggcggaggcggaagtggaggcggaggatctggcggcggaggctctgaagtgcaactccagcagagcggccctgagctgattaagcctggggccagcgtgaagatgagctgcaaggccagcggctacaccttcaccagctacgtgatgcactgggtcaagcagaagcccggccagggcctggaatggatcggctacatcaacccctacaacgatggcaccaagtacaacgagaagttcaagggcaaggccaccctgaccagcgacaagagcagcagcaccgcctacatggaactgagcagcctgacaagcgaggacagcgccgtgtactattgcgccagaggcacctactactacggcagccgggtgttcgactattggggccagggcaccacactgaccgtgtcctct

SEQ ID NO: 569 - DNA, 747 bp, Artificial Sequence; identical to SEQ ID NO: 568
  Synthetic Polynucleotides

SEQ ID NO: 570 - DNA, 747 bp, Artificial Sequence; identical to SEQ ID NO: 568
  Synthetic Polynucleotides

SEQ ID NO: 571 - DNA, 801 bp, Artificial Sequence
  Synthetic Polynucleotides
atcaacatctacaacgccgagcctgccaatcctagcgagaagaacagccccgaattcgacatcgtgatgacacagagccccgccacactgtcactgtctccaggcgaaagagccacactgagctgtcggagcagcaagagcctccagaacgtgaacggcaacacctacctgtactggttccagcagaagcccggccagtctcctcagctcctgatctacagaatgagcaacctgaacagcggcgtgcccgacagattttctggcagcggaagcggcaccgagttcaccctgaccataagcagcctggaacctgaggacttcgccgtgtactactgtatgcagcacctggaataccccatcaccttcggagccggcaccaagctggaaatcaaaggcggaggcggaagtggaggcggaggatctggcggcggaggctctgaagtgcaactggttgaatctggcggcggactggttaagcctggcggatctctgaagctgagctgtgccgccagcggctacacctttaccagctacgtgatgcactgggtccgacaggcccctggcaaaggacttgagtggatcggctacatcaacccctacaacgatggcaccaagtacaacgagaagttccagggcagagtgaccatcagctccgacaagagcatcagcaccgcctacatggaactgagcagcctgagaagcgaggataccgccatgtactattgcgccagaggcacctactactacggcaccagagtgttcgactactggggccagggaaccctggtcacagtctcttct

SEQ ID NO: 572 - DNA, 747 bp, Artificial Sequence
  Synthetic Polynucleotides
gacatcctgctgacacagtctcccgccacactgtcactgtctccaggcgaaagagccacactgagctgtagagccagccagagcgtggactacgacggcgacagctacctgaactggtatcagcagaagcccggccagcctcctaagctgctgatctacgatgccagcaacctggtgtctggcatccctcctagattttccggcagcggctctggcaccgatttcaccctgaccatcagcagactggaacccgaggacttcgccgtgtaccactgtcagcagagcacagaggacccctggacatttggcggaggcaccaagctggaaatcaaaggcggaggcggaagtggaggcggaggatctggcggcggaggctctcaggtgcagctggttgaatctggcggcggacttgttgagcctggcggatctctgagactgagctgcatgagcggctacgccttcagcagctactggatgaactgggtccgacagatgcccggcaaaggactggaatggatgggccagatttggcctggcgacggcgataccaactacaaccccagcctgaagtccagagtgaccatcaccgccgatgagagcaccagcaccgcctacatggaactgtctagcctgaaggccgaggatacagccgtgtacttctgcgccagacgggaaaccacaaccgtgggcagatattactacgctatggactactggggccagggcaccctggttacagtctcttct

SEQ ID NO: 573 - DNA, 738 bp, Artificial Sequence
  Synthetic Polynucleotides
gacatcctgctgacacagtctcccgccacactgtcactgtctccaggcgaaagagccacactgagctgtagagccagccagagcgtggacaactacggcatcagcttcatgaactggtatcagcagaagcccggccagcctcctaagctgctgatctacgccgccagcaatcaaggctctggcatccccagcagattttccggctctggaagcggcaccgacttcaccctgaccataagcagcctggaacctgaggacttcgccatgtacttttgccagcagagcaacgaggtgcccagaacctttggcggaggcaccaagctggaaatcaaaggcggaggcggaagtggaggcggaggatctggcggcggaggctctcaggtgcaactggttgagtctggcggcggacttgttgaacctggcggaagcctgagactgagctgcatgagcggctacgcctttagcagctcctggatgaactgggtccgacagatgcctggcaaaggactggaatggatgggcagaatctaccccggcgacggcgacaccaactacaacggcaagttcaaagaacgggtcaccatcaccgccgacgagagcacaagcaccgcctacatggaactgagcagcctgaaggccgaggataccgccgtgtacttctgcgccagaagcgagtattggggcaactactgggctatggactactggggccagggcacactggtcacagtgtctagc

SEQ ID NO: 574 - DNA, 735 bp, Artificial Sequence
  Synthetic Polynucleotides
gacatcctgctgacacagtctcccgccacactgtcactgtctccaggcgaaagagccacactgagctgcaaggccagtcagaacgtgggcacaaacgtggcctggtatcagcagaagcctggacagcctcctaagctgctgatctacagcgccacctaccggaactctggcatccctgccagattttctggcagcggctctggcaccgagttcaccctgaccatcaccaacgtgcagagcaaggacctggccgactacttctacttctgccagtacaacagatacccctacaccagcggcggaggcaccaagctggaaatcaaaagaggcggaggcggaagtggaggcggaggatctggcggcggaggctctcaggtgcaactggttgaatcaggcggaggactggtggaacctggcggatctctgagactgagctgtatgagcggctacgccttcagcagctactggatgaactgggtccgacagatgcccggcaaaggactggaatggatgggccaaatctaccccggcgacggcgacaccaactacaacggcaagttcaagggcagagtgacaatcaccgccgacgagagcacaagcaccgcctacatggaactgagcagcctgaaggccgaggataccgccgtgtacttctgcgccagaaagaccatcagcagcgtggtggatttctacttcgacaactggggccagggcaccctggtcacagtttcttct

SEQ ID NO: 575 - DNA, 774 bp, Artificial Sequence
  Synthetic Polynucleotides
atcaacatctacaacgccgagcctgccaatcctagcgagaagaacagccccgaattccagatcgtgctgacacagtctccagccacactgagcgcttctccaggcgagaaggccaccatgacatgttctgccagcagcggcgtgaactacatgcactggtatcagcagaagcccggcacaagccccaagcggtggatctacgataccgacaagacagccagcggagtgcccgccagattttctggctctggcagcggcacatcctacagcctgacaatcagcagcatggaagccgaggatgccgccacctactactgtcaccagagaggcagctacaccttcggcggaggcaccaagctggaaatcaaaggcggaggcggaagtggaggcggaggatctggcggcggaggctctcaagttcagctggaacaacctggcgctgaggtggtcaaaccaggggcctctgtgaaggtgtcctgcaagacaagcggctacacattcaccagcaactggatgcactgggtcaagcagacccctggcaaaggactggaatggatcggcgagatcgaccccagcgactcctacaccaactacaaccagaagttcgacggcaaggccaagctgaccgtggacaagtctagcagcaccgcctacatggaagtgtccgatctgaccgccgaagatagcgccacatattactgcgccagaggcagcaacccctactactacgctatggactattggggccagggcaccagcgtgacagtctcttct

SEQ ID NO: 576 - DNA, 732 bp, Artificial Sequence
  Synthetic Polynucleotides
gacatccagatgacacagagccctagcagcctgtctgccagcgtgggagacagagtgaccatcacatgcaaggccagcgaccacatcaacaactggctggcctggtatcagcagaagcctggacaggcccctaagctgctgatctacggcgctaccacactggaaacaggcgtgcccagcagattttctggcagcggctctggcaccgactacaccctgacaatatccagcctccagcctgaggacttcgccacctactactgtcagcagagctggaacaccccttggacattcggccagggcaccaagctggaaatcaagagaggcggaggcggaagtggaggcggaggatctggcggcggaggctctcaagttcagcttcaacagcctggcgctgagctggtcaaacctggcgcttctgtgaagatgagctgcaaagccagcggctacgccttcagcagctactggatcaactggatgaagcagaaacccggccagggactcgaatggatcggccaaatctatcccggcgacggcgacaccaactacaacggcaagttcaagggcagagccacactgaccgccgatacctctagcagcacagcctacatgcagctgagcagcctgaccagcgaagatagcgccgtgtacttctgtgcccggtccatcacaacagtcgtgggctgcgctatggactattggggccagggaacaagcgtgaccgtgtctagt

SEQ ID NO: 577 - DNA, 756 bp, Artificial Sequence
  Synthetic Polynucleotides
gacgacatccagctgacccagagccccagcagcctgagcgccagcgtgggcgacagagtgaccatcacctgcaaggccagccagagcgtggactacgacggcgacagctacctgaactggtaccagcagatccccggcaaggcccccaagctgctgatctacgacgccagcaacctggtgagcggcatcccccccagattcagcggcagcggcagcggcaccgactacaccttcaccatcagcagcctgcagcccgaggacatcgccacctaccactgccagcagagcaccgaggacccctggaccttcggcggcggcaccaagctgcagatcaagagaggcggaggcggaagtggaggcggaggatctggcggcggaggctctcaggtgcagctgcagcagagcggcgccgaggtgaagaagcccggcagcagcgtgaaggtgagctgcaaggccagcggctacgccttcagcagctactggatgaactgggtgagacagagacccggccagggcctggagtggatcggccagatttggcccggcgacggcgacaccaactacaacggcaagttcaagggcagagccaccatcaccgccgacgagagcaccaacaccgcctacatggagctgagcagcctgagaagcgaggacaccgccttctacagctgcgccagaagagagaccaccaccgtgggcagatactactacgctatggactactggggccagggcaccaccgtgaccgtgagcagc

SEQ ID NO: 578 - DNA, 729 bp, Artificial Sequence
  Synthetic Polynucleotides
cagtctgtgctgacacagcctgcctctgtgtctggctctcctggccagagcatcaccatcagctgtaccggcaccagctctgatgtcggcggctacaattacgtgtcctggtatcagcagcaccccggcaaggcccctaagctgatgatctacgacgtgaacaacagacccagcgaggtgtccaacagattcagcggcagcaagagcggcaataccgccagcctgacaatctctggactgcaagccgaggacgaggccgactactactgtagcagctacaccacaggcagcagagccgtttttggcggaggcaccaaactgacagtgcttggaggcggaggcggaagtggaggcggaggatctggcggcggaggctctgaagttcagctggttcagtctggcgccgaagtgaagaagcctggcgagtctctgaccatctcctgcaaggccagcggctacagcttccccaactactggatcacctgggtccgacagatgtccggtggtggccttgagtggatgggcagaatcgatcccggcgactcctacaccacctacaatcctagcttccagggccacgtgaccatcagcatcgacaagagcaccaacaccgcctacctgcactggaacagcctgaaagccagcgacaccgccatgtactactgcgcccggtactatgtgtccctggtggacatttggggccagggcacactggtcacagtgtctagt

SEQ ID NO: 579 - DNA, 747 bp, Artificial Sequence
  Synthetic Polynucleotides
cagtctgtggtcacacagcctccatccgtgtctgctgcccctggacagaaagtgaccatctcctgtagcggcagcagcagcaacatcggcaacaactacgtgtcctggtatcagcagctccccggcacagctcccaaactgctgatctacgacaacaacaagcggcccagcggcatccccgatagattttctggcagcaagagcggcaccagcgccacactgggaattaccggacttcagacaggcgacgaggccgactactactgtggcacatgggatggcagcctgtacaccatgcttttcggcggaggcaccaagctgacagtgcttggcggaggcggaagtggaggcggaggatctggcggcggaggctctgaagtgcaactggtggaatctggcggcggactggttaagcctggcggatctctgagactgtcttgtgccgccagcggcttcaccttcagcaatgcctggatgagctgggttcgacaggcccctggaaaaggactggaatgggtcggattcatccggtccaaagcctacggcggcaccacagaatatgccgcctctgtgaagggcagattcaccatcagccgggacgacagcaagtctatcgcctacctccagatgaacaacctgaaaaccgaggacaccgccgtgtactactgcgccagagatggcctgtacagcagctcttggtacgacagcgattactggggccagggcacactggtcacagtgtcatct

SEQ ID NO: 580 - DNA, 762 bp, Artificial Sequence
  Synthetic Polynucleotides
cagtctgtgctgacacagcctcctagtgtgtctggcgctcctggacagagagtgaccatctcttgtaccggcagcagcagcaatatcggagccggctatgacgtgcactggtatcagcagctccctggcacagcccctaaactgctgatcttcggcaacagcaacagacccagcggcgtgcccgatagattcagcggctttaagagcggcacaagcgccagcctggctatcactggactgcaagccgaggacgaggccgactacttctgccagagctacgatagcagcctgagcggcagcggagtgtttggcacaggcaccaaagtgacagtgcttggcggcggaggcggaagtggaggcggaggatctggcggcggaggctctcaaatgcaactggttcaaagcggcggtggcctggtgcaacctggaagaagtctgagactgagctgtgccgccagcggcttcaccttcgatgattacgccatgcactgggtccgacaggcccctggaaaaggactggaatgggtgtccggcatctcctggaatagcggctctatcggctacgccgacagcgtgaagggcagattcaccatcagccgggacaacgccaagaacagcctgtacctccagatgaactccctgagagccgaggatacagccctgtactactgcgccaaggacatccacagcggcagctactacggcctgctgtactacgctatggacgtgtggggccagggcacaaccgtgacagtttcttct

SEQ ID NO: 581 - DNA, 720 bp, Artificial Sequence
  Synthetic Polynucleotides
tacatccacgtgacacagagccctagcagcctgtccgtgtccatcggcgatagagtgaccatcaactgccagacctctcaaggcgtgggcagcgacctgcactggtatcagcacaaacctggcagagcccctaagctgctgatccaccatgccagctctgtggaagatggcgtgcccagcagattttccggcaccggatttcacaccagcttcaacctgacaatcaacgacctccaggccgacgacatcggcacctactactgtcaagtgctccagagcttcggcagaggcagcagactggatacaaaaggcggaggcggaagtggaggcggaggatctggcggcggaggctctagggcacacctggtgcagtctggcaccgccatgaagaaacctggcgcttccgtcagagtgtcctgtcagacaagcggctacaccttcacagcccacatcctgttctggttcagacaggccccaggcagaggactggaatgggtcggatggatcaagccccagtacggggccgtgaatttcggcggaggcttcagagacagagtgaccctgaccagggacgtgtaccgggaaatcgcctacatggacatccggggcctgaagcctgatgacaccgccgtgtactactgcgccagggatagaagctacggcgacagctcttgggctctcgatgcttggggacagggcacaacagtggtggtgtctgct

SEQ ID NO: 582 - DNA, 753 bp, Artificial Sequence
  Synthetic Polynucleotides
gacgtgcagatgatccagacccccgatagcctggccgtgtccctgggacagagagccaccatctcttgcagagccagcgagagcgtggacaactacggcatcagcttcatgcactggtatcagcagaagcccggccagagccccaagctgctgatctacagagcctccaacctggaaagcggcatccccgccagattttccggcagcggcagcagaaccgacttcaccctgaccatcaaccccgtggaaaccgacgacgtggcaacctactactgccagcagaacaacaaggacccccccacctttggcggaggcaccaagctggaaatcaagggcggaggcggaagtggaggcggaggatctggcggcggaggctctgggggaggcggctctcaggtgcaactccagcagtctggcgctgagcttgtgaagcctggggccagcgtgaagattagctgcaaggccagcggctacgccttcagcagctactggatgaactgggtcaagcagcggcctggcaagggcctggaatggatcggccaaatctaccccggcgacggcgacaccacctacaacggcaagttcaagggcaaggccaccctgacagccgacaagagcagcagcaccgtgtacatgcaactgaacagcctgaccagcgaggacagcgccgtgtacttctgcgtgcggtactactacggcagctccggctacttcgactattggggccagggcaccacactgaccgtgtcctct

SEQ ID NO: 583 - DNA, 726 bp, Artificial Sequence
  Synthetic Polynucleotides
gacgtgcagatgatccagacccccagcagcctgtctgccagcctgggcgatagagtgaccatcagctgtcgggccagccaggacatcggcaactacctgaactggtatcagcagaaacccgacggcaccgtgaagctgctgatctactacaccagcagactgcacagcggcgtgcccagcagattttctggcagcggctctggcaccgagtacagcctgaccatctccaacctggaacaggaagatattgctacctacttctgtcagcaaggcagcgccctgccccctacatttggcggcggaacaaagctggaaatcaacggcggaggcggaagtggaggcggaggatctggcggcggaggctctgctctccagctccagcagtctggcgcagaactcgtgcggcctggcgcttctgtgaccctgagctgtaaagccagcggctacaccttcaccgactacgagatgcactgggtcaagcagacccctgtgcacggcctggaatggatcggagccatcgaccctgagacaggcggcaccgcctacaaccagaagttcgagggcaaggccatcctgaccgccgacaagagcagcagcacagcctacatggaactgcggagcctgacctccgaggacagccccgtgtactactgtgccagacggcggtactacggcagcagctccttcgactattggggccagggcaccaccctgaccgtgtctagt

SEQ ID NO: 584 - DNA, 750 bp, Artificial Sequence
  Synthetic Polynucleotides
gatgttgtgatgactcagtctccactctccctgcccgtcacccctggagcgccggcctccatctcctgcagatccagtcagagcattgtacatagtaatggaaacacctatttagagtggtatcttcaaaagccagggcagtctccaaagctcctgatctataaagtttccaaccgattttctggagtccctgacaggttcagtggaagtggatcaggcacagattttacactgagaatcagcagagtggaggctgaggatgttggaatttattactgctttcaaggttcacatgttcctccgacgttcggccctgggaccaaattggaaatcaaaggcggaggcggaagtggaggcggaggatctggcggcggaggctctgaagtgcagctggtggagtctgggggaggcttggtccagcctggggggtccctgagactctcctgttcagcctctggattcacctttagtagctttggaatgcactgggtccgccaggctccagggaaggggctggaatgggtggcctacattagtagtggcagtagtaccatctactatggagacaccgtgaagggccgattcaccatctccagagacaacgccaagaactcactgtttctgcaaatgagcagcctgagagccgaggacacggccgtgtattattgtgcgagagaggggggatattactacggaaggagttactatactatggactactggggccaagggaccacggtcaccgtctcc

SEQ ID NO: 585 - DNA, 738 bp, Artificial Sequence
  Synthetic Polynucleotides
gacatcgtcctgacccagtccccagccagcctggcggtgtccctgggtcaacgagctaccatttcctgcagagcctctaagtccgtatccacttccggctatagttacctgcattggtaccaacagaaaccagggcagccacccaagctgctcatctatctggcctcaaacctggagtccggcgtgcccgccagattctccggaagtgggagcggcaccgactttacattgaacatccacccagtcgaagaggaagatgctgccacttattactgtcagcactccagggagctgccatttacatttggctctggcacaaaactggagatcaaaggcggaggcggaagtggaggcggaggatctggcggcggaggctctcaggttcagctggtcgagtccgggggaggtctggtacagccgggtggcagcctcaagctgtcatgtgccgcatctggttttgactttagcaggtattggatgagctgggtccgccaggccccgggcaagggacttgagtggattggagaaataaaccctacttccagcacaatcaacttcacaccttctttgaaagataaggtttttatctctcgggataacgctaaaaacacactgtacttgcagatgtctaaggtgcgaagcgaagacaccgccctctattattgcgcccggggtaattactaccgctatggggatgcgatggactattgggggcaaggtacctccgtcacggtctca

SEQ ID NO: 586 - DNA, 732 bp, Artificial Sequence
  Synthetic Polynucleotides
gacatccagatgacccagagccctagctcactgagcgccagcgtgggcgacagggtgaccattacctgctccgccagccaggacatcagcaactacctgaactggtaccagcagaagcccggcaaggcccccaagctgctgatctactacacctccaacctgcactccggcgtgcccagcaggttcagcggaagcggcagcggcaccgatttcaccctgaccatctccagcctgcagcccgaggacttcgccacctactactgccagcagtacaggaagctcccctggactttcggccagggcaccaaactggagatcaagcgtggcggaggcggaagtggaggcggaggatctggcggcggaggctctcaggtgcagctggtccagagcggcgccgaagtgaagaagcccggcagctccgtgaaagtgagctgcaaggccagcggcggcaccttcagcaactactggatgcactgggtgaggcaggcccccggacagggcctggagtggatgggcgccacctacaggggccacagcgacacctactacaaccagaagttcaagggccgggtgaccatcaccgccgacaagagcaccagcaccgcctacatggaactgagcagcctcaggagcgaggacaccgctgtgtattactgcgccaggggcgccatctacgacggctacgacgtgctggacaactggggccagggcacactggtgaccgtgtccagc

SEQ ID NO: 587 - DNA, 732 bp, Artificial Sequence
  Synthetic Polynucleotides
gacatcgtgctgacacagagccctgccaccctgtctctgagccctggcgatagagccaccatcagctgtagagccagcgagagcgtgaccatcctgggcagccacctgatctactggtatcagcagaagcccggccagccccccagactgctgattcagctggcctccaatgtgcagaccggcgtgccagccagattttccggcagcggcagcagaaccgacttcaccctgaccatcagcagcgtggaacccgaggacttcgccgtgtactactgcctccagagccggaccatccccagaacattcggccagggcaccaagctggaaatcaagagaggcggaggcggaagtggaggcggaggatctggcggcggaggctctcaggtgcagctggtgcagtctggccccgaagtgaagaaacccggcgagtccgtgaagatcagctgcaaggccagcggctacaccttccggcactacagcatgaactgggtcaagcaggccccaggccagggcctgaagtggatgggcagaatcaacaccgagagcggcgtgcccatctacgccgacgacttcaagggccggttcagcttcaccgtggacaccagcgccagcaccgcctacctggaaatctccagcctgaccagcgaggataccgccgtgtatttctgctccaacgactacctgtacagcctggatttctggggccagggaaccaccctgacagtgtcctct

SEQ ID NO: 588 - DNA, 735 bp, Artificial Sequence
  Synthetic Polynucleotides
cagtctgtgctgacacagcctcctagtgtgtctggcgctcctggacagagagtgaccatcagctgtacaggcagcagcagcaatatcggagccggctttgacgtgcactggtatcagcagctgcctggcacagcccctaaactgctgatctacggcaacagcaacagacccagcggcgtgcccgatagattttccggctctaagagcggcacaagcgccagcctggctattactggactccaggccgaggacgaggccgactactactgtcagagctacgacagcagcctgagcggctacgttttcggcaccggcaccaaagtgacagtgcttggtggcggaggcggaagtggaggcggaggatctggcggcggaggctctcaagttcagctggttcagagcggagccgaagtgaagaaacctggggcctctgtgaaggtgtcctgcaaggcttccggctacacctttaccgattactacatgcactgggtccgacaggctcccggccaaagacttgaatggatgggctggatcaaccccaacagcggcggcacaaattacgcccagaagttccaggaccggatcaccgtgaccagagacaccagctccaacaccggctacatggaactgacccggctgagatccgatgacaccgccgtgtactactgcgctagaagcccttactccggcgtgctggataagtggggacagggcacactggtcaccgtgtcatct

SEQ ID NO: 589 - DNA, 729 bp, Artificial Sequence
  Synthetic Polynucleotides
caggctgttctgacacagcctccatctgcctctggcacacctggacagagagtgaccatctcctgtagcggcagcagcagcaacatcggcagctacaccgtgtcctggtatcagcagctccctggaacagcccctaagttcctgatctacagcaacaaccagcggcctagcggcgtgcccgatagattttctggcagcaagagcggcacaagcgccagcctggctatttctggactccagtctgaggacgaggccgactactattgtgccgcctgggacgatagcctgaacggctatgtgtttggcaccggcaccaaagtgacagtgcttggtggcggaggcggaagtggaggcggaggatctggcggcggaggctctgaagttcaactggttcagagcggagccgaagtgaagaagcctggcgagagcctgaagattagctgcaaaggcagcggctacgacttcaccacctactggatcggctgggtccgacagatgcctggcaaaggactggaatggatgggcatcatctaccccggcgacagcgacaccagatacagccctagcgttagaggccgcgtgaccatcagcgccgacaagtctatcaacaccgcctacctccagtggtccagcctggaagcctctgacaccgccatgtactactgcgccagaatgtggaccttcagccaggatggatggggccagggaacactggtcacagtgtcatct

SEQ ID NO: 590 - DNA, 762 bp, Artificial Sequence
  Synthetic Polynucleotides
ctgcctgttctgacacagcctccatctgcctctggcacacctggacagagagtgaccatcagctgtagcggcagaagcagcaacatcggcagcaacagcgtgaactggtacagacagcttcctggcgctgcccctaagctgctgatctacagcaacaaccagcggcctcctggcgtgccagtcagattttctggcagcaagagcggcacaagcgccagcctggctatttctggactccagtctgaggacgaggccacctactactgtgccacctgggacgacaacctgaacgtgcactacgtgttcggcaccggcaccaaagtgacagtgcttggaagtagaggcggaggcggaagtggaggcggaggatctggcggcggaggctctcttgaaatggctcaggtgcagctggtgcagagcggagccgaagtgaagaaacctggcagcagcgtgaaggtgtcctgcaaagcttctggcggcaccttcagcagctacgccatctcttgggttcgacaggcccctggacaaggactggaatggatgggcagaatcatccccatcctgggaatcgccaactacgcccagaaattccagggcagagtgacaatcaccgccgacaagagcaccagcaccgcctacatggaactgagcagcctgagaagcgaggacaccgccgtgtactattgtgcaagaggcggctactacagccacgacatgtggagcgaagattggggccagggcacactggtcacagtgtcatct

SEQ ID NO: 591 - DNA, 729 bp, Artificial Sequence
  Synthetic Polynucleotides
gacatcgtgctgacacagagccctgcttctctggccgtgtctctgggagagagagccaccatcaactgtagagccagcgagagcgtgtccgtgattggagcccacctgatccactggtatcagcagaagcctggacagcctcctaagctgctgatctacctggcctccaacctggaaacaggcgtgccagccagattttctggcagcggctctggcaccgatttcaccctgacaatcagcagcctccaggccgaagatgccgccatctactactgcctccagagccggatcttccccagaacctttggacagggcaccaagctggaaatcaaaggcggaggcggaagtggaggcggaggatctggcggcggaggctctcaagttcagctggtgcagtctggctccgagctgaagaaacctggcgagtccgtgaagatcagctgcaaggccagcggctacaccttcaccgactacagcatcaactgggtcaagcaggcccctggacagggactgaaatggatgggctggatcaacaccgagacaagagagcccgcctacgcctacgacttcagaggcagattcgtgttctccctggacaccagcgccagcacagcctatctccagatcagctctctgaaggccgaggataccgccgtgtacttctgcgccctggactacagctacgctatggactattggggccagggcaccctggtcacagtctcttct

SEQ ID NO: 592 - DNA, 732 bp, Artificial Sequence
  Synthetic Polynucleotides
gacatcgtgctgacacagtctcccgccacactgtcactgagccctggcgatagagccacactgagctgtagagccagcgagagcgtgacaatcctgggcagccacctgatctactggtatcagcagaagcccggacaggcccctagactgctgattcagctcgccagcaatgtgcagacaggcatccctgccagattttccggcagcggcagcagaaccgatttcaccctgaccataagcagcctggaacctgaggacttcgccgtgtactactgcctccagagccggacaatccccagaacctttggacagggcaccaagctggaaatcaagagaggcggaggcggaagtggaggcggaggatctggcggcggaggctctcaagttcaactggtgcagagcggctccgagctgaagaaacctggcgagtccgtgaagattagctgcaaggccagcggctacaccttcacacactacagcatgaactgggtccgacaggctccaggccaaggactggaatggatgggcagaatcaacaccgagacaggcgagcccctgtacgccgacgatttcaagggcagattcgtgttcagcctggacaccagcgccagcacagcctatctccagatcagctctctgaaggccgaggacaccgccgtgtattattgcagcaacgactacctgtactccctggactattggggccagggcacactggtcacagtgtctagt

SEQ ID NO: 593 - DNA, 735 bp, Artificial Sequence
  Synthetic Polynucleotides
gacatcgtgatgacccagagccccgatagcctggccgtgtctctgggagagagagccaccatcaactgcaagagcagccagagcatcctgtacagcagcaaccagaagaactacctggcctggtatcagcagaagcccggccagagccctaagctgctgatctactgggccagcaccagagaaagcggcgtgcccgatagattcagcggcagcggctctggcaccgacttcaccctgaccatcagttctcttcaggccgaggacgtggccgtgtactactgccaccagtacatcagctcctacaccttcggccagggcaccaagctggaaatcaagggcggaggcggaagtggaggcggaggatctggcggcggaggctctcaggtgcagctggtgcagtctggcgctgaagtgaagaaacctggggccagcgtgaaggtgtcctgcaaggccagcggctacacctttgccagccagtggatgcactggatgagacaggcccctggacagggcctggaatggatcggctggatcaaccccggcaacgtgaacaccaagtacaacgagaagttcaagggcagagccaccctgacagtggacaccagcaccaacaccgcctacatggaactgagcagcctgcggagcgaggacaccgccgtgtattattgcgccagaagcacctggtacagacccctggattattggggccagggaacccttgtgaccgtgtcctct

SEQ ID NO: 594 - DNA, 735 bp, Artificial Sequence
  Synthetic Polynucleotides
gaccacatcgtgctgacccagagccctagcagcctgtctgccagcctgggcgacagagtgaccatcagctgtagagccagccaggacatcagcacctacctgaactggtatcagcagaaacccgacggcaccgtgaagctgctgatcttctacaccagcagactgcacgccggggtgcccagcagattttctggcagcggctctggcacccaccacagcctgaccatctccaacctggaacaggaagatattgctacctacttctgtcagcaaggcaacagcctgcccttcaccttcggcagcggcaccaagctggaaatcaagagaggcggaggcggaagtggaggcggaggatctggcggcggaggctctcaggtgcagctgaaagagagcggccctgagctggaaaagcctggggccagcgtgaagattagctgcaaggccagcggctacagcttcaccgcctacagcatgaactgggtcaagcagaacaacggcatgagcctggaatggatcggcagcatcgacccctactacggcgacaccaaatacgcccagaagttcaagggcaaggccaccctgaccgtggataaggccagcagcaccgcctacctccagctgaagtctctgaccagcgaggacagcgccgtgtactactgcgccagacggatgattaccaccggcgactggtacttcgacgtgtggggagccggaaccaccgtgacagtgtctagc

SEQ ID NO: 595 - DNA, 735 bp, Artificial Sequence; identical to SEQ ID NO: 594
  Synthetic Polynucleotides

SEQ ID NO: 596 - DNA, 732 bp, Artificial Sequence
  Synthetic Polynucleotides
gagatcgtgctgacacagagccctgccaccctgtctctgagccctggcgaaagagccaccctgagctgtagagccagccagagcgtgtccagctacctggcctggtatcagcagaagcccggccaggctccccggctgctgatctacgatgccagcaatagagccaccggcatccccgccagattttccggctctggcagcggcaccgacttcaccctgaccatcagctccctggaacccgaggacttcgccgtgtactactgccagcagcggagcaactggcccatcacattcggccagggcacccggctggaaatcaaaggcggaggcggaagtggaggcggaggatctggcggcggaggctctgaagtgcagctggtggaatcaggcggcggactggtgcagcctggcagaagcctgagactgagctgtgccgccagcggcttcaccttcaacgactacgccatgcactgggtgcgccaggcccctggaaaaggactggaatgggtgtccacaatcagctggaacagcggcagcatcggctacgccgatagcgtgaagggccggttcaccatcagccgggacaacgccaagaagtccctgtacctccagatgaacagcctgcgggccgaggacacagccctgtactattgcgccaaggacatccagtacggcaactactactacggcatggacgtgtggggccagggaaccaccgtgaccgtgtcatct

SEQ ID NO: 597 - DNA, 741 bp, Artificial Sequence
  Synthetic Polynucleotides
gacatcgtgatgacccagacccccctgagcctgcctgtgacacctggcgagcctgccagcatctcctgcagaagcagcaagagcctgctgcacagcaacggcatcacctacctgtactggtatctgcagaaacccggccagagcccccaactgctgatctaccagatgagcaacctggtgtccggcgtgcccgacagattttctggcagcggctccggcaccgacttcaccctgaagatcagccgggtggaagccgaggacgtgggcgtgtactactgcgcccagaacctggaactgccctacacctttggcggcggaacaaaggtggaaatcaagcggggcggaggcggaagtggaggcggaggatctggcggcggaggctctcaggtgcaactggtgcagagcggagccgaagtgaaaaagcccggcagcagcgtgaaggtgtcctgcaaggccagcggctacgccttcagctactcctggatcaactgggtgcgccaggcccctggacagggcctggaatggatgggcagaatcttccccggcgacggcgacaccgactacaacggcaagttcaagggcagagtgaccatcaccgccgacaagagcaccagcaccgcctacatggaactgagcagcctgcggagcgaggataccgccgtgtactattgtgccagaaacgtgttcgacggctactggctggtgtactggggccagggaacacttgtgaccgtgtccagc

SEQ ID NO: 598 - DNA, 744 bp, Artificial Sequence
  Synthetic Polynucleotides
gacatccagatgacccagagccccagcagcctgtctgccagcgtgggcgacagagtgaccatcacctgtcggagcagccagagcatcgtgcactccgtgggcaacaccttcctggaatggtatcagcagaagcccggcaaggcccccaagctgctgatctacaaggtgtccaacagattcagcggcgtgcccagcaggtttagcggctctggcagcggcaccgacttcaccctgaccatctctagcctccagcccgaggacttcgccacctactactgttttcaaggcagccagttcccctacaccttcggccagggaacaaaggtggaaatcaagcggggcggaggcggaagtggaggcggaggatctggcggcggaggctctgaagtgcaactggtggaaagcggaggcggcctggtgcagcctggcggatctctgagactgagctgtgccgccagcggctacgagttcagccggtcctggatgaactgggtgcgccaggcccctggcaagggactggaatgggtgggaagaatctaccccggcgacggcgacaccaactacagcggcaagttcaagggccggttcaccatcagcgccgacaccagcaagaacaccgcctacctccagatgaacagcctgcgggccgaggataccgccgtgtactactgtgccagagatggcagctcctgggactggtacttcgacgtgtggggacagggaacccttgtgaccgtgtccagc

SEQ ID NO: 599 - DNA, 732 bp, Artificial Sequence
  Synthetic Polynucleotides
gacatcgtgctgacacagagccctgccatcatcacagcctctccaggcgagaaagtgaccatgacctgtagagccagcagcagcgtgaactacatggactggtatcagaagaagcccggcagcagccccaagccttggatctacgccacaagcaatctggcctctggcgtgcccagcagattttctggctctggcagcggcaccacctacagcatgacaatctctagcctggaagccgaggacgccgccacctactattgtcagcagtggtccttcaatcctcctaccttcggcggaggcaccaagctggaaatcaaaagaggcggaggcggaagtggaggcggaggatctggcggcggaggctctgaagttcagcttcagcagagcggagccgagctgaagaaacctggcgcttctgtgaaggtgtcctgcaaggccagcggctacacctttaccagctacaacatgcactgggtcaagcagaccccaggccagggactcgaatggatcggagccatctatcccggcaacggcgacacctcctacaaccagaagttcaagggcaagaccacactgaccgccgacaagagcagctccaccgcctacatggaactgagcagcctgagatccgaggataccgccgtgtactactgcgccagaagcaactactacggcagctcctactggttcttcgacgtgtggggcaccggcacaaccgtgacagtttcttct

SEQ ID NO: 600 - DNA, 741 bp, Artificial Sequence
  Synthetic Polynucleotides
gagatcgtgctgacacagtctcccgccacactgtcactgtctccaggcgaaagagccacactgagctgtagagccagccagagcgtgtcctcttacctggcctggtatcagcagaagcctggacaggctccccggctgctgatctacgatgccagcaatagagccacaggcatccccgccagattttctggctctggcagcggcaccgatttcaccctgaccataagcagcctggaacctgaggacttcgccgtgtactactgccagcagagaagcgactggcccctgacatttggcggcggaacaaaggtggaaatcaaaggcggaggcggaagtggaggcggaggatctggcggcggaggctctgaagtgcaactggttcaatcaggtggcggcctggttcaccctggcggatctctgagactgtcttgtaccggcagcggcttcaccttcagctaccacgccatgcactgggtccgacaggcacctggaaaaggactggaatgggtgtccatcatcggcacaggcggcgtgacctactacgccgattctgtgaagggcagattcaccatcagccgggacaacgtgaagaacagcctgtacctccagatgaactccctgagagccgaggatatggccgtgtattattgcgccagagactactacggcgctggcagcttttacgacggcctgtacggaatggatgtgtggggccagggaaccaccgtgactgtctcttct

SEQ ID NO: 601 - DNA, 735 bp, Artificial Sequence
  Synthetic Polynucleotides
gagatcgtgctgacacagtctcccgccacactgtcactgtctccaggcgaaagagccacactgagctgtagagccagccagagcgtgtcctcttacctggcctggtatcagcagaagcctggacaggctccccggctgctgatctacgatgccagcaatagagccacaggcatccccgccagattttctggctctggcagcggcaccgatttcaccctgaccataagcagcctggaacctgaggacttcgccgtgtactactgccagcagagaagcaactggcccctgacatttggcggaggcaccaaggtggaaatcaaaggcggaggcggaagtggaggcggaggatctggcggcggaggctctgctgtgcagctcgttgagtctggcggaggacttgttcagcctggcagatccctgagactgtcttgtgccgccagcggcttcaccttcggcgattacacaatgcactgggtccgacaggcccctggcaaaggacttgaatgggtgtccggcatctcctggaacagcggctctatcggctacgccgattccgtgaagggcagattcaccatcagccgggacaacgccaagaacagcctgtacctccagatgaactccctgagagccgaggacacagccctgtactattgcaccaaggacaaccagtacggctccggcagcacatacggacttggagtttggggccagggcaccctggttacagtctcttct

SEQ ID NO: 602 - DNA, 732 bp, Artificial Sequence
  Synthetic Polynucleotides
gacatccagatgacacagagccctagcagcctgtctgccagcgtgggagacagagtgaccatcacctgtagagccagcagcagcgtgtcctacatgcactggtatcagcagaagcccggcaaggcccctaagcctctgatctacgcccctagcaatctggcctctggcgtgccaagcagattttctggcagcggctctggcaccgacttcaccctgacaatatccagcctccagcctgaggacttcgccacctactactgccagcagtggtccttcaatcctcctaccttcggccagggcaccaaggtggaaatcaaaagaggcggaggcggaagtggaggcggaggatctggcggcggaggctctgaagtgcagcttgttgaatctggcggcggactggttcagcctggcggatctctgagactgtcttgtgccgccagcggctacaccttcaccagctacaatatgcactgggtccgacaggcccctggcaaaggacttgaatgggtcggagccatctatcccggcaacggcgacacctcctacaaccagaagttcaagggcagattcaccatcagcgtggacaagagcaagaacaccctgtacctccagatgaactccctgagagccgaggacaccgccgtgtactattgtgccagagtggtgtactacagcaacagctactggtacttcgacgtgtggggccagggaaccctggtcacagtttcttct

SEQ ID NO: 603 - DNA, 726 bp, Artificial Sequence
  Synthetic Polynucleotides
gacatccagctcacacagagcccttctagcctgtctgccagcgtgggcgatagagtgaccatgacctgtagagccagcagcagcgtgtcctacatccactggttccagcagaagcctggcaaggcccctaagccttggatctacgccaccagcaatctggcctctggcgtgccagtcagattttctggcagcggctctggcaccgactacaccttcacaatatccagcctccagcctgaggacattgccacctactactgccagcagtggacctccaatcctcctacctttggcggaggcaccaagctggaaatcaaaggcggaggcggaagtggaggcggaggatctggcggcggaggctctcaggttcagctccagcagtctggggccgaagtgaagaaacctggcagctccgtgaaagtgtcctgcaaggccagcggctacacctttaccagctacaacatgcactgggtcaagcaggcccctggacagggactcgaatggatcggagccatctatcccggcaacggcgacacctcctacaaccagaagttcaagggcaaagccacactgaccgccgacgagagcacaaacaccgcctacatggaactgagcagcctgagaagcgaggacaccgccttctactactgtgcccggtctacctactacggcggcgactggtactttgacgtgtggggccagggaaccaccgtgacagtttcttct

SEQ ID NO: 604 - DNA, 762 bp, Artificial Sequence
  Synthetic Polynucleotides
agcaccgtgatgacacagagccctgatagcctggccgtgtctctgggagagagagccaccatcaactgcaagagcagccagagcaacagcaacgacgtggcctggtatcagcagaagccaggacagagccccaaggtgctgatctacttcgccagcaacagatacagcggcgtgcccgatagattttccggcagcggctacggcaccgacttcacccttacaatcagcagcctccaggccgaggatgtggccgtgtacttctgtcagcaagactacagcagccctctgacctttggagccggcaccaagctggaactgaaaagagctgacgctggcggaggcggaagtggaggcggaggatctggcggcggaggctctcagattcagctggtgcagtctggcagcgagctgaagaaacctggggcctctgtgaaggtgtcctgcaaggcttccggctacacctttaccaacttcggcgtgaactgggtccgacaggcccctggaaaaggactggaatggatgggctggatcaacacctacaccggcgagcctagctacgcccagggctttacaggcagattcgtgttcagcctggacgcctctgtgtctaccgcctacctccagatcagctccctgaaagccgaggacaccgccacctatttctgcaccagacggaccaactactacgggacctcctactactacgctatggactactggggccagggcaccaccgtgacagtgtctagcgccaagacaacc

SEQ ID NO: 605 - DNA, 738 bp, Artificial Sequence
  Synthetic Polynucleotides
cagatcgtgctgtctcagtctcctgccatcctgagcgcttccccaggcgagaaagtgaccatgacctgtagagccagcagcagcgtgtcctacatgcactggtatcagcagaagcccggcagcagccctaagccttggatctacgccaccagcaatctggcctctggcgtgccagccagattttctggctctggcagcggcaccagctacagcttcacaatcagcagagtggaagccgaggacgccgccacctactattgtcagcagtggaccttcaatcctcctaccttcggcggaggcacccggctggaaatcaaaagaacagtggctgctggcggaggcggaagtggaggcggaggatctggcggcggaggctctcaggcttatctgcaacagagcggagccgaactcgtcagacctggcgcttctgtgaagatgagctgcaaggccagcggctacaccttcaccagctataatatgcactgggtcaagcagacccctcggcagggactcgaatggatcggcggaatctatcccggcaacggcgacacctcctacaaccagaagttcaagggcaaagccacactgaccgtgggcaagagcagcagcaccgcctatatgcagctcagcagcctgaccagcgaggacagcgccgtgtacttctgcgccagatacgactacaactacgctatggactactggggccagggcaccagcgtgacagttagctctgccagc

SEQ ID NO: 606 - DNA, 732 bp, Artificial Sequence; identical to SEQ ID NO: 602
  Synthetic Polynucleotides

SEQ ID NO: 607 - DNA, 729 bp, Artificial Sequence
  Synthetic Polynucleotides
gagatcgtgctgacacagagcccttctagcctgtctgccagcgtgggcgacagagtgaccatcacatgtagagccagcagcagcctgagcttcatgcactggtatcagcagaagcccggcaaggcccctaagccttggatctacgccaccagcaatctggcctctggcgtgccaagcagattttctggcagcggctctggcaccgactacaccctgacaatatccagcctccagcctgaggacttcgccacctacttttgccaccagtggtccagcaatcctctgacctttggcggaggcaccaaggtggaaatcaaaggcggaggcggaagtggaggcggaggatctggcggcggaggctctcaggtgcaactggtgcagtctggggccgaagtgaagaaacctggggcctctgtgaaggtgtcctgcaaggcttccggctacacctttaccagctacaatatgcactgggtccgacaggctcccggccagagacttgaatggatcggagccatctatcccggcaacggcgacacctcctacaaccagaaattcaagggccgcgtgaccgtgaccagagacacatctgccaacaccgcctacatggaactgtctagcctgaagtccgaggacaccgccgtgtactactgtgccagaagccactacggcagcaactacgtggactacttcgactactggggccagggcacactggtcacagtctcttct

SEQ ID NO: 608 - DNA, 735 bp, Artificial Sequence
  Synthetic Polynucleotides
gacgagatcgtgctgacacagagccctgccaccctgtctctgagccctggcgaaagagccaccctgagctgtagagccagccagagcgtgtccagctacctggcctggtatcagcagaagcccggccaggctccccggctgctgatctacgatgccagcaatagagccaccggcatccccgccagattttccggctctggcagcggcaccgacttcaccctgaccatcagctccctggaacccgaggacttcgccgtgtactactgccagcagcggagcaactggcccatcacattcggccagggcacccggctggaaatcaaaggcggaggcggaagtggaggcggaggatctggcggcggaggctctgaggtgcagcttgttgagtctggcggaggactggtgcagcccgatagaagcctgagactgtcttgtgccgccagcggcttcaccttccacgattatgccatgcactgggtccgacaggcccctggcaaaggacttgaatgggtgtccaccatctcttggaacagcggcacaatcggctacgccgactctgtgaagggcagattcaccatcagccgggacaacgccaagaacagcctgtacctccagatgaactccctgagagccgaggacacagccctgtactactgcgccaaggacatccagtacggcaactactactacggcatggacgtgtggggccagggcacaacagtgacagtctcttct

SEQ ID NO: 609 - DNA, 786 bp, Artificial Sequence
  Synthetic Polynucleotides
gacgagatcgtgctgacacagagccctgccaccctgtctctgagccctggcgaaagagccaccctgagctgtagagccagccagagcgtgtccagctacctggcctggtatcagcagaagcccggccaggctccccggctgctgatctacgatgccagcaatagagccaccggcatccccgccagattttccggctctggcagcggcaccgacttcaccctgaccatcagctccctggaacccgaggacttcgccgtgtactactgccagcagcggagcaactggcccatcacattcggccagggcacccggctggaaatcaaaggcggaggcggaagtggaggcggaggatctggcggcggaggctctttcgaagccgagcccgccaaccccagcgagaagaacagccccggcggatctgaggtgcagcttgttgagtctggcggaggactggtgcagcccgatagaagcctgagactgtcttgtgccgccagcggcttcaccttccacgattatgccatgcactgggtccgacaggcccctggcaaaggacttgaatgggtgtccaccatctcttggaacagcggcacaatcggctacgccgactctgtgaagggcagattcaccatcagccgggacaacgccaagaacagcctgtacctccagatgaactccctgagagccgaggacacagccctgtactactgcgccaaggacatccagtacggcaactactactacggcatggacgtgtggggccagggcacaacagtgacagtctcttct

SEQ ID NO: 610 - DNA, 729 bp, Artificial Sequence
  Synthetic Polynucleotides
gagatcgtgctgacacagagccctggcacactgtcactgtctccaggcgaaagagccacactgagctgtagagccagcagcagcgtgccctacatccactggtatcagcagaagcctggacaggcccctcggctgctgatctatgccacatctgctctggcctctggcatccccgatagattttctggcagcggctccggcaccgacttcaccctgacaatcagcagactggaacccgaggacttcgccgtgtactactgtcagcagtggctgagcaaccctcctacattcggccagggcaccaagctggaactgaaaagaggcggaggcggaagtggaggcggaggatctggcggcggaggctctgaagttcagctggttcagagcggagccgaagtgaagaagccaggcgagagcctgaagctgagctgcaaaggcagcggcagaaccttcaccagctacaacatgcactgggtccgacagatgcccggcaaaggactggaatggatgggcgctatctaccctctgaccggcgacacctcctacaaccagaaaagcaagctgcaagtgaccatcagcgccgacaagagcatcagcacagcctacctccagtggtcctctctgaaggccagcgacaccgccatgtactattgtgccagaagcacctacgtcggcggcgactggcagtttgatgtgtggggcaagggcaccaccgtgaccgtttcttct

SEQ ID NO: 611 - DNA, 720 bp, Artificial Sequence
  Synthetic Polynucleotides
gacatcgtgatgacccagagccccagcagcctgtctgccagcgtgggcgacagagtgaccatcacatgcaaggccagccagagcgtgaccaacgacgtggcctggtatcagcagaagcccggcaaggcccccaagctgctgatctactacgccagcaacagatacaccggcgtgcccagcagattcagcggctctggcagcggcaccgacttcaccctgaccatctctagcctccagcccgaggacttcgccacctactactgtcagcaggactacagaagcccctggaccttcggcggaggcaccaaggtggaaatcaagcggggcggaggcggaagtggaggcggaggatctggcggcggaggctctcaggtgcaactggaagaaagcgggggaggcgtcgtgcggcctggaagaagtctgagactgagctgtgccgccagcggcttcaccttcagcgactacggcgtgaactggatcagacaggcccctggcaagggcctggaatgggtcacaatcatctggggcgacggcagaaccgactacaacagcgccctgaagtcccggttcaccgtgtcccggaacaacagcaacaacaccctgagcctccagatgaacagcctgaccaccgaggacaccgccgtgtactactgtgtgcgggctcccggcaaccgggctatggaatattggggacagggcgtactcgtgaccgtgtcctct

SEQ ID NO: 612 - DNA, 738 bp, Artificial Sequence
  Synthetic Polynucleotides
gacatccagatgacccagagccccagcagcctgtctgccagcgtgggcgacagagtgaccatcacctgtagagccagccagaccatctggtcctacctgaactggtatcagcagaggcccggcaaggcccccaacctgctgatctatgccgccagctctctccagagcggcgtgcccagcagattttccggcagaggcagcggcaccgacttcaccctgaccatcagttccttgcaggccgaggacttcgccacctactactgccagcagagctacagcatcccccagattttcggccagggcaccaagctggaaatcaagggcggaggcggaagtggaggcggaggatctggcggcggaggctctcaggtgcagctccagcagtctggacccggcctcgtgaagcctagccagacactgagcctgacctgcgccatcagcggcgatagcgtgtccagcaatagcgccgcctggaactggatcagacagtccccctctcggggcctggaatggctgggccggacctactaccgcagcaagtggtacaacgactacgccgtgtccgtgaagtcccggatcaccatcaaccccgacaccagcaagaaccagttctccttgcaactgaacagcgtgacccccgaggacaccgccgtgtactactgcgccagagaagtgaccggcgacctggaagatgccttcgacatctggggccagggaacaatggtcacagtgtccagc

SEQ ID NO: 613 - DNA, 738 bp, Artificial Sequence
  Synthetic Polynucleotides
caggtgcagctccagcagtctggacccggcctcgtgaagcctagccagacactgagcctgacctgcgccatcagcggcgatagcgtgtccagcaatagcgccgcctggaactggatcagacagtccccctctcggggcctggaatggctgggccggacctactaccgcagcaagtggtacaacgactacgccgtgtccgtgaagtcccggatcaccatcaaccccgacaccagcaagaaccagttctccttgcaactgaacagcgtgacccccgaggacaccgccgtgtactactgcgccagagaagtgaccggcgacctggaagatgccttcgacatctggggccagggaacaatggtcacagtgtccagcggcggaggcggaagtggaggcggaggatctggcggcggaggctctgacatccagatgacccagagccccagcagcctgtctgccagcgtgggcgacagagtgaccatcacctgtagagccagccagaccatctggtcctacctgaactggtatcagcagaggcccggcaaggcccccaacctgctgatctatgccgccagctctctccagagcggcgtgcccagcagattttccggcagaggcagcggcaccgacttcaccctgaccatcagttccttgcaggccgaggacttcgccacctactactgccagcagagctacagcatcccccagattttcggccagggcaccaagctggaaatcaag

SEQ ID NO: 614 - DNA, 717 bp, Artificial Sequence
  Synthetic Polynucleotides
gacatccagatgacccagagccccgccaccatcgagaacacaagcctgtctgccagcgtgggcgacagagtgaccatcacctgtagagccagccagggcatcagctcttggctgacctggtatcagcagaagcccgagaaggcccccaagagcctgatctacgccgccagctctctgcagtctggcgtgcccagcagattttccggcagcggctctggcaccgacttcaccctgacaatcagcagcctgcagcccgaggacttcgccacctactactgccagcagtacgacagctaccccatcaccttcggccagggcacccggctggaaatcaagggcggaggcggaagtggaggcggaggatctggcggcggaggctctcaggtgcaactgcagcagtggggagccggactgctgaagcctagcgagacactgagcctgacctgcgccgtgtacggcggcagcttcagcgcctactattggagctggatcagacagccccctggcaagggcctggaatggatcggcgacatcaatcacggcggaggcaccaactacaaccccagcctgaagtcccgcgtgaccatctccgtggacaccagcaagaaccagttctccctgaagctgaacagcgtgacagccgccgacacagccgtgtactactgtgccagcctgaccgcctattggggccagggatctcttgtgaccgtgtccagc

SEQ ID NO: 615 - DNA, 729 bp, Artificial Sequence
  Synthetic Polynucleotides
gagatcgtgctgacccagagccctgatagcctggccgtgtctctgggcgagagagccaccatcaactgcaaggccagccagagcgtggacttcgacggcgacagctacctgaactggtatcagcagaagcccggccagccccccaaggtgctgatctatgccgccagcacactgcagagcggcgtgcccagcagattttctggcagcggctccggcaccgacttcaccctgaccatcaacagcctggaagccgaggacgccgccacctactactgccagcagagcaacgaggacccctggacctttggcggcggaacaaaggtggaaatcaagggcggaggcggaagtggaggcggaggatctggcggcggaggctctcaggtgcaactggtgcagtccggcgctgaagtgaagaaacctggggccagcgtgaaggtgtcctgcaaggtgtccggctacacctttaccgactactacattacctgggtgcgccaggcccctggacaggccctggaatggatgggctggatctaccccggcagcggcaacaccaagtacagccagaagttccagggcagattcgtgttcagcgtggacaccagcgccagcaccgcctacctgcaactgtctagcctgaaggccgaagataccgccgtgtactactgcgccaactacggcaactattggttcgcctattggggccagggaacccttgtgaccgtgtcctct

SEQ ID NO: 616 - DNA, 723 bp, Artificial Sequence
  Synthetic Polynucleotides
gacatccagatgacccagagccccagcagcctgtctgccagcgtgggcgacagagtgaccatcacctgtagagccagccagggcatcagctcttggctggcctggtatcagcagaagcccgagaaggcccccaagagcctgatctacgccgcctctagtctccagagcggcgtgcccagcagattttctggcagcggctccggcaccgacttcaccctgacaatcagctccctccagcccgaggacttcgccacctactactgccagcagtacaacagctaccctcccacctttggcggaggcaccaaggtggaaatcaagggcggaggcggaagtggaggcggaggatctggcggcggaggctctgaagtgcaactggtgcagtctggcggagggctggtgcatcctgggggaagcctgagactgagctgtgccggctctggcttcgccttcagcagcagcaccatgcactggatcagacaggcccctggcaagggcctggaatggatcagcctgatcggaagcggagggggcatctactacggcgacagcgtgaagggccggttcaccatcagccgggacaacgccaagaacagcctgtacctccagatgaactccctgcgggccgaggacatggccgtgtactattgtgtgcggggctacttcgactgggtggactacttcgattactggggccagggcaccctcgtgaccgtgtcatct

SEQ ID NO: 617 - DNA, 750 bp, Artificial Sequence
  Synthetic Polynucleotides
gacatcgtgatgacacagtcaccagatagcctcaccgtctccctgggggagcggaccaccattaattgtaaatccagccaaagcgtgctggactcaagcaagaacaagaatagcctcgcctggtatcagcagaagcccggtcagcctccaaagctgctgctttcttgggcctccaccagagagtccgggattcctgataggtttagtggttcaggctccggcacagattttactctgaccattgattctctccagccagaggattctgcaacttattactgccagcaaagcgcccactttcctataacttttggccagggaacccgacttgaaatcaagggcggaggcggaagtggaggcggaggatctggcggcggaggctctcaggtgcagctggtgcagagcggtgccgaagtgaagaaaccaggtgcatccgttaaagtttcatgtaaggctagtggatataccttcaccaattacggaatgaactgggtgaaacaggcccctggccagggactgaagtggatggggtggattaacacctacaccggggagccgacttatgcagacgactttaaggggcgggtcacgatgacctccgacacctccaccagtaccgcctacctggagctgcacaaccttaggtcagacgataccgccgtgtattactgtgcccgatggtcttggtccgacggatactatgtctacttcgactattggggccaggggaccacagttaccgtgtcctct

SEQ ID NO: 618 - DNA, 738 bp, Artificial Sequence
  Synthetic Polynucleotides
gagatcgtgctgacacagagccctggaagcctggccgtgtctcctggcgagcgcgtgacaatgagctgcaagagcagccagagcgtgttcttcagcagctcccagaagaactacctggcctggtatcagcagatccccggccagagccccagactgctgatctactgggccagcaccagagaaagcggcgtgcccgatagattcaccggcagcggctctggcaccgacttcaccctgacaatcagcagcgtgcagcccgaggacctggctatctactactgccaccagtacctgagcagccggaccttcggccagggcaccaagctggaaatcaagagaggcggaggcggaagtggaggcggaggatctggcggcggaggctctcaggtgcaactgcagcagcctggcgctgaggtcgtgaagccaggcgcttccgtgaagatgtcctgcaaggccagcggctacaccttcaccagctactacatccactggatcaagcagacccctggacagggcctggaatgggtgggagtgatctaccccggcaacgacgacatcagctacaaccagaagttccagggcaaggccaccctgaccgccgacaagtctagcaccaccgcctacatgcaactgtccagcctgaccagcgaggacagcgccgtgtactactgcgccagagaagtgcggctgcggtacttcgatgtgtggggccagggaaccaccgtgaccgtgtcatct

SEQ ID NO: 619 - DNA, 819 bp, Artificial Sequence
  Synthetic Polynucleotides
tacatcaacatctacaacgccgagcctgccaatcctagcgagaagaacagccccacacagtacgcctacggcagcggagaattcgacatccagctgacacagagcccttctagcctgtctgccagcgtgggcgacagagtgaccatcacatgtagagccagccagggcatcagctctgtgctggcttggtatcagcagaagcctggcaaggcccctaagctgctgatctacgatgccagcagcctggaaagcggcgtgccaagcagattttctggcagcggctctggcaccgacttcaccctgacaatatccagcctccagcctgaggacttcgccacctactactgccagcagttcaacagcagcatcaccttcggccagggcaccaagctggaaatcaagagaacagtggcagccggcggaggcggaagtggaggcggaggatctggcggcggaggctctcaagttcagctggttcagtctggggccgaagtgaagaaacctggcagcagcgtgaaggtgtcctgcaaagcaagcggcggcaccttcagcgattacgccatctcttgggtccgacaggcccctggacaaggactggaatggatgggcagaatcatccccatcctgggcgtcgccaattacgcccagaaattccagggccgcgtgacaatcaccgccgacaagtctaccagaaccgcctacatggaactgagcagcctgagaagcgaggacaccgccgtgtactactgcgccagaaattgggccgacgccttcgacatttggggccagggaacaatggtcaccgtgtctagcgcctcc

SEQ ID NO: 620 - DNA, 816 bp, Artificial Sequence
  Synthetic Polynucleotides
tacatcaacatctacaacgccgagcctgccaatcctagcgagaagaacagccccacacagtacgcctacggcagcggagaattcgacatcgtgatgacacagagccctagcagcctgtctgcctctctcggcggcaaagtgaccatcacatgcaaggccagccaggacatcaacaagtatatcgcctggtatcagcacaagcccggcaagggacctagactgctgatccactacaccagcacactccagcctggcatccccagcagattttctggcagcggctccggcagagactacagcttcagcatcagcaacctggaacctgaggacattgccacctactactgcctccagtacgacaacctgctgacctttggagccggcaccaagctggaactgaaaagaggcggaggcggaagtggaggcggaggatctggcggcggaggctctgaagtgaaactccagcagagcggccctgagctggttaagcctggcaccagcgtgaaggtgtcctgtaaagccagcggctactccttcaccgactacaacatgtactgggtcaagcagagccacggcaagagcctggaatggatcggctacatcgacccctacaaaggcggcaccatctacaaccagaagttcaagggcaaagccacactgaccgtggacaagagcagcagcaccgccttcatgcacctgaacagcctgaccagcgaggacagcgccgtgtactattgcgccagagagatgattaccgcctactacttcgactactggggccagggaagcagcgtgaccgttagctctctggaaaga

SEQ ID NO: 621 - DNA, 717 bp, Artificial Sequence
  Synthetic Polynucleotides
gacatccagatgacacagagccctagcagcctgtctgccagcgtgggagatagagtgaccatcaactgcaaggccagccaggacatcaacagctacctgagctggttccagcagaagcctggcaaggcccctaagacactgatctaccgggccaacagactggtggatggcgtgccaagcagattttctggcagcggcagcggccaggattacaccctgacaatatccagcctccagcctgaggacttcgccacctactactgcctccagtacgacgagttccctctgacctttggcggaggcaccaaggtggaaatcaaaggcggaggcggaagtggaggcggaggatctggcggcggaggctctcaggtgcaactggtgcagtctggggccgaagtgaagaaacctggggcctctgtgaaggtgtcctgcaaagccagcggctacacctttaccaactacgacatcaactgggtccgacaggctccaggccaaggactggaatggatcggctggatctatcctggcgacggcagcaccaagtacaacgagaagttcaaggccaaggccacactgaccgccgataccagcacaagcaccgcctacatggaactgcggagcctgagaagcgacgacaccgccgtgtactattgtgcctccggctacgaggacgctatggactattggggccagggcaccaccgtgacagtgtctagt

SEQ ID NO: 622 - DNA, 732 bp, Artificial Sequence
  Synthetic Polynucleotides
gagatcgtgctgacacagagccctctgagcctgcctgttacacctggcgagcctgccagcatctcctgtagaagctctcagagcctgctgcacagcaacggctacaactacctggactggtatctccagaagcctggacagagcccacagctcctgatctacctgggcgtgaactctgtgtccggcgtgcccgatagattttctggcagcggctctggcaccgacttcaccctgaagatcagcagagtggaagccgaggacgtgggcgtgtactactgtatgcaggccctccagacaccttggacattcggccagggcaccaaggtggaaatcaaaggcggcggaggatctggcggaggtggaagtggcggaggcggatctcaagtgcaactggttcagagcggagccgaagtgaagaaacctggcagcagcgtgaaggtgtcctgcaaagcctctggcggcatcttcagcaaccacgccatctcttgggtccgacaggctcctggacaaggactggaatggatgggcggcatcatccccatcttcggcacagccaattacgcccagaaattccagggcagagtgaccatcaccgccgacgagtctaccagcaccgccttcatggaactgagcagcctgagaagcgaggacaccgccgtgtactattgcgccagagaatgggccgacgtgttcgacatttggggccagggaacaatggtcaccgtgtcctct

SEQ ID NO: 623 - DNA, 729 bp, Artificial Sequence
  Synthetic Polynucleotides
gacatccagatgacacagtctccagccagcctgaccgtgtcactgggacagagagccaccatctcttgcagagccagcgagagcgtggacagctacggcaatagctacctgcactggtatcagcagaagcccggccagcctcctcagctcctgatctacctggcctccaatctggaaagcggcgtgccagccagattttctggcagcggcagcagaaccgacttcaccctgaccattgatcccgtggaagccgatgatgccgccacctactactgccagcagaacaacgaggacccctggacatttggcggaggcaccaaggtggaaatcaaaggcggcggaggatctggcggaggtggaagtggcggaggcggatctgaagttcagctccagcagagcggagccgagcttgtgaaacctggcgcttccgtgaagatgagctgcaaagccttcggctacaccttcaccacctttccaatcgagtggatgaagcagagccacggcaagagcctggaatggatcggcaactttcacccctacaacgaccagaccaagtacaacgaagagttcaagggcagagccaagctgaccatcgacagatccagcagcaccgtgtacctggaactgggcagactgacctccgatgacagcgccgtgtactactgtgccagaggctactactacgccttcgacttttggggccagggcaccacactgacagtgtctagc

SEQ ID NO: 624 - DNA, 720 bp, Artificial Sequence
  Synthetic Polynucleotides
gacatccagatgacacagagccctagcagcctgtctgccagcgtgggagacagagtgaccatcacctgtagagccagccagggcatcagaaacgacctcggctggtatcagcagaagcctggcaaggcccctaagcggctgatctatgccgcttcctctctgcaatctggcgtgcccagcagattttctggcagcggctctggcaccgagttcaccctgacaatatccagcctccagcctgaggacttcgccacctactactgcctccagcacaacagctacccctggacctttggacagggcaccaagctggaaatcaaaggcggaggcggaagtggaggcggaggatctggcggcggaggctctgaagtgcaactggttgaatctggcggcgctctgattcagcctggcggatctctgagactgagctgtgtggcctccggctttaccatcagcggcaactacatgagctgggtccgacaggcccctggcaaaggacttgaatgggtgtccctgatctacagcggcgacagcacctattacgccgacagcgtgaagggcagattcaccatcagccgggacatcagcaagaacaccgtgtacctccagatgaactccctgagagtggaagataccgccgtgtactactgcgtccgcgacggctactacgtgtccgatatggttgtgtggggcaagggcaccaccgtgacagtctcttct

SEQ ID NO: 625 - DNA, 750 bp, Artificial Sequence
  Synthetic Polynucleotides
gatgtgctgctgacccagagccctctgagcctgcctgtgacactgggacagcctgccagcatctcctgtcggagcagccagaccatcgtgcacagcaacggcaacacctacctggaatggttccagcagcggccaggccagagccccagactgctgatctaccaggtgtccaacagattcagcggcgtgcccgacagattctccggcagcggctctggcaccgacttcaccctgaagatcagccgggtggaagccgaggacgtgggcgtgtactactgttttcaaggcagccacgtgccccggacctttggcggaggaacaaaggtggaaatcaagagaggcggaggcggaagtggaggcggaggatctggcggcggaggctctcagatccaactggtgcagagcggcagcgagctgaagaaacctggggccagcgtgaaggtgtcctgcaaggccagcggctacacctttaccaactacggcatgaactgggtgcgccaggcccctggacagggcctgaaatggatgggctggatcaacaccaacaccggcgagcctaagtacgccgaagagttcaagggcagattcgccctgagcctggacaccagcgtgtccacagcctacctccagatcaacagcctgaaggccgaggataccgccgtgtacttctgcgccagaggctacggcaactacgccagaggggcttggctggcctattggggccagggaacactcgtgaccgtgtcctct

SEQ ID NO: 626 - DNA, 708 bp, Artificial Sequence
  Synthetic Polynucleotides
gagatcgtgctgacacagagccctgccacactctctctgagccctggcgaaagagccaccctgagctgtagcgccagcagcagcatcaactacatctactggctccagcagaagcccggccaggcccccagaatcctgatctacctgaccagcaacctggcctccggcgtgccagccagattttctggcagcggctccggcaccgacttcaccctgacaatcagcagcctggaacccgaggacttcgccgtgtactactgcctccagtggtccagcaaccccctgacctttggcggaggcaccaaggtggaaatcaagggcggaggcggaagtggaggcggaggatctggcggcggaggctctttcgaagtgcaactggtggaaagcgggggaggacttgtgaagcctggcggctctctgagactgagctgtgccgcctctggcttcaccttcagcagctacgacatgagctgggtgcgccaggctcctggcaagggactggaatgggtgtccaccatcagcagcggcggcagctacacctactacctggacagcatcaagggccggttcaccatctccagagacaacgccaagaacagcctgtacctccagatgaactccctgcgggccgaggacacagccgtgtattattgcgccagacagggcctggattactggggcagaggcacccttgtgaccgtgtcctct

SEQ ID NO: 627 - DNA, 735 bp, Artificial Sequence
  Synthetic Polynucleotides
gacatcgtgatgacccagagccccgatagcctggccgtgtctctgggagagagagccaccatcaactgccgggccagcaagagcgtgtccaccagcggctacagcttcatgcactggtatcagcagaagcccggccagccccccaagctgctgatctacctggcctccaacctggaaagcggcgtgcccgatagattcagcggcagcggctctggcaccgacttcaccctgaccatcagttctcttcaggccgaggacgtggccgtgtactactgccagcacagcagagaggtgccctggacattcggccagggcacaaaggtggaaatcaagcggggcggaggcggaagtggaggcggaggatctggcggcggaggctctcaggtgcagctggtgcagtctggggccgaagtgaagaaacctggggccagcgtgaaggtgtcctgcaaggccagcggatacacctttaccaactacggcatgaactgggtgcgccaggcccctggacagggcctggaatggatgggctggatcaacacctacaccggcgagcccacatacgccgacgccttcaagggcagattcgccttcagcctggacaccagcacctccaccgcctacctccagatcaacagcctgcggagcgacgacaccgccgtgtattattgcgccagagattacggcgactacgggatggactattggggccagggaaccaccgtgaccgtgtcctct

SEQ ID NO: 628 - DNA, 723 bp, Artificial Sequence
  Synthetic Polynucleotides
gacatcgtgatgacccagacccccctgaccctgagcgtgacaatcggacagcctgccagcatctcctgcaagagcagccagagcctgctggacagcgacggcaagacctacctgaactggctgctgcagaggccaggccagagccccgagagactgatctacctggtgtccaagctggactccggcgtgcccgatagattcacaggcagcggctccggcaccgacttcaccctgaagatcagccgggtggaagccgaggacctgggcgtgtactgttgttggcagggcacccacttcccttacaccttcggcggagggaccaaggtggaaatcaagggcggcggaggcggaagtggaggcggaggatctggcggcggaggctctcaggtgcaactgcagcagcctggcgctgaacttgtgcggccaggcgcctctgtgaagctgagctgtaaagccagcggctacaccttcaccagctactggatgaactgggtcaagcagcgcccaggccagggcctggaatggatcggaatgatcgaccccagcgacagcgagacacactacaaccacatcttcaaggacaaggccaccctgaccgtggacaagtccagcagcacagcctacctgcaactgtccagcctgaccagcgaggacagcgccgtgtactactgcgcccggaacctgtatctgtggggccagggaacaagcgtgaccgtgtctagc

SEQ ID NO: 629 - DNA, 723 bp, Artificial Sequence
  Synthetic Polynucleotides
gacatcgtgatgacccagacacctctgagcctgagcgtgacacctggacagcctgccagcattagctgcaagagcagccagtctctgctggacggcgacggcaagacctacctgaattggctgctccagaagcctggacagagccctcagcggctgatctacctggtgtccaagctggatagcggcgtgcccgatagattttctggcagcggctctggcaccgacttcaccctgaagatcagcagagtggaagccgaggacgtgggcgtgtactactgttggcagggcacacacttccccagaacattcggccagggcacaaagctggaaatcaaaggcggaggcggaagtggaggcggaggatctggcggcggaggctctcaagtgcaactggttcagagcggagccgaagtgaagaaacctggggcctctgtgaaggtgtcctgcaaggccagcggctacaccttcaaggacacctacatccactgggtccgacaggcccctggacaaggacttgagtggatgggcagaatcgaccccgccaacggcaacaccaaatacgaccccaagttccagggcagagtgaccatgaccagagacaccagcatcagcaccgcctacatggaactgagccggctgagatccgatgacaccgccgtgtactattgcgctagaagaggcggagtggattggggccagggaacactggttaccgtgtctagt

SEQ ID NO: 630 - DNA, 747 bp, Artificial Sequence
  Synthetic Polynucleotides
gacatcgtgatgacccagagccccgatagcctggccgtgtctctgggagagagagccaccatcaactgcgagagcagccagagcctgctgaacagcggcaaccagaagaactacctgacctggtatcagcagaagcccggccagccccccaagcccctgatctattgggccagcaccagagaaagcggcgtgcccgatagattcagcggcagcggaagcggcaccgacttcaccctgaccatcagttctcttcaggccgaggacgtggccgtgtactactgccagaacgactacagctacccctacaccttcggccagggcaccaagctggaaatcaagagaggcggaggcggaagtggaggcggaggatctggcggcggaggctctgaagtgcagctggtgcagtctggggccgaagtgaagaagcctggcgagagcctgaagatcagctgcaagggcagcggctacagcttcaccgactactacatgaagtgggccagacagatgcccggcaagggcctggaatggatgggcgacatcatccccagcaacggggccaccttctacaaccagaaattcaagggccaagtgaccatctccgccgacaagagcatcagcaccacctacctccagtggtccagcctgaaggccagcgacaccgccatgtactattgcgccagaagccatctgctgcgggccagttggttcgcctattggggccagggaacaatggtcacagtgtccagc

SEQ ID NO: 631 - DNA, 732 bp, Artificial Sequence
  Synthetic Polynucleotides
gacatcgtgctgacacagagccctgcttctctggccgtgtctctgggacagagagccaccatcagctgtagagccagcgagagcgtggacaactacggcaacaccttcatgcactggtatcagcagaagcccggccagcctcctaagctgctgatctacagagccagcaacctggaaagcggcatccccgccagattttctggcagcggcagcagaaccgacttcaccctgaccatcaatcccgtggaagccgacgacgtggcaacctactactgccagcagagcaacgaggaccctcctacatttggagccggcaccaagctggaactgaaaggcggaggcggaagtggaggcggaggatctggcggcggaggctctcagattcagctggtgcagtctggccccgagctgaagaaacctggcgagacagtgaagatcagctgcaaggccagcggctacatcttcaccaattacggcatgaactgggtcaagcaggcccctggcaagagcttcaagtggatgggctggatcaacacctacaccggcgagagcacatacagcgccgacttcaagggcagattcgccttcagcctggaaaccagcgccagcacagcctacctgcacatcaacgacctgaagaacgaggacaccgccacctacttttgcgccagaagcggcggctacgaccctatggattattggggccagggcaccagcgtgaccgtttcttct

SEQ ID NO: 632 - DNA, 744 bp, Artificial Sequence
  Synthetic Polynucleotides
gacttcgtgatgacacagagccctgatagcctggccgtgtctctcggcgagcgagtgaccatgagctgcaagtctagccagagcctgctgaacagcggcaaccagaagaactacctgacctggtatcagcagaagcccggccagcctcctaagctgctgatctactgggccagcaccagagaaagcggcgtgcccgatagattttctggctctggcagcggcaccgacttcaccctgacaatttctagcctgcaagccgaggacgtggccgtgtactactgccagaacgactacagctacccctacaccttcggccagggcaccaagctggaaatcaaaggcggaggcggaagtggaggcggaggatctggcggcggaggctctgaagtgcaactggttcagagcggagccgagctgaagaaacctggggccagcgtgaaggtgtcctgtaaagccagcggctacacctttaccgactactacatgaaatgggtccgacaggccccaggccagggactcgaatggatcggcgatattatccccagcaacggggccaccttctacaaccagaaattcaagggccgcgtgaccatcaccgtggacaagagcacaagcaccgcctacatggaactgagcagcctgagaagcgaggacaccgccgtgtattattgcgccagaagccatctgctgcgggccagttggttcgcctattggggacagggaaccctggtcaccgttagctct

SEQ ID NO: 633 - DNA, 744 bp, Artificial Sequence
  Synthetic Polynucleotides
gacttcgtgatgacacagagccctgatagcctggccgtgtctctcggcgagcgagtgaccatgagctgcaagtctagccagagcctgctgaacagcggcaaccagaagaactacctgacctggtatcagcagaagcccggccagcctcctaagctgctgatctactgggccagcaccagagaaagcggcgtgcccgatagattttctggctctggcagcggcaccgacttcaccctgacaatttctagcctgcaagccgaggacgtggccgtgtactactgccagaacgactacagctacccctacaccttcggccagggcaccaagctggaaatcaaaggcggaggcggaagtggaggcggaggatctggcggcggaggctctcaagtgcaactggttcagagcggagccgagctgaagaaacctggggccagcgtgaaggtgtcctgtaaagccagcggctacacctttaccgactactacatgaaatgggtccgacaggccccaggccagggactcgaatggatcggcgatattatccccagcaacggggccaccttctacaaccagaaattcaagggccgcgtgaccatcaccgtggacaagagcacaagcaccgcctacatggaactgagcagcctgagaagcgaggacaccgccgtgtattattgcgccagaagccatctgctgcgggccagttggttcgcctattggggacagggaaccctggtcaccgttagctct

SEQ ID NO: 634 - DNA, 726 bp, Artificial Sequence
  Synthetic Polynucleotides
gagatcgtgctgacacagagccctggcacactgtcactgtctccaggcgaaagagccacactgagctgtagagccagccagagcgtgtccagctcttacctggcttggtatcagcagaagcccggacaggctcccagactgctgatctacggtgcctctagcagagccacaggcatccccgatagattttctggcagcggctccggcaccgacttcaccctgacaatcagcagactggaacccgaggacttcgccgtgtactactgccagcaggactacggcttcccttggacctttggacagggcaccaaggtggaaatcaagagaggcggaggcggaagtggaggcggaggatctggcggcggaggctctgaagttcaactggttcagagcggagccgaagtgaagaagcctggcgagagcctgaagattagctgcaaaggctccggctactccttcaccagctactggatctcttgggtccgacagatgcccggcaaaggactggaatggatgggcatcatcgaccccagcgacagcgacaccagatacagccctagcttccagggccaagtgaccatcagcgccgacaagagcatcagcacagcctacctccagtggtcctctctgaaggccagcgataccgccatgtactattgcgccagaggcgacggcagcaccgacctggattattggggacagggaaccctggtcaccgtgtctagt

SEQ ID NO: 635 - DNA, 732 bp, Artificial Sequence
  Synthetic Polynucleotides
cagttcgtgctgacacagcctccaagcgtgtccaccaatcctggcagcacagtgaagctgagctgcaagagaaacaccggcaacatcggcagcaactacgtgaactggtatcagcagaagcccggacagagccccaccaccatgatctacagagatgacaagaggcccgacggcgtgcccgatagattttccggctctatcgacagaagcagcaacagcgccctgctgaccatcaacaacgtgcagacagaggacgaggccgactacttctgccagagctacagcagcggcatcaacatcatcttcggcggaggcaccaagctgacagttcttggcggaggcggaagtggaggcggaggatctggcggcggaggctctcaagtgcagctccaagaatctggccctggcctggtcaagcctagcgagacactgagcctgacctgtaccgtgtccggctttagcctgaccacctacgacgtgcactgggtccgacaacctccaggcaaaggactggaatggatgggcagaatccagaacgccggcatcaccgactacaatagcgccctgaagtcccggctgattatctccagagacaccagcaagagccaggtgttcctgaagatgaacagcgtgaccaccgccgacaccgccatgtacttttgtgccaagaccggcagctacttctacgccttcgatcactggggccagggcacactggttaccgtttcttct

SEQ ID NO: 636 - DNA, 723 bp, Artificial Sequence
  Synthetic Polynucleotides
gacatccagatgacacagtctccagccagcctgtctgcctctctgggagagacagtgaccatcgagtgcagacccagcgaggacatccacagcaacgtggcctggtatcagcagaagcccggcaattctccccagctgctgatctacgacgccagcaatctggctgatggcgtgcccagcagattttctggcagcggctctggcacacagtacagcctgaagatcaacagcctccagagcgaggacgtggcctcctacttctgccaccagtacaacatctacccctacaccttcggcagcggcaccaagctggaacttaaaggcggaggcggaagtggaggcggaggatctggcggcggaggctctcaagttcagctgcaagagtctggccccacactggtcaagcctggcgatagcgtgaagatgagctgcaaggccagcggctacacctttaccgactacatcatccactgggtcaagcagagccacggcaagagcctggaatggatcggctacatcaacccttacagcgacggcaccaactacaacgagaagttcaagagcaaggccacactgaccgtggacaagagcaccagcacagcctacatggaattttcccggctgacctccgaggacagcgccatctatttctgcgccctgaactacggcagctactacgctatggatgcctggggccagggcacaagcgtgacagtttcttct

SEQ ID NO: 637 - DNA, 726 bp, Artificial Sequence
  Synthetic Polynucleotides
gagatcgtgctgacacagtctcccgccacactgtcactgtctccaggcgaaagagccacactgagctgtagagccagccagagcgtgtcctcttacctggcctggtatcagcagaagcctggacaggctccccggctgctgatctacgatgccagcaatagagccacaggcatccccgccagattttctggctctggcagcggcaccgatttcaccctgaccataagcagcctggaacctgaggacttcgccgtgtactactgccagcagagaagcaactggcccctgacctttggacagggcaccaaggtggaaatcaagagaggcggaggcggaagtggaggcggaggatctggcggcggaggctctgaagttcagctccttgagagtggtggcggcctggttcaacctggcggatctctgagactgtcttgtgccgccagcggcttcacctttagcggctattggatgcactgggtccgacaggcccctggcaaaggacttgaatgggtgtccgccatcagaagcgacggcagcagcaagtactacgccgactctgtgaagggcagattcaccatcagccgggacaacagcaagaacaccctgtacctccagatgaacagcctgagagccgaggacacagccgtgtattattgcgccaaggacggcgtgatcgaggacacctttgattactggggccagggcaccctggtcaccgtttcttct

SEQ ID NO: 638 - DNA, 714 bp, Artificial Sequence
  Synthetic Polynucleotides
gacgtgcagatcacacagagccctagctacctggctgcctctcctggcgagacaatcaccatcaactgtcgggccagcaagagcatcagcaaggacctggcctggtatcaagagaagcccggcaagaccaacaagctgctgatctacagcggcagcacactccagtctggcatccccagcagattttccggctctggcagcggcaccgatttcaccctgaccataagcagcctggaacctgaggacttcgccatgtactactgccagcagcacaacaagtacccctacacctttggcggaggcaccaagctggaaatcaagagaggcggaggcggaagtggaggcggaggatctggcggcggaggctctcaagttcaactgcaacagcctggggccgagcttgttagacctggcgcttctgtgaagctgagctgcaaggccagcggctacaccttcaccagctactggatgaactgggtcaagcagcggcctgaccagggcctcgaatggatcggcagaatcgacccctacgacagcgagacacactacaaccagaagttcaaggacaaggccatcctgaccgtggacaagagcagctccaccgcctacatgcaactgagcagcctgacctctgaggatagcgccgtgtactattgcgccagaggcaactgggacgactattggggccagggcacaaccctgacagtgtctagt

SEQ ID NO: 639 - DNA, 807 bp, Artificial Sequence
  Synthetic Polynucleotides
tacatcaacatctacaacgccgagcctgccaatcctagcgagaagaacagccccacacagtacgcctacggcagcggagaattcgacatccagatgacacagtctccagccagcctgtctgcctctctgggagagacagtgaccatcgagtgccggaccagcaaggacatctacagcaacctggcctggttccagcaagagcccggcaattctcctcagctcctgatctacgacgccagcaatctggctgatggcgtgcccagcagattttctggcagcggctctggcacacagtacagcctccagatcaacaacctccagagcgaggacgtggcctcctacttctgccaccagtacaacaactacccctacaccttcggcaccggcaccaagctggaacttaaaggcggaggcggaagtggaggcggaggatctggcggcggaggctctcaagtgcagctccaagagtctggccccacactggtcaatcctggcgacagcgtgaagatgagctgcaaggccagcggctacacctttaccgaccacatcatccactgggtcaagcagagccacggcaagagcctggaatggatcggctacatcaacccctatagcggcggagccaactacaacggcaagttcaagagcaaggccacactgacaatcgacaagagcagcagcaccgcctacatggaattttccagactgaccagcggcgactccgccatctactactgcgccctgaattacggcagctactacgctatggatgcctggggccagggcacaagcgtgacagtttcttct

SEQ ID NO: 640 - DNA, 720 bp, Artificial Sequence
  Synthetic Polynucleotides
gagatcgtgctgacacagagccctaccagcatgacagcctctccaggcgagcaagtgaccatcacctgtagagccagcagcagcatcaactacatgcactggtatcagcagaagcctggcgcaagccccagaccttggatctacgagacaagcaagctggcctccggcgtgcccgatagattttctggatctgccagcggcaccagctacagcctgaccatcaacaacatggaagccgaggacgccgccacctactactgccagcagtggaattacccctcctggacctttggcggaggcaccaagctggaacttaaaggcggaggcggaagtggaggcggaggatctggcggcggaggctctgaagtgcagctcgttgagtctggtggcggactggttcagcctggaagaagcctgaagctgagctgtgccgccagcggcttcaccttcagcgactacaatatggcctgggtccgacaggcccctaagaaaggactggaatgggtcgccaccatcctgtacgatggcggcagaacctactaccggggcagcgtgaagggcagattcaccatcagcagagacaacgccaagagcaccctgtacctgcggatggactctctgagaagcgaggataccgccacatattactgtgccacacacagccggggcaccgactactttgattattggggccagggcgtgatggttaccgtgtctagt

SEQ ID NO: 641 - DNA, 747 bp, Artificial Sequence
  Synthetic Polynucleotides
gacatcgtgatgacacagagcccttctagcctggccgtgtctgagggcgagacagtgaccatcaactgcaagagcagccagagcttcctgtctagcggcgacggcaagaattacgtggcctggtatcagtacaagcccggacagagccccaagctgctgatctactgggccagcacaagacagagcggcgtgcccgatagattcatcggctctggcagcggcaccgacttcaccctgacaatctctacagtgcaggccgaggacctggctatctactactgccagcagtattacgacacccctctgacctttggctccggcaccaagctggaaatcaaaggcggaggcggaagtggaggcggaggatctggcggcggaggctctgaagtgaagctgcaagagtctggccccagcctggtgcagagtagccaaacactgagcctgacctgtaccgtgtccggctttagcctgaccagctaccacatccactgggtccgacagacccctggcaaaggactggaatggatgggcgtgatgtggagcgacggcgacaccagctataacagcgccctgaagtcccggctgagcatcagcagagatacaagccagagccaggtgttcctgaagatgaacagcctccagaccgaggacaccgccacctactattgtgccagaggctactacagcagctacctgtacctttggttcgcctattggggccagggcaccctggttacagtcagctct

SEQ ID NO: 642 - DNA, 759 bp, Artificial Sequence
  Synthetic Polynucleotides
gacgtgctgatgacccagacacctgtgtctctgccagtgtctctcggaggccaggtgtccatctcctgtagaagcagccagagcctggtgcactccgacggcgatacctacctgcactggtatctccagaagcctggacagagccctcagctcctgatctaccgggtgtccaacagattcagcggcgtgcccgatagattttccggcagcggctctggcaccgacttcaccctgaagatcagcagagtggaacccgaggacctgggcctgtactactgtctccagaccacacacttcccaccttggacctttggcggaggcaccaagctggaaatgaaaggcggaggcggaagtggaggcggaggatctggcggcggaggctctcaggttcagctccagcagtctggacccgagcttagaaggccaggatctagcgtcagactgagctgcaaggccagcggctaccggatcaaggacttcctgatccactggattaagaacagacccgagcacggcctggaatggatcggatggattgaccctgaggacggcgagactaagtacgcccagaagttccagaccaaggccacactgaccgccgacacctctagcaacaccgcctacatgcaactgagcagcctgaccagcgaggacaccgccacctacttttgtgctagatggggcgacgtgtactacggcctgatgagaggccatgtgatggatgcctggggccagggaacaagcgtgacagtctcttct

SEQ ID NO: 643 - DNA, 732 bp, Artificial Sequence
  Synthetic Polynucleotides
gacatccagatgacccagtctaccagttccctgagtgcatccctcggagacagggtgacgatcagttgcagcgcaagccaagggatcaataactatctgaactggtatcagcagaaaccggacggaacagtcgaactcctgatttattacaccagcacccttcagagtggcgtcccttcccggttcagtggctccggaagcgggaccgattactccctgaccatttctaatctggagccagaggacataggaacgtattattgccagcagtatagtaaactgccacgaacttttggaggggggacgaaactggagatcaaaggcggaggcggaagtggaggcggaggatctggcggcggaggctctcaggtgcaactccagcagtccggaagcgagcttatgatgccaggggcatcagtgaagatcagctgcaaggctactggctacaccttctctaattactggatagagtgggttaaacaaaggccagggcacggcctggaatggatcggcgagatcctgcctgggacaggccgaaccatttataacgagaagttcaaaggcaaggctactttcaccgcagatataagctctaatacagtgcaaatgcagctctcttccctgacaagtgaggatagtgccgtgtattattgcgcacgaagagattactatggaaatttttattacgctatggattattggggtcaaggaacaagtgtgaccgttagcagc

SEQ ID NO: 644 - DNA, 717 bp, Artificial Sequence
  Synthetic Polynucleotides
gacatccagatgacccagagccctgccagcctgtccgtgtctgtgggcgagacagtgaccatcacctgtcgggccagcgagaacatctacagcaacctggcctggtatcagcagaagcagggcaagagcccccaactgctggtgtacgccgccaccaatctggccgatggcgtgcccagcagattttccggctctggcagcggcacccagtacagcctgaagatcaacagcctccagagcgaggacttcggcagctactactgccagcacttctggggcacctggacctttggaggaggcaccaccctggaaatcaagggcggaggcggaagtggaggcggaggatctggcggcggaggctctgaagtgcaactccagcagagcggccctgagcttgtgaagcctggcgcttccgtgaagatgagctgcaaggccagcggctacaccttcaccgactactacatgaagtggatgaagcagagccacggcaagtccctggaatggatcggcgacatcaaccccaacaacggcggcaccacctacaaccagaagttcaagggcaaggccaccctgaccgtggacaagagcagcagcaccgcctacatgcaactgaacagcctgaccagcgaggacagcgccgtgtactactgcgccagagactacggctacggctatttcgactactggggccagggcacaaccctgacagtgtcctct

SEQ ID NO: 645 - DNA, 726 bp, Artificial Sequence
  Synthetic Polynucleotides
gagatcgtgctgacacagagccctggcaccctgagcctgtctccaggcgaaagagccacactgagctgtcgggcctctcagagcgtgggaggctacctggcttggtatcagcagaagccaggccaggcccccagactgctgatctacgacgccagcaatcgggccacaggcatccccgccagattttctggcagcggctccggcaccgacttcaccctgacaatcagcagcctggaacccgaggacttcgccgtgtactactgccagcagcggaacaactggccccccatgtacacattcggccagggcaccaagctggaaatcaagagaggcggaggcggaagtggaggcggaggatctggcggcggaggctctcaggtgcaactggtgcagagcggagccgaagtgaagaaacccggcagcagcgtgaaggtgtcctgcaaggcttccggcggcaccttcagcagctacgccatttcttgggtgcgccaggctcctggacagggcctggaatggatgggcggcatcatccctatcctgggcaccgccaactacgcccagaaattccagggcagagtgaccatcaccgccgacgagagcaccagcaccgcctacatggaactgagcagcctgcggagcgaggacacagccgtgtattattgcgccagatggggcggaggggccttcgacatttggggccagggaacaatggtcaccgtgtccagc

SEQ ID NO: 646 - DNA, 711 bp, Artificial Sequence
  Synthetic Polynucleotides
cagatcgtgctgacacagagccctgccctgatgagcgccagccctggcgagaaagtgaccatgacctgtagcgccagcagcagcgtgcgctacatgtactggtatcagcagaagcccagaagcagccccaagccctggattcacctgaccagcaatctggcctctggcgtgcccgctagattttccggctctggcagcggcaccagctacagcctgaccatcagcagcatggaagccgaggacgccgccacctactactgccagcagtggtccagccaccccttcacatttggctccggcaccaagctggaaatcaagggcggaggcggaagtggaggcggaggatctggcggcggaggctctgatgtgcaactccaggaaagcggccctggccttgtgaagcctagccagagcctgtccctgacctgtaccgtgaccggcttcagcatcaccagcgactactcttggaactggatcagacagttccctggcaacaaactggaatggatgggctacatcagctactccggccacacctcctacaaccccagcctggaaagccggatctccatcaccagagacaccagcaagaaccagttcttcttgcaactgaacagcgtgaccaccgaggataccgccacatattactgtaccagaggcaactgggacgtggtgtactggggccagggcacacttgtgaccgtgtctgct

SEQ ID NO: 647 - DNA, 741 bp, Artificial Sequence
  Synthetic Polynucleotides
gacgtcgtgatgacccagagccctctgagcctgcctgtgacactgggacagcctgccagcatctcctgtcggagcagccagagcatcgtgcacagcgacggcaacacctacctggaatggtatcagcagcggccaggccagagccccagacggctgatctacaaggtgtccaacagattcagcggcgtgcccgacagattctccggcagcggctctggcaccgacttcaccctgaagatcagcagagtggaagccgaggacgtgggcgtgtactactgttttcaaggcagccacgccccctggacctttggcggaggaacaaaggtggaaatcaagggcggaggcggaagtggaggcggaggatctggcggcggaggctctgaagtgcaactggtggaatcaggcggcggactggtgcagcctggcggatctctgagactgagctgtgccgccagcggcttcaccttcagcagctacggaatgcactgggtgcgccaggcccctggcaaaggactggaatgggtggcctacatcaccaccagaagcagcaccatctactacgccgacagcgtgaagggccggttcaccatctccagagacaacgccaagaacagcctgtacctccagatgaactccctgcgggccgaggacaccgccgtgtactattgcaccagagagcccctgaccggctactacgctatggactattggggccagggcaccagcgtgaccgtgtctagt

SEQ ID NO: 648 - DNA, 717 bp, Artificial Sequence
  Synthetic Polynucleotides
gacatccagatgacccagagccccagcagcctgtctgccagcgtgggcgacagagtgaccatcacctgtagagccagccagagcatcagcctgtggctgaactggtatcagcagaagcccggcaaggcccccaagctgctgatctacgccgccagcacactccagagcggcgtgccaagcagattttccggcagcggctccggcaccgacttcaccctgacaatcagctccctccagcccgaggacttcgccacctactactgccagcagtactacaccagcccctacaccttcggccagggcaccaaggtggaaatcaagagaggcggaggcggaagtggaggcggaggatctggcggcggaggctctcaggtgcaactgctggaatctggcggcggactggtgcagcctggcggatctctgagactgagctgtgccgccagcggcttcaccttcagcagctacgccatgagctgggtgcgccaggcccctggaaaaggactggaatgggtgtccgtgatccggtccagcggcagcagcacctattacgccgatagcgtgaagggccggttcaccatcagccgggacaacagcaagaacaccctgtacctccagatgaacagcctgcgggccgaggacaccgccgtgtactattgtgctaggggaggcggctacttcgactactggggccagggaacactcgtgaccgtgtcctct

SEQ ID NO: 649 - DNA, 726 bp, Artificial Sequence
  Synthetic Polynucleotides
gacatccagatgacccagagccccagcagcctgtctgccagcgtgggcgacagagtgaccatcacctgtagagccagccagagcatcagcagctacctgaactggtatcagcagaagcccggcaaggcccccaaactgctgatctacgccgtgtccacactccagagcggcgtgcccagcagattttctggcagcggctccggcaccgacttcaccctgacaatcagctccctccagcccgaggacttcgccacctactactgtcagcagagcggcaccttccctcccaccacatttggacagggcaccaaggtggaaatcaagagaggcggaggcggaagtggaggcggaggatctggcggcggaggctctcaggtgcaactgctggaatctggcggcggactggtgcagcctggcggatctctgagactgagctgtgccgccagcggcttcaccttcagcagccacggaatgcactgggtgcgccaggcccctggaaagggactggaatgggtgtccgtgatctccggcagcggcagcaataccggctacgccgatagcgtgaagggccggttcaccatcagccgggacaacagcaagaacaccctgtacctccagatgaacagcctgcgggccgaggacaccgccgtgtactattgtgccagacagtggggcagctacgccttcgattcttggggccagggcaccctcgtgaccgtgtcatct

SEQ ID NO: 650 - DNA, 756 bp, Artificial Sequence
  Synthetic Polynucleotides
gacatcgtgatgagccagagccctagcagcctggccgtgtccgtgggcgagaaagtgaccatgagctgcaagagcagccagtccctgctgcacagcagcaaccagaagaactacctggcctggtatcagcagaagcccggccagtcccccaaggtgctgatctactgggccagcaccagagaaagcggcgtgcccgatagattcaccggcagcggctctggcaccgacttcaccctgaccatcaccagcgtgaagtccgaggacctggctgtgtactactgccagcagtattacagctacccctggaccttcggcggaggcacccggctggaaatcaaaagaggcggaggcggaagtggaggcggaggatctggcggcggaggctctgaagtgcaactccagcagagcgtggccgagcttgtgaagcctggcgcttccgtgaagatgtcctgcaaggtgtccggctacaccctgacagaccacaccatccactggatgaagcagcggcctgagcagggcctggaatggatcggctacatctaccccagggacggcatcaccggctacaacgagaagttcaagggcaaggccacactgaccgccgacaccagcagcagcacagcctacatgcaactgaacagcctgaccagcgaggacagcgccgtgtacttctgtgccagatggggctacagctacagaaactacgcctactactacgactactggggccagggcacaaccctgaccgtgtctagt

SEQ ID NO: 651 - DNA, 747 bp, Artificial Sequence
  Synthetic Polynucleotides
gagatcgtgctgacacagagccctggcaccctgagcctgtctccaggcgaaagagccacactgagctgtcgggccagccagagcgtgtccagctcttacctggcctggtatcagcagaagcccggccaggctccccggctgctgatctacggaacaagcagcagagccaccggcatccccgacagattttctggcagcggctccggcaccgacttcaccctgacaatcagcagactggaacccgaggacttcgccgtgtactactgccagcagtacggcagcagccccttcacctttggcggaggcaccaaggtggaaatcaagagaggcggaggcggaagtggaggcggaggatctggcggcggaggctctcaggtgcaactccaggaatctggccccggactggctaagcccagcgagacactgagcctgacctgtaccgtgtccggcgacagcatcaccagctactactggtcctggatcagacagccccctggcaagggcctggaatggatcggctacatctactacagcggcagcaccaactacaaccccagcctgaagtccagagtgaccatcagcgtggacaccagcaagaaccagttctccctgaagctgagcagcgtgacagccgccgacaccgccgtgtattattgcgccagagatcagcggagaatcgccgctgccggcacccacttttacggcatggatgtgtggggccagggcaccaccgtgaccgtgtcatct

SEQ ID NO: 652 - DNA, 723 bp, Artificial Sequence
  Synthetic Polynucleotides
gacatcctgctgacccagagccccgtgatcctgtccgtgtctcctggcgagagagtgtccttcagctgtcgggccagccagagcatcggcaccaacatccactggtatcagcagcggaccaacggcagccccagactgctgattaagtacgccagcgagtccatcagcggcatccccagcagattttccggcagcggctccggcaccgacttcaccctgagcatcaacagcgtggaaagcgaggacattgccgactactactgccagcagaacaacaactggcccaccaccttcggagccggcaccaagctggaactgaagggcggaggcggaagtggaggcggaggatctggcggcggaggctctcaggtgcagctgaagcagagcggacctggcctggtgcagcctagccagagcctgtccatcacctgtaccgtgtccggcttcagcctgaccaactacggcgtgcactgggtgcgccagagccctggaaaaggactggaatggctgggagtgatttggagcggcggcaacaccgactacaacacccccttcaccagcagactgtctatcaacaaggacaacagcaagagccaggtgttcttcaagatgaacagcctccagagcaacgacaccgccatctactactgtgctagagccctgacctactatgactacgagttcgcctactggggccagggcacactcgtgacagtgtctgct

SEQ ID NO: 653 - DNA, 702 bp, Artificial Sequence
  Synthetic Polynucleotides
atgacccagagccccaagttcctgctggtgtctgccggcgacagagtgaccctgacatgcaaggccagccagagcgtgaacaacgacgtgtactggtatcagcaggaacccggccagtcccccaagctgctgatctactgggccagcaccagagaaagcggcgtgcccgatagattcaccggcagcggctctggcaccgacttcaccctgacaatcagcagcgtgcaggccgaggacctggccgtgtactactgcaagcagagctacaacctgtacaccttcggcggaggcaccaagctggaaatcaagagaggcggcggaggatctggcggaggcggatctgggggcggaggctctgaatctggaagaggactggtgcagcctggcggcagcagaaagctgtcttgtgccgccagcggcttcaccttcagcaccagcggaatgcactgggtgcgccaggcccctgagaagggactggaatgggtggcctacatcagctccggcagcaccaccatctaccacgccgataccgtgaagggccggttcaccatcagccgggacaaccccaagaataccctgttcctccagatgaccagcctgcggagcgaggacaccgccatgtactattgctgcgccagaagcggccagttcggcaactacttcgactactggggccagggcaccaccctgaccgtgtcatct

SEQ ID NO: 654 - DNA, 717 bp, Artificial Sequence
  Synthetic Polynucleotides
cagagcccatctagcctggctgtgtctgccggcgagaaagtgaccatgagctgcaagagcagccagagcctgctgaacagccggacccggaagaactacctggcctggtatcagcagaagcccggccagagccccaagctgctgatctactgggccagcaccagagaaagcggcgtgcccgatagattcaccggctctggcagcggcaccgacttcaccctgacaatcagcagcgtgcaggccgaggacctggccgtgtactactgcaagcagagcaacctgtacaccttcggcggaggcaccaagctggaaatcaagggcggaggcggaagtggaggcggaggatctggcggcggaggctctcaggtgcagctggaagagtctggacccgagcttgtgaagcctggggccagcgtgaagctgtcctgtaaagccagcggctacaccttcaccgagtacatcatccactgggtcaagcagcggagcggccagggcctggaatggatcggctggttttaccctggctccggcagcatcaagtacaacgagaagttcaaggacaaggccaccctgaccgccgacaagtccagcagcaccgtgtacatggaactgagcggcctgaccagcgaggacagcgccgtgtatttctgcgccagacacgacggctacagctacttcgactattggggccagggcaccacactgaccgtgtcctct

SEQ ID NO: 655 - DNA, 726 bp, Artificial Sequence
  Synthetic Polynucleotides
gacatccagatgacccagagccccagcagcctgtctgcctctctgggcgagagagtgtccctgacctgtcgggccacacaggaactgagcggctacctgtcttggctgcagcagaagcccgacggcaccatcaagcggctgatctacgccgccagcaccctggatagcggcgtgcccaagagattcagcggcaacagaagcggcagcgactacagcctgaccatcagctccctggaaagcgaggacttcgccgactactactgcctgcagtacgccatctacccctacaccttcggcggaggcaccaagctggaaatcaagggcggaggcggaagtggaggcggaggatctggcggcggaggctctgaggtgcaactgcagcagtctggccccgagcttgtgaagcctggcgcctccgtgaagatgagctgcaaggccagcggctacacctttaccagctacttcatccactgggtcaagcagaaacccggccagggcctggaatggatcggcttcatcaacccttacaacgacggcagcaagtacaacgagaagttcaagggcaaggccaccctgaccagcgacaagagcagcagcaccgcctacatggaactgtccagcctgacatccgaggacagcgccgtgtactactgcaccagggacgacggctactacggctacgccatggactactggggccagggaacaagcgtcaccgtgtcctct

SEQ ID NO: 656 - DNA, 741 bp, Artificial Sequence
  Synthetic Polynucleotides
gacaccatcgtgctgacacagagccctgcttccctggccgtgtccctgggacagagagccaccatctcttgcagagccagcgagagcgtggacagctacggcaacagcttcatgcactggtatcagcagaagcccggccagccccccaagctgctgatctacctggcctccaacctggaaagcggcgtgcccgccagattttctggcagcggcagcagaaccgacttcaccctgaccatcgaccccgtggaagccgatgatgccgccacctactactgccagcagaacaactacgacccctggaccttcggcggaggcaccaagctggaaatcaagggcggaggcggaagtggaggcggaggatctggcggcggaggctctgaagtgcaactccagcagagcggccctgagcttgtgaagcctggcgcttccgtgaagatgagctgcaaggccagcggctacaccttcaccagctacgtgatgcactgggtcaagcagaaacctggacagggcctggaatggatcggctacatcaacccctacaacgacggcaccaagtacaacgagaagttcaagggcaaggccaccctgacaagcgacaccagcagcagcaccgcctacatggaactgaacagcctgaccagcgaggacagcgccgtgtacttctgcgccagacccatctacttcgacaacgactacttcgattactggggccagggcaccaccctgaaggtgtcctct

SEQ ID NO: 657 - DNA, 726 bp, Artificial Sequence
  Synthetic Polynucleotides
gacatccagatgacacagagccctagcagcctgtctgccagcgtgggagacagagtgaccatcacatgcaaggccagccaggatgtgtctacagccgtggcctggttccagcagaagcctggaaaagcccctaagctgctgatctacagccccagctacagatacaccggcgtgcccagcagattttctggcagcggctctggcaccgacttcaccctgacaatatccagcctccagcctgaggacttcacctactactgccagcagctctacagcaccccttacacattcggccagggcaccaaggtggaaatcaaaggcggaggcggaagtggaggcggaggatctggcggcggaggctctgaagtgcaactggttcagagcggagccgaagtgaagaaacctggggcctctgtgaaggtgtcctgcaaagccagcggctacacctttaccgactactacctggacgtggtcgtgcggcaagctcctggacaaggactggaatggatcggcagagtgaacccctacaacggcggcaccatctacaaccagaaattcaagggaagagtgaccctgaccagagacaccagcacctccacagcctacctggaactgagcagcctgagaagcgaagataccgccgtgtactactgcgccagggaccactacagatatgaccctctgctggactactggggccagggaaccctggttacagtgtctagt

SEQ ID NO: 658 - DNA, 744 bp, Artificial Sequence
  Synthetic Polynucleotides
gacatccagatgacacagagccctagcagcctgtctgccagcgtgggagacagagtgaccatcacctgtagagccagccagagcgtgtccaccagcagctacaactacatgcactggtatcagcagaagcccggcaagcctcctaagctgctgattaagtacgccagcaacctggaaagcggcgtgcccagcagattttctggcagcggctctggcaccgacttcaccctgacaatatccagcctccagcctgaggacttcgccacctactactgtcagcactcctgggagatccctctgacattcggccagggcaccaaggtggaaatcaaaggcggaggcggaagtggaggcggaggatctggcggcggaggctctgaagtgcaactggttcagagcggagccgaagtgaagaaacctggggcctctgtgaaggtgtcctgcaaggccagcggctacagcttcaccgactattatatgcactgggtccgacaggctccaggccagggacttgagtggatcggcagaatcaacccctacaacggcgctgccttctacagccagaacttcaaggatagagtgaccctgaccgtggacaccagcaccagcacagcctacctggaactgagcagcctgagaagcgaggacaccgccgtgtactactgcgccattgagagaggcgctgacctggaaggctacgctatggattattggggccagggaaccctggtcaccgtgtcatct

SEQ ID NO: 659 - DNA, 738 bp, Artificial Sequence
  Synthetic Polynucleotides
gagatcgtgctgacacagtctccagccacactgagcgcttctccaggcgagagagtgaccctgacctgtagagccagcagcaacgtgatctccagctacgtgcactggtatcagcagaagcctggcagcagccccagactgtttctgtacagcaccagcaatctggcctccggcgtgccaagcagattttctggctctggcagcggcaccgacttcacctttaccatctctagcctggaagccgaggacgccgccacctactactgtcagcagtacagcggctaccctctgaccttcggccagggcacaagactggaaatcaaaggcggaggcggaagtggaggcggaggatctggcggcggaggctctcaagttcagctgcaagagtctggccctggcctggtcaagcctagcgaaacactgagcctgacctgcgccgtgtctggctactctatcaccagcgcctactattggaactggatcagacagcctcctggcaaaggactggaatggatcggctacatcagctacgacggcagaaacaactacaaccccagcctgaagaaccggatcaccatcaatcccgacaccagcaagaaccagttcagcctccagctgaacagcgtgacccctgaggataccgccgtgtactactgtgccagagaaggcgactacgacgtgggcaactactacgctatggactactggggccagggaaccctggtcacagtctcttct

SEQ ID NO: 660 - DNA, 738 bp, Artificial Sequence
  Synthetic Polynucleotides
gagatcgtgctgacacagtctcccgccacactgtcactgtctccaggcgaaagagccacactgagctgtagagccagcagcaacgtgatctccagctacgtgcactggtatcagcagaagcctggacaggcccctcggctgctgatctacagcacaagcaatctggcctctggcatccccgccagattttctggctctggaagcggcaccgacttcaccctgaccataagcagcctggaacctgaggacttcgccgtgtactactgccagcagtatagcggctaccctctgaccttcggccagggcacaagactggaaatcaaaggcggaggcggaagtggaggcggaggatctggcggcggaggctctgaagtgcaactggtggaaagtggcggcggactggtgcaacctggaagaagcctgagactgtcctgtgccgccagcggctactctatcacaagcgcctactactggaactgggtccgacaggctcctggcaaaggactggaatgggtgtcctacatcagctacgacggcagaaacaactacaaccccagcctgaagaaccgcttcaccatcagccgggacaacgccaagaagtccctgtacctccagatgaacagcctgagagccgaggacacagccctgtactattgcgccaaagagggcgactacgacgtcggcaactactacgctatggactactggggccagggaaccaccgtgactgtctcttct

SEQ ID NO: 661 - DNA, 774 bp, Artificial Sequence
  Synthetic Polynucleotides
gacctgaacttcatgctgacccagccccacagcgtgtccggcagccctggaaagaccgtgaccatctcctgcaccagaagcaccggcagcatcaccagcaactacgtgcactggtatcagcagaggcccggcagcagccctaccaccgtgatctgcgaggacaacgagaggccaagcggcgtgcccgatagattcagcggctccatcgacatcagcagcaacagcgccagcctgaccatcagcggcctgaaaaccgaggacgaggccgactactactgccagagctacgacgacagcaaccacatctccgtgttcggcaccgggaccaaagtgaccgtgctgggacagcccaaggccaatcctggcggaggcggaagtggaggcggaggatctggcggcggaggctctcaggtgcaactgcaggaatctggccctggcctcgtgaagcccagcgagacactgagcctgacctgcacagtgtccggcggcagcattagcagcagcaattactactggggctggattcggcagccccctggcaagggactggaatggatcggagccatctactacagcggcagcacctactacaaccccagcctgaagtccagagtggctatcagcgtggacaccagcaagaaccagttctccctgaagctgagcagcgtgacagccgccgataccgccgtgtactactgcgccagacggatcggagtggccggacagtggtacttcgacctgtggggcagaggaaccctcgtgaccgtgtctagc

SEQ ID NO: 662 - DNA, 732 bp, Artificial Sequence
  Synthetic Polynucleotides
gacatccagatgacccagagccccagcagcctgagcgccagcgtgggcgacagagtgaccatcacctgcaaggccagccaggacgtgggcatcgccgtggcctggtaccagcagaagcccggcaaggtgcccaagctgctgatctactgggccagcaccagacacaccggcgtgcccgacagattcagcggcagcggcagcggcaccgacttcaccctgaccatcagcagcctgcagcccgaggacgtggccacctactactgccagcagtacagcagctacccctacaccttcggccagggcaccaaggtggagatcaagggcggaggcggaagtggaggcggaggatctggcggcggaggctctcagatccagttggtgcagtctggacctgacctgaagaagcctggagagacagtcaagatcagttgcaaggcttctgggtataccttcacaaacactggaatgaactgggtgaagcaggctccaggaaagggtttaaagtggatgggctggataaatacctacactggagagccaacatacgctgatgacttcaagggacggtttaccttctctttggaaacctctgccagcactgcctatttgcagatcaacaacctcaaaaatgaggacacggctacatatttctgtacaagatggggctacggtagtagcctttattatgctatggactactggggtcaaggaacctcagtcaccgtctcctca

SEQ ID NO: 663 - DNA, 723 bp, Artificial Sequence
  Synthetic Polynucleotides
gacatccagatgacccagagccccagcagcctgtctgccagcgtgggcgacagagtgaccatcacatgcaaggccagccaggacgtgggaatcgccgtggcctggtatcagcagaaacccggcaaggtgcccaagctgctgatctactgggccagcaccagacacaccggcgtgcccgatagattttccggcagcggctccggcaccgacttcaccctgacaatcagctccctccagcccgaggacgtggcaacctactactgccagcagtacagcagctacccctacaccttcggccagggcaccaaggtggaaatcaagggcggaggcggaagtggaggcggaggatctggcggcggaggctctgaagtgcaactggtggaatcaggcggcggactggtgcagcctggcggatctctgagactgagctgtgccgccagcggcttcgacttcagccggtactggatgagctgggtgcgccaggcccctggcaaaggactggaatggatcggcgagatcaaccccgacagcagcaccatcaactacgcccccagcctgaaggacaagttcatcatcagccgggacaacgccaagaacagcctgtacctccagatgaactccctgcgggccgaggacaccgccgtgtactattgcgccagacccgacggcaactactggtacttcgacgtgtggggccagggaaccctcgtgaccgtgtcatct

SEQ ID NO: 664 - DNA, 726 bp, Artificial Sequence
  Synthetic Polynucleotides
gacatcgtgatgacccagagccagaagagcatgagcaccagcgtgggcgacagagtgagcatcacctgcaaggccagccaggacgtgatcaccggcgtggcctggtaccagcagaagcccggccagagccccaagctgctgatctacagcgccagctacagatacaccggcgtgcccgacagattcaccggcagcggcagcggcaccgacttcaccttcaccatcagcaacgtgcaggccgaggacctggccgtgtactactgccagcagcactacagcacccccctgaccttcggcgccggcaccaagctggagctgaagggcggaggcggaagtggaggcggaggatctggcggcggaggctctcaggtgcagctgcagcagcccggcgccgagctggtgagacccggcgccagcgtgaagctgagctgcaaggccagcggctacagcttcaccacctactggatgaactgggtgaagcagagacccggccagggcctggagtggatcggcatgatccaccccagcgacagcgagaccagactgaaccagaagttcaaggacaaggccaccctgaccgtggacaagagcagcagcaccgcctacatgcagctgagcagccccaccagcgaggacagcgccgtgtactactgcgccagaagcaccatgatcgccaccagagccatggactactggggccagggcaccagcgtgaccgtgagcagc

SEQ ID NO: 665 - DNA, 732 bp, Artificial Sequence
  Synthetic Polynucleotides
gacatccagatgacacagagccctagcagcctgtctgccagcgtgggagacagagtgaccatcacatgcaaggccagccaggatgtgtctacagccgtggcctggtatcagcagaagcctggaaaggcccctaagctgctgatctacagcgccagctacagatacaccggcgtgcccgatagattcacaggctctggcagcggcaccgacttcaccctgacaatatctagcctccagcctgaggacttcgccacctactactgccagcagcactacagcacccctccatacacatttggcggaggcaccaaggtggaaatcaagagaggcggaggcggaagtggaggcggaggatctggcggcggaggctctcaagttcaactggttcagagcggagccgaagtgaagaaacctggggcctctgtgaaggtgtcctgcaaagccagcggctacgcctttagcagctcctggatgaactgggtccgacaggctcctggacagggcctcgaatggatcggcagaatctatcctggcgacggcgacaccaagtacaacggcaagttcaagggcaaagccacactgaccgccgacaagagcacaagcaccgcctacatggaactgagcagcctgagaagcgaggacaccgccgtgtactactgtgccagatccaccatgatcgccaccggcgctatggattattggggccagggaaccctggtcaccgtgtcatct

SEQ ID NO: 666 - DNA, 735 bp, Artificial Sequence
  Synthetic Polynucleotides
gacgtggtcatgacacagacacctctgagcctgagcgtgacacctggacagcctgccagcatcagctgtagaagcagccagagcctggtgcacaacaacggcaacacctacctgcactggtatctccagaagcctggacagagccctcagctgctgatctacaaggtgtccaacagattcagcggcgtgcccgacagattttctggcagcggctctggcaccgacttcaccctgaagattagcagagtggaagccgaggacgtgggcgtgtacttctgtagccagagcacacacgtgccaccttacacctttggcggaggcaccaaggtggaaatcaaaggcggaggcggaagtggaggcggaggatctggcggcggaggctctgaagtgcagctggttgagtctggtggcggactggttcaacctggcggaagcctgagactgtcttgtgccgccagcggcttcaccttcagcgactactatatggcctgggtccgacaggcccctggcaaaggacttgaatgggtcgccgagatcaactacgacggcagcagcacctactacgtggacagcgtgaagggcagattcaccatcagccgggacaacgccaagaacagcctgtacctccagatgaactccctgagagccgaggataccgccgtgtactactgcgccagagacagaggcttctacttcgactattggggccagggcaccaccgtgacagtctcttct

SEQ ID NO: 667 - DNA, 735 bp, Artificial Sequence
  Synthetic Polynucleotides
gacgtggtcatgacacagacacctctgagcctgagcgtgacacctggacagcctgccagcatctcctgtagaagcagccagagcctggtgcacagcaacggcctgacatacctgcactggtatctccagaagcctggacagagccctcagctcctgatctacaaggtgtccaacagattcagcggcgtgcccgacagattttctggcagcggctctggcaccgacttcaccctgaagatcagcagagtggaagccgaggacgtgggcgtgtacttctgtagccagagcacacacgtgccacctttcacctttggcggaggcaccaaggtggaaatcaaaggcggaggcggaagtggaggcggaggatctggcggcggaggctctgaagtgcagctcgttgagtctggtggcggactggttcaacctggcggaagcctgagactgtcttgtgccgccagcggcttcaccttcagcgactactatatggcctgggtccgacaggcccctggcaaaggacttgaatgggtcgccagcatcaactacgacggcgagagcacctactacgtggacagcgtgaagggcagattcaccatcagccgggacaacgccaagaacagcctgtacctccagatgaactccctgagagccgaggataccgccgtgtactactgcgccagagacagaggctactacttcgactattggggccagggcaccaccgtgacagtctcttct

SEQ ID NO: 668 - DNA, 735 bp, Artificial Sequence
  Synthetic Polynucleotides
gacgtggtcatgacacagagccctctgagcctgcctgtgacacctggcgaacctgccagcatctcctgtagaagcagccagagcctggtgcacagcaacggcaatacctacctgcactggtatctccagaagcctggacagagcccacagctcctgatctacaaggtgtccaaccggttcagcggcgtgcccgatagattttctggcagcggctctggcaccgacttcaccctgaagatcagcagagtggaagccgaggacgtgggcgtgtacttctgtagccagagcacacacgtgccacctttcacctttggcggaggcaccaaggtggaaatcaaaggcggaggcggaagtggaggcggaggatctggcggcggaggctctgaagtgcagctcgttgagtctggtggcggactggttcaacctggcggaagcctgagactgtcttgtgccgccagcggcttcaccttcagcgactactatatggcctgggtccgacaggcccctggcaaaggacttgaatgggtcgccgacatcaactacgatggcggcagcacctactacctggacagcctgaagtcccggttcaccatctccagagacaacgccaagaacagcctgtacctccagatgaactccctgagagccgaggataccgccgtgtactactgcgccagagacagaggctactacttcgactattggggccagggcaccctggtcacagtctcttct

SEQ ID NO: 669 - DNA, 729 bp, Artificial Sequence
  Synthetic Polynucleotides
gacatccagatgacccagagcagcagctacctgagcgtgtcccttggcggcagagtgaccatcacctgtaaagccagcgaccacatcaacaactggctggcctggtatcagcagaagcctggcaacgcccctagactgctgattagcggagccacctctctggaaacaggcgtgccaagcagattttccggcagcggctctggcaaggactacaccctgagcatcaccagcctccagaccgaggatgtggctacctactactgccagcagtattggagcaccccttggacctttggcggaggcaccaagctggaaatcaaaggcggaggcggaagtggaggcggaggatctggcggcggaggctctcaggttcagctccagcagtctggcgctgagcttgctagacctggcgcttctgtgaagctgagctgcaaggccagcggctacaccttcaccagctactggatgcagtgggtcaagcagaggccaggccaaggactggaatggatcggagccatctatcccggcgacggcgataccagatacacccagaagttcaagggcaaagccacactgaccgccgacaagagcagctccacagcctacatgcaactgagcagcctggcttccgaggacagcgccgtgtactattgtgccagaggcaaggtgtactacggcagcaaccctttcgcctattggggccagggaaccctggttacagtgtctgct

SEQ ID NO: 670 - DNA, 729 bp, Artificial Sequence
  Synthetic Polynucleotides
gacatcgtgatgacccagagccacaagttcatgagcaccagcgtgggcgacagagtgtccatcacctgtaaagccagccaggacgtgtcaacagccgtggcctggtatcagcagaagcctggacagagccccaagctgctgatctacagcgccagctacagatacaccggcgtgcccgatagattcacaggctctggcagcggcaccgacttcacctttacaatcagcagcgtgcaggccgaggacctggccgtgtattattgccagcagcactacagcacccctccatacacatttggcggaggcaccaagctggaaatcaaaggcggaggcggaagtggaggcggaggatctggcggcggaggctctcaggttcagctccagcagtctggccctgagcttgtgaaacctggcgcttccgtgaagattagctgcaaggccagcggctacgccttcagcagctcctggatgaactgggtcaagcagaggccaggccagggcctcgaatggatcggcagaatctatcctggcgacggcgacaccaagtacaacggcaagttcaagggcaaagccacactgaccgccgacaagtctagcagcaccgcctatatgcagctcagcagcctgacctctgtggacagcgccgtgtacttctgtgcccggtctaccatgattgccaccggcgctatggattactggggccagggaacaagcgtgaccgtgtcatct

SEQ ID NO: 671 - DNA, 744 bp, Artificial Sequence
  Synthetic Polynucleotides
cagagcgtgctgacacagcctccatccgtgtctggcgctccaggccagagagtgaccatctcctgtaccggcagcggcagcaacatcggagccccctacgacgtgtcctggtatcagcaactgcctggcaccgcccccaagctgctgatctaccacaacaacaagcggcccagcggcgtgcccgatagattcagcggctctaagagcggcaccagcgccagcctggctatcactggactccaggccgaggacgaggccgactactactgtgccacagtggaagccggcctgagcggctctgtgtttggcggcggaacaaagctgaccgtgctgggagctggcggaggcggaagtggaggcggaggatctggcggcggaggctctcaggtgcaactggtgcagagcggagccgaagtgaagaaacctggggccagcgtgaaggtgtcctgcaaggtgtccggctacaccctgaccgagctgagcattcactgggtgcgccaggcccctggcaagggactggaatggatgggcggcttcgaccccgaagagaacgagatcgtgtacgcccagcggttccagggcagagtgacaatgaccgaggacaccagcaccgacaccgcctacatggaactgagcagcctgcggagcgaggataccgccgtgtactactgcgccatcgtgggcagcttcagccctctgacactgggcctgtggggccagggaactatggtcaccgtgtccagc

SEQ ID NO: 672 - DNA, 744 bp, Artificial Sequence
  Synthetic Polynucleotides
cagagcgtgctgacacagcctccatccgtgtctggcgctccaggccagagagtgaccatctcctgtaccggcagcggcagcaacatcggagccccctacgacgtgtcctggtatcagcaactgcctggcaccgcccccaagctgctgatctaccacaacaacaagcggcccagcggcgtgcccgatagattcagcggctctaagagcggcaccagcgccagcctggctatcactggactccaggccgaggacgaggccgactactactgccagagctacgacagcagcagcatcagcaccatcttcggcggaggcaccaagctgacagtgctgggagctggcggaggcggaagtggaggcggaggatctggcggcggaggctctcaggtgcaactggtgcagagcggagccgaagtgaagaaacctggggccagcgtgaaggtgtcctgcaaggtgtccggctacaccctgaccgagctgagcattcactgggtgcgccaggcccctggcaagggactggaatggatgggcggcttcgaccccgaagagaacgagatcgtgtacgcccagcggttccagggcagagtgacaatgaccgaggacaccagcaccgacaccgcctacatggaactgagcagcctgcggagcgaggataccgccgtgtactactgtgccatcgtgggcagcttcagcggaatcgcctacagaccttggggccagggcacaatggtcaccgtgtctagc

SEQ ID NO: 673 - DNA, 738 bp, Artificial Sequence
  Synthetic Polynucleotides
gacatccagatgacccagagccccagcagcctgtctgccagcgtgggcgacagagtgaccatcacctgtagcgccagcagcagcgtgtcctacatgtactggtatcagcagaagcccggcaaggcccccaagctgctgatctacctgaccagcaatctggcctccggcgtgcccagcagattttctggcagcggctccggcaccgacttcaccctgacaatcagctccctccagcccgaggacttcgccacctactactgtcagcagtggcggagcaaccccttcaccttcggccagggcaccaagctggaaatcaagagaggcggaggcggaagtggaggcggaggatctggcggcggaggctctcagatcaccctgaaagagtccggccccaccctcgtgaagcctacccagaccctgacactgacctgcaccttcagcggcttcagcctgagcacaagcggcatgggcgtgggctggatcagacagcctcctggaaaggccctggaatggctggcccacatttggtgggacgacgtgaagcggtacagccccagcctgaagtcccggctgaccattaccaaggacaccagcaagaaccaggtggtgctgaccatgacaaacatggaccccgtggacaccgccacatattactgcgcccggatcgtgtccttcgacaacgacgtggtgtccgctatggactactggggccagggaaccctcgtgaccgtgtctagt

SEQ ID NO: 674 - DNA, 723 bp, Artificial Sequence
  Synthetic Polynucleotides
gagatcgtgatgacccagagccctgccaccctgtccgtgtctccaggcgaaagagccaccctgagctgcaaggcttcccagagcgtgtccaacgacgtcgtgtggtatcagcagaagcccggccaggcccccagactgctgatctactacgccagcaacagatacaccggcatccccgccagattcagcggctctggcagcggcaccgagttcaccctgacaatcagcagcctccagagcgaggacttcgccgtgtactactgtcagcaggactacaccagcccctggaccttcggccagggcaccaagctggaaatcaagagaggcggaggcggaagtggaggcggaggatctggcggcggaggctctcaggtgcaactggtgcagagcggagccgaagtgaagaaacctggggccagcgtgaaggtgtcctgcaaggccagcggctacacctttaccaactacggcatgaactgggtgcgccaggctcctggacagggcctggaatggatgggctggatcaacacctacaccggcgagcccacctacgccgacgacttcaagggcagagtgaccatgaccaccgacaccagcacctccaccgcctacatggaactgcggagcctgagaagcgacgacaccgccgtgtattattgcgcccggatcggcgacagcagccccagcgattattggggccagggaaccctcgtgaccgtgtcctct

SEQ ID NO: 675 - DNA, 723 bp, Artificial Sequence
  Synthetic Polynucleotides
agcaccgacatccagatgacccagagccccagcagcctgtctgccagcgtgggcgacagagtgaccatcacctgtagagccagccagagcatcagcagctacctgaactggtatcagcagaagcccggcaaggcccccaaactgctgatctacctggccagcaacctgcagagcggcgtgcccagcagattttctggcagcggctccggcaccgacttcaccctgacaatcagctccctgcagcccgaggacttcgccacctactactgtcagcaggccgagtacatgcccctgaccttcggccagggaacaaaggtggaaatcaagagagccggcggaggcggaagtggaggcggaggatctggcggcggaggctctgaagtgcaactgctggaatctggcggcggactggtgcagcctggcggatctctgagactgagctgtgccgccagcggcttcacctttagcggctacgccatgagctgggtgcgccaggctcctggcaaaggcctggaatgggtgtccgagatcgcccctcccggcctgaataccagatacgccgatagcgtgaagggccggttcaccatcagccgggacaacagcaagaacaccctgtacctgcagatgaacagcctgcgggccgaggataccgccgtgtactactgcgccaagagcgacaccgccttcgactactggggacagggaacccttgtgaccgtgtcc

SEQ ID NO: 676 - DNA, 735 bp, Artificial Sequence
  Synthetic Polynucleotides
gaccaggccgtgctgacccaggagagcgccctgaccaccagccccggcgagaccgtgaccctgacctgcagaagcagcaccggcgccgtgaccaccagcaactacgccaactgggtgcaggagaagcccgaccacctgttcaccggcctgatcggcggcaccaacaacagagtgcccggcgtgcccgccagattcagcggcagcctgatcggcgacaaggccgccctgaccatcaccggcgcccagaccgaggacgaggccatctacttctgcgtgctgtggcacagcaaccactgggtgttcggcggcggcaccaagctgaccgtgctgggcggaggcggaagtggaggcggaggatctggcggcggaggctctgacgtgcagctggtggagagcggcggcggcctggtgcagcccggcggcagcagaaagctgagctgcgccgccagcggcttcaccttcagcagcttcgggatgcactgggtgagacaggcccccgagaagggcctggagtgggtggcctacatcagcagcggcagcagcaccctgcactacgccgacaccgtgaagggcagattcaccatcagcagagacaaccccaagaacaccctgttcctgcagatgaccagcctgagaagcgaggacaccgccatgtactactgcgccagatggggcaactacccccactacgctatggactactggggccagggcaccagcgtgaccgtgagcagc

SEQ ID NO: 677 - DNA, 708 bp, Artificial Sequence
  Synthetic Polynucleotides
gacatccagatgacccagagccccagcagcctgtctgccagcgtgggcgacagagtgaccatcacctgtagagccagccagggcatcagaaacaacctggcctggtatcagcagaagcccggcaaggcccccaagcggctgatctacgccgccagcaatctccagagcggcgtgcccagcagattcacaggctctggcagcggcaccgagttcaccctgatcgtgtctagcctccagcccgaggacttcgccacctactactgcctccagcaccacagctaccccctgacatctggcggaggcaccaaggtggaaggcggaggcggaagtggaggcggaggatctggcggcggaggctctgaggtgcaggtgctggaaagtggcggaggactggtgcagcctggcggctctctgagactgtcttgtgccgccagcggcttcaccttcagcagctacgccatgagctgggtgcgccaggcccctggaaaaggactggaatgggtgtccgccatcagcggctctggcgggtctaccaactacgccgatagcgtgaagggccggttcaccatcagccgggacaacagcaagaacaccctgtacctccagatgaacagcctgcgggccgaggacaccgccgtgtattattgtgccggcagcagcgggtggagcgagtattggggacagggcaccctcgtgaccgtgtcctct

SEQ ID NO: 678 - DNA, 723 bp, Artificial Sequence
  Synthetic Polynucleotides
gagatccagctggtgcagagcggagccgaagtgaagaagcctggcgagagcctgcggatcagctgcaagggcagcggcttcaacatcgaggactactacatccactgggtgcgccagatgcccggcaagggcctggaatggatgggcagaatcgaccccgagaacgacgagactaagtacggccccatcttccagggccacgtgaccatcagcgccgacaccagcatcaacaccgtgtacctccagtggtccagcctgaaggccagcgacaccgccatgtactactgcgcctttagaggcggcgtgtactggggccagggcaccacagtgacagtgtctagcggcggaggcggaagtggaggcggaggatctggcggcggaggctctgatgtcgtgatgacccagagccccgacagcctggctgtgtctctgggagagagagccaccatcaactgcaagtccagccagtccctgctggacagcgacggcaagacctacctgaactggctccagcagaagcccggccagccccccaagagactgatctccctggtgtccaagctggactccggcgtgcccgatagattttccggctctggcagcggcaccgacttcaccctgacaatcagctcccttcaggccgaggacgtggccgtgtactattgctggcagggcacacacttccccggcacctttggcggaggcaccaaggtggaaatcaag

SEQ ID NO: 679 - DNA, 744 bp, Artificial Sequence
  Synthetic Polynucleotides
gagcttgtgatgacccagagccccagcagcctgacagtgacagccggcgagaaagtgaccatgagctgcaagagcagccagagcctgctgaacagcggcaaccagaagaactacctgacctggtatcagcagaagcccggccagccccccaagctgctgatctactgggccagcaccagagaaagcggcgtgcccgatagattcaccggctctggcagcggcaccgacttcaccctgacaatcagcagcgtgcaggccgaggacctggccgtgtactactgccagaacgactacagctaccccctgaccttcggagccggcaccaagctggaaatcaagggcggaggcggaagtggaggcggaggatctggcggcggaggctctgaagtgcagctgctggaacagtctggcgccgaacttgtgcggcctggcaccagcgtgaagatcagctgtaaagccagcggctacgccttcaccaactactggctgggctgggtcaagcagaggcctggacacggcctggaatggatcggcgacatctttcccggctccggcaacatccactacaacgagaagttcaagggcaaggccaccctgaccgccgacaagtctagcagcaccgcctacatgcagctgtccagcctgacctttgaggacagcgccgtgtatttctgtgcccggctgcggaactgggacgagcccatggattattggggccagggcaccaccgtgaccgtgtctagt

SEQ ID NO: 680 - DNA, 747 bp, Artificial Sequence
  Synthetic Polynucleotides
gagctgcagatgacccagagccctagcagcctgtctgccagcgtgggcgacagagtgaccatcacctgtagagccagccagagcatcagcagctacctgaactggtatcagcagaagcccggccagccccccaaactgctgatctactgggccagcaccagagaaagcggcgtgcccgatagattcagcggcagcgagagcggcaccaactacaccctgaccatcagctccctgcagcccgaggacttcgccacctacttttgccagcagagcgacagcctgcccatcacctttggacagggcacccggctggacattcagggcggaggcggaagtggaggcggaggatctggcggcggaggctctgaggtgcaactgctggaatctgggggcggagtggtgcagcctggcagaagcctgagactgagctgtgccgccagcggcttcaccttcagctcctacggaatgcactgggtgcgccaggcccctggcaaaggactggaatgggtggccgtgatctcctacgacggcagcaacaagtactacgccgacagcgtgaagggccggttcaccatcagccgggacaacagcaagaacaccctgtacctgcagatgaacagcctgcgggccgaggacaccgccgtgtactactgcgccaaggatatgggctggggcagcggctggcggccttactactactacggcatggacgtgtggggccagggcaccaccgtgacagtgtcatct

SEQ ID NO: 681 - DNA, 738 bp, Artificial Sequence
  Synthetic Polynucleotides
gacatccaaatgacacagagtccttctagtttgagtgcgagcgtgggggacagggtgaccattacctgcagggccagccagagcataagctcataccttaattggtaccagcaaaaaccaggtaaggcccctaagctcctgatctacgcggcctcttcacttcaatctggggtcccttcccgcttcagtggctccggcagcggcaccgacttcacgctcactatatcaagtctgcagcctgaggatctcgccacctattactgtcaacaaagttattccacccctttcacctttggaccgggcacgaaagtggatattaagggcggaggcggaagtggaggcggaggatctggcggcggaggctctgtgcacgaggtccagcttgtgcagtccggggcagaggtcaagaagcctggttctagcgtaaaagtgagttgcaaagcctcaggtgggacattttcatcctacgcgatcagttgggttagacaggctcctggtcaagggctggaatggatgggcggaattattccaatcttcggaacagcgaattacgcgcagaagttccagggtagagtaaccatcactgctgacaagtccacctccaccgcatacatggaattgtctagtctccggagcgaggatacggcggtgtattattgtgctacgttcgccctgtttggcttccgcgaacaggctttcgacatctgggggcagggcacgacagtcacggttagtagt

SEQ ID NO: 682 - DNA, 732 bp, Artificial Sequence
  Synthetic Polynucleotides
gacgtcgtgatgacccagacccctctgagcctgcctgtgtccctgggcgatcaggccagcatctcctgtagaagcagccagagcctggtgcacagcaacggcaacacctacctgcggtggtatctccagaagcccggccagagccccaaggtgctgatctacaaggtgtccaacagattcagcggcgtgcccgacagattctccggcagcggctctggcaccgacttcaccctgaagatcagccgggtggaagccgaggacctgggcgtgtacttctgtagccagagcacccacgtgccctggacctttggcggcggaacaaagctggaaatcaagggcggaggcggaagtggaggcggaggatctggcggcggaggctctgaagtgaagctggacgagacaggcggagggctggtgcagcctggcagacctatgaagctgagctgtgtggcctccggcttcaccttcagcgactactggatgaactgggtgcgccagtcccccgagaagggcctggaatgggtggcccagatcagaaacaagccctacaactacgaaacctactacagcgacagcgtgaagggccggttcaccatcagcagggacgacagcaagagcagcgtgtacctccagatgaacaacctgagggtggaagatatgggcatctactactgcaccggcagctactacggcatggactactggggccagggcaccagcgtgaccgtgtct

SEQ ID NO: 683 - DNA, 765 bp, Artificial Sequence
  Synthetic Polynucleotides
gacgtggtcatgacacagaccccactgagcctgcctgtgtctctgggagatcaggccagcatctcctgtagaagcagccagagcctggtgcacagcaacggcaacacctacctgcggtggtatctccagaagcctggacagagccccaaggtgctgatctacaaggtgtccaacagagtgtccggcgtgcccgatagattttctggcagcggctctggcaccgacttcaccctgaagatcaatagagtggaagccgaggacctgggcgtgtacttctgtagccagagcacccatgtgccttggacctttggcggaggcaccaagctggaaatcaagagcagcgccgacgacgccaagaaggacgccgccaaaaaggatgatgccaagaaagacgatgctaaaaaagacggcggcgtgaagctggacgagacaggcggaggacttgttcaacctggcggagccatgaagctgagctgtgtgaccagcggctttaccttcggccactactggatgaactgggtccgacagtcccctgagaaaggactggaatgggtcgcccagttcagaaacaagccctacaactacgaaacctactacagcgacagcgtgaagggcagattcaccatcagccgggacgacagcaagtccagcgtgtacctccagatgaacaacctgcgcgtggaagataccggcatctactactgtaccggggccagctacggcatggaatatctcggccagggcaccagcgtgaccgtgtctaca

SEQ ID NO: 684 - DNA, 753 bp, Artificial Sequence
  Synthetic Polynucleotides
caggtgcaactggtggaatctggcggcaatctggttcagcctggcggctctctgagactgtcttgtgccgccagcggcttcaccttcggcagcttttctatgagctgggtccgacaagctcctggcggaggacttgaatgggtggcaggactgtctgccagaagcagcctgacacactacgccgactctgtgaagggcagattcaccatcagccgggacaacgccaagaacagcgtgtacctccagatgaacagcctgagagtggaagataccgccgtgtactactgcgccagaagaagctacgacagcagcggctactggggccacttctacagctacatggatgtgtggggccagggcaccctggttacagtttctggcggaggcggaagtggaggcggaggatctggcggcggaggctcttctgtgctgacccagcctagctccgtgtctgctgctcctggacagaaagtgaccatctcctgtagcggcagcaccagcaacatcggcaacaactacgtgtcctggtatcagcagcaccccggcaaggcccctaagctgatgatctacgacgtgtccaagaggcccagcggcgtgccagatagattttccggcagcaagagcggcaacagcgccagcctggatattagcggactccagtctgaggacgaggccgactactattgcgccgcctgggatgatagcctgagcgagtttctgtttggcaccggcaccaagctgacagtgcttgga

SEQ ID NO: 685 - DNA, 738 bp, Artificial Sequence
  Synthetic Polynucleotides
gacatccagatgacacagagccctagcagcctgtctgccagcgtgggagacagagtgaccatcacctgtagaaccagccagagcctgagcagctacacccactggtatcagcagaagcctggcaaggcccctaagctgctgatctatgccgcttccagcagaggcagcggagtgcctagcagattttctggcagcggctccggcaccgatttcaccctgacaatatccagcctccagcctgaggacttcgccacctactactgccagcagagcagaacattcggccagggcaccaaggtggaaatcaaaggcggaggcggaagtggaggcggaggatctggcggcggaggctctcaagttcagctccagcagtctggccctggcctggttaagcctagccagacactgagcctgacctgtgccatcagcggcgatagcgtgtccagctacaacgccgtgtggaactggatcagacagagcccatccagaggactggaatggctgggcagaacctactacagaagcggctggtacaacgactacgccgagagcgtgaagtcccggatcaccatcaatcccgacaccagcaagaaccagttcagcctgcaactgaacagcgtgacccctgaggataccgccgtgtactactgtgctagaagcggccacatcaccgtgttcggcgtgaacgtggacgccttcgatatgtggggccagggaacaatggtcaccgtgtctagt

SEQ ID NO: 686 - DNA, 735 bp, Artificial Sequence
  Synthetic Polynucleotides
gacatcgtgctgacccagagccctctgagcctggccgtgtctctgggacagcctgccatcatcagctgcaaggccagccagagcgtgtcctttgccggcacctctctgatgcactggtatcaccagaagcccggccagcagcccagactgctgatctacagagccagcaacctggaagccggcgtgcccgatagattttccggcagcggcagcaagaccgacttcaccctgaccatcagccccgtggaagccgaagatgccgccacctactactgccagcagagcagagagtacccctacaccttcggcggaggcaccaagctggaaatcaagaggggcggaggcggaagtggaggcggaggatctggcggcggaggctctcaggtccaactggtgcagagcggagccgaggtcgtgaagcctggcgcttccgtgaagattagctgcaaagccagcggctacacctttaccggctactttatgaactgggtcaagcagagccctggccagagcctggaatggatcggcagaatccacccctacgacggcgacaccttctacaaccagaagttccagggcaaggccaccctgacagtggacaagagcagcaacaccgcccacatggaactgctgagcctgaccagcgaggacttcgccgtgtactactgcaccagatacgacggcagccgggctatggactattggggccagggcaccaccgtgaccgtgtctagt

SEQ ID NO: 687 - DNA, 747 bp, Artificial Sequence
  Synthetic Polynucleotides
gacctggaaaccaccctgacacagagccctgccaccctgagtgtgtccccaggcgagagagtgaccctgagctgtagagccagccagagcgtgggcagcaacctggcctggtatcagcagaagttcggccaggcccccagactgctgatctacgacgccagcacaagagccaccggcatccccgccagattttctggcagcggctccggcaccgagttcaccctgaccatcagcagactggaacccgaggacttcgccgtgtactactgccaccagtacggcagcagccccagaacctttggacagggcaccaaggtggacatcaagcggggcggaggcggaagtggaggcggaggatctggcggcggaggctctcaggtgcaactggtgcagagcggagccgaagtgaagaaacctggggccagcgtgaaggtgtcctgcaaggccagcggctacacctttaccacctacggcatctcttgggtgcgccaggctcctggacagggactggaatggatgggctggatcagcgcctacaacggccacaccaactacgcccagatgctccagggcagagtgaccatgaccaccgacaccagcacctccaccgcctacatggaactgcggggcctgagaagcgacgacaccgccgtgtattattgcgccagagaagcctacgcctcctacggcagcggcagctactggaccgattattggggccagggcaccctcgtgaccgtgtctagt

SEQ ID NO: 688 - DNA, 723 bp, Artificial Sequence
  Synthetic Polynucleotides
gacgttgtgatgacccagacccccctgagcctgcctgtgacacctggcgaacctgccagcatcagctgtcggagcagccagagcctggtgcacagaaacggcaacacctacctgcactggtatctccagaagcccggccagagccccaagctgctgatccacaaggtgtccaacagattcagcggcgtgcccgacagattctccggcagcggctctggcaccgacttcaccctgaagatcagccgggtggaagccgaggacctgggcgtgtacttctgtagccagagcacccatgtgccccccctgacatttggagccggcaccaagctggaactgaagggcggaggcggaagtggaggcggaggatctggcggcggaggctctgaagtgcagctggtgcagtctggcgctgaggtggaaaagcctggggccagcgtgaagattagctgcaaggccagcggcagcagcttcaccggctacaacatgaactgggtgcgccagaacatcggcaagagcctggaatggatcggagccatcgacccctactacggcggcaccagctacaaccagaagttcaagggcagagccaccctgaccgtggacaagagcaccagcaccgcctacatgcacctgaagtccctgcggagcgaggacaccgccgtgtactactgtgtgtccggcatggaatattggggccagggcaccagcgtgaccgtgtctagt

SEQ ID NO: 689 - DNA, 717 bp, Artificial Sequence
  Synthetic Polynucleotides
gagatcgtgatgacccagacccctgccaccctgtctgtgtctgccggcgagagagtgaccattacctgcaaggccagccagagcgtgtccaacgacgtgacctggtatcagcagaagcccggccaggcccccagactgctgatctacagcgccagcaacagatacagcggcgtgcccgccagattttccggcagcggctacggcaccgagttcaccttcaccatcagcagcgtgcagagcgaggacttcgccgtgtacttctgtcagcaagactacagcagcttcggccagggcaccaagctggaaatcaagaggggcggaggcggaagtggaggcggaggatctggcggcggaggctctcaggtgcagctggtggaatctggacctggcgtggtgcagcctggcagaagcctgagaatcagctgtgccgtgtccggcttcagcgtgaccaactacggcgtgcactgggtgcgccagccacctggaaaaggactggaatggctgggcgtgatctgggctggcggcatcaccaactacaacagcgccttcatgtcccggctgaccatctccaaggacaacagcaagaacaccgtgtacctccagatgaacagcctgcgggccgaggacaccgccatgtactactgtgcttccagaggcggccactacggctacgccctggattattggggccagggaaccctcgtgaccgtgtcctct

SEQ ID NO: 690 - DNA, 726 bp, Artificial Sequence
  Synthetic Polynucleotides
gacatccagatgacccagaccgccagcagcctgcctgcctctctgggcgacagagtgaccatctcctgtagcgccagccaggacatcagcaactacctgaactggtatcagcagaaacccgacggcaccgtgaagctgctgatcttctacagcagcaacctgcacagcggcgtgcccagcagattttctggcggcggaagcggcaccgactacagcctgaccatcagcaatctggaacccgaggacattgccacctacttttgccaccagtacagcaagctgccctggacctttggcggaggcaccaagctggaaatcaagagaggcggaggcggaagtggaggcggaggatctggcggcggaggctctgaagtgaccctggtggaaagcggcggagacttcgtgaagcctggcggctctctgaaggtgtcctgtgccgccagcggcttcgcctttagccactacgccatgagctgggtgcgccagacccctgccaagagactggaatgggtggcctacatcagcagcggcggctccggcacctactactccgatagcgtgaagggccggttcaccatcagccgggacaacgccaagaacaccctgtacctccagatgcggagcctgcggagcgaggacagcgccatgtatttctgcaccagagtgaagctgggcacctattacttcgactcttggggccagggcaccaccctgaccgtgtcatct

SEQ ID NO: 691 - DNA, 732 bp, Artificial Sequence
  Synthetic Polynucleotides
cagttcgtgctgacccagagcccttctgcctctgctgccctgggagcctctgccaagctgacctgtacactgagcagcgcccacaagacctacaccatcgactggtatcagcagcagaagggaaaggcccccagatacctgatccaagtgaagtccgacggcacctacacaaaggccaccggcgtgcccgatagattcagcggcagtagcagcggagccgatagatacctgattatccccagcgtgcaggccgacgacgaggccgattactactgcggcaccgattacaccggcggctacgtgttcggcggaggcacacaactgaccgtgacaggcggaggcggaagtggaggcggaggatctggcggcggaggctctgagcaactgaaagagtctggcggcggactgttcaagcccaccgataccctgaccctgacctgcaccgtgtccggcttcagcctgagctactacggcgtgaactgggtgcgccaggcccctggcaatggcctggaatggatcggcacaatcggcggcagcggcgacacctactatgcctcttgggccaagtccagaagcaccatcatcagaaacaccaacgagaacaccgtgaccctgaagatgaccagcctgacagccgccgacaccgccacctacttttgcgtcagatacgccaacatcggctacgagtatttcaacgtgtggggacccggcaccctcgtgaccgtgtcatct

SEQ ID NO: 692 - DNA, 747 bp, Artificial Sequence
  Synthetic Polynucleotides
cagttcgtgctgacccagagcccttctgtgtctgccgccctgggagcctctgccaagctgacctgtacactgagcagcgcccacaagacctacaccatcgactggtatcagcagcagcagggcgaggcccccagatacctgatgcaagtgaagtccgacggcagctacaccaagggcaccggcgtgcccgatagattcagcggcagtagcagcggagccgatagatacctgattatccccagcgtgcaggccgacgacgaggccggatatgtgtgcggcgctgacgacaatggcggctacgtgttcggcggaggcacccaactgacagtgacaggcggaggcggaagtggaggcggaggatctggcggcggaggctctcagagcgtgaaagagtctgagggcggcctgttcaagcccaccgataccctgaccctgacctgcaccgtgtccggcttcagcctgagcagacacgccctgacatgggtgcgccaggcccctggaaatggcctggaatggatcggagccatcgacaacgccggcaccacctactatgcctcttgggccaagtccagaagcaccatcacccggaacaccgacctgcacaccgtgaccctgaagatgaccagcctgaccgccagcgacaccgccacctacttttgcgccagagtgttctacgacatcaacagcggctactacctggacggcatggacctgtggggacctggcacacttgtgaccgtgtccagc

SEQ ID NO: 693 - DNA, 729 bp, Artificial Sequence
  Synthetic Polynucleotides
gacatccagatgacccagagccccagcagcctgtctgccagcgtgggcgacagagtgaccatcacctgtagagccagccagggcatcagctcttggctggcctggtatcagcagaagcccgagaaggcccccaagagcctgatctacgccgcctctagtctccagagcggcgtgcccagcagattttctggcagcggctccggcaccgacttcaccctgacaatcagctccctccagcccgaggacttcgccacctactactgccagcagtacaacagctacccccccacctttggcggaggcaccaaggtggaaatcaagggcggaggcggaagtggaggcggaggatctggcggcggaggctctgaagtgcaactggtggaatcaggcggcggactggtgcagcctggcgagtctctgagactgagctgtgtggcctccggcttcaccttcagccggtacaagatgaactgggtgcgccaggcccctggcaagggactggaatgggtgtcctacatcagccgcagcggcagagacatctactacgccgacagcgtgaagggccggttcaccatcagcagagacaacgccaagaacagcctgtacctccagatgaactccctgcgggacgaggacaccgccgtgtactactgtgccggaaccgtgaccacctattactacttcggcatggacgtgtggggccacggcaccaccgtgacagtgtcatct

SEQ ID NO: 694 - DNA, 732 bp, Artificial Sequence
  Synthetic Polynucleotides
gacatccagatgacccagagccccagcagcctgtctgccagcgtgggcgacagagtgaccatcacctgtagagccagccagggcatcagctcttggctggcctggtatcagcagaagcccgagaaggcccccaagagcctgatctacgccgcctctagtctccagagcggcgtgcccagcagattttctggcagcggctccggcaccgacttcaccctgacaatcagctccctccagcccgaggacttcgccacctactactgccagcagtacaacagctaccctcccacctttggcggaggcaccaaggtggaaatcaagggcggaggcggaagtggaggcggaggatctggcggcggaggctctgaagtgcaactggtggaatccgggggaggctctgtgcagcctggcgagtctctgagactgagctgtgtggcctccggcttcaccttcagccggtacaagatgaactgggtgcgccaggcccctggcaagggactggaatgggtgtcctacatcagccgcagcggcagagacatctactacgccgacagcgtgaagggccggttcaccatcagcagagacaacgccaagaacagcctgtacctccagatgaactccctgcgggacgaggacaccgccgtgtactactgtgccggaaccgtgaccacctattactacgacttcggcatggacgtgtggggccagggcacaaccgtgacagtgtctagc

SEQ ID NO: 695 - DNA, 729 bp, Artificial Sequence
  Synthetic Polynucleotides
cagtctgtgctgacacagcctccatctgcctctggcacacctggacagagagtgaccatcagctgtagcggcagcagaagcaacgtcggcggcaactacgtgttctggtatcagcaggtcccaggcgctacccctaagctgctgatctacagaagcaatcagcggcctagcggcgtgcccgatagatttgccggaagcaagagcggcagctctgccagccttgccatctctggactgagaagcgaggacgaggccgactactactgtgccacctgggatgatagcctgagcggcttcgtgtttggcaccggcaccaaagtgacagtgcttggtggcggaggcggaagtggaggcggaggatctggcggcggaggctctgaagttcagctggttgaatctggcggcggactggttaagcctggcggatctctgagactgtcttgtgccgccagcggcttcaccttcagcgattactacatgagctggatcagacaggcccctggcaaaggactggaatgggtgtcctacatcagcagcagcggctccaccatctactacgccgatagcgtgaagggcagattcaccatcagccgggacaacgccaagaacagcctgtacctccagatgaactccctgagagccgaggacaccgccgtgtactattgcgccagaggctacggcaaagcctacgatcaatggggccagggcacactggtcaccgtttcttct

SEQ ID NO: 696 - DNA, 726 bp, Artificial Sequence
  Synthetic Polynucleotides
cagtctgtggtcacacagccacctagcatgtctgccgctccaggccagcaagtgaccatctcttgtagcggcggcaacagcaacatcgagcggaactacgtgtcctggtatctgcaactgcctggcacagcccctaagctggtcatcttcgacaacgacagacggcccagcggcatccccgatagattttctggcagcaagagcggcaccagcgccacactgggaattaccggacttcagacaggcgacgaggccgactactactgtggcacatgggactctagcctgagaggctgggttttcggcggaggcacaaagctgacagtgcttggtggcggaggcggaagtggaggcggaggatctggcggcggaggctctgaagtgcagctcgttgagtctggcggcggactgattcaacctggcggaagcctgagactgagctgtgccgcttccggcttcaccttcagcaactacgccatgaactgggttcgacaggcccctggcaaaggactggaatgggtgtccaccatcaacggcagaggcagcagcaccatctacgccgattctgtgaagggcagattcaccatcagccgggacaacagcaagaacaccctgtacctccagatgaactccctgagagccgaggacaccgccacctattactgtgcccggtacatcagcagaggactgggcgattcttggggccagggcacactggttacagtg

SEQ ID NO: 697 - DNA, 726 bp, Artificial Sequence
  Synthetic Polynucleotides
cagtctgtggtcacacagcctccatctgtgtctggcgctccaggccagagagtgaccatctcttgtaccggcagcagcagcaatatcggagccggctatgacgtgcactggtatcagcagctccctggcacagcccctaaactgctgatctacggcaacagcaacagacccagcggcgtgcccgatagattttccggctctaagagcggcacaagcgccagcctggctattactggactccaggccgaggacgaggccgactactactgtcagagctacgacagcagcctgagcggcagctatgtgtttggcaccggcaccaagctgacagtgcttggaggcggaggcggaagtggaggcggaggatctggcggcggaggctctgaagttcaactggtggaaaccggcggcaacctggttcaacctggcgcttctctgagactgagctgtgccgccagcggctttagctttagcggaacagccatgcactgggtccgacaggcacctggcaaaggactggaatgggtgtccaccatcagcagcacaggcagaagcacctactaccgggacagcgtgaagggcagattcaccatctccagagacaacagcaagaacaccctgtacctccagatgaacagcctgagaggcgaggacaccgccgtgtactattgtgccagagtgtccttcgactactggggccagggaaccctggtcacagtctcttct

SEQ ID NO: 698 - DNA, 732 bp, Artificial Sequence
  Synthetic Polynucleotides
cagtctgtggttacacagcctgcctccgtgtctggctctcctggccagagcatcaccatcagctgtaccggcaccagctctgatgtcggcggctacaattacgtgtcctggtatcagcagcaccccggcaaggcccctaagctgatgatctacgacgtgtccaagaggcccagcggcgtgtccaatagattcagcggcagcaagagcggcaacaccgccagcctgacaatttctggactgcaagccgaggacgaggccgactactactgtagcagctacaccagcagcagcacactggtgtttggcggaggcaccaagctgacagttcttggaggcggaggcggaagtggaggcggaggatctggcggcggaggctctgaagttcagctggttgaaagcggcggagcctttgttcagcctggcggatctctgagactgagctgtgccgccagcggcttcacattttccagctacgccatgacctgggtccgacaggctcctggcaaaggactggaatgggtgtccaccatctccggcagaggcagaagcaccttctacgccgatagcgtgaagggcagattcacaatcagccgggacaacagcaagaacaccctgtacctccagatgaacagcctgagagccgaggataccgccgtgtactactgtgcccggtactatcacgctggcgcctttgatctttggggccagggaacactggtcaccgtgtcatct

SEQ ID NO: 699 - DNA, 726 bp, Artificial Sequence
  Synthetic Polynucleotides
gacaacatcgagctgacccagagccccgccatcatgagtgcctctccaggcgagcgcgtgaccatgacatgtagcgccagcagcagcatccggtacatctactggtatcagcagaagcccggcagcagccccagactgctgatctacgacaccagcaacgtggcccctggcgtgccctttagattttccggcagcggctccggcaccagctacagcctgaccatcaaccggatggaagccgaggacgccgccacctactattgtcaggaatggagcggctacccctacaccttcggcggaggcaccaagctggacatcaagagaggcggaggcggaagtggaggcggaggatctggcggcggaggctctcaagtgaagctccaggaatctggcggcggactcgtgaagcctggcggctctctgaagctgagctgtgccgccagcggcttcaccttcagcagctacggcatgagctgggtgcgccagacccccgacaagagactggaatgggtggcaaccatcagcagcggcggcagctacacctactaccccgatagcgtgaagggccggttcaccatctccagagacaacgccaagaacaccctgtacctccagatgagcagcctgaagtccgaggataccgccatgtactactgcgccagaggcaactgggagggctggtacttcgatgtgtggggccagggcaccaccgtgaccgtgtcatct

SEQ ID NO: 700 - DNA, 756 bp, Artificial Sequence
  Synthetic Polynucleotides
gacaacttcatgctgacccagccccacagcgtgtccgagagccctggcaagaccgtgaccatctcctgtaccggcagcggcggcagcatcgacaacaactacgtgcactggtatcagcagaggcccggcagcgcccctaccaccgtgatgttcgaggacaaccagaggcccagcggcgtgcccgatagattcagcggctctatcgacagcagcagcaacagcgccagcctcgtgatctccggcctgaaaaccgaggacgagggcgactactactgccagagcagcgacggctccaaggtggtgtttggcggaggcaccaagctgaccgtgctgggacagggcggaggcggaagtggaggcggaggatctggcggcggaggctctgaagtgcaactggtgcagagcggcggaggctctctgacactgtcttgtgctgcctccggcgtggtgcagcctggcagattcaccttcagcagctacggaatgcactgggtgcgccaggcccctggaaagggactggaatgggtgtccgtgatctcttacgacggcagcaacaagtattacgccgacagcgtgaagggccggttcaccatctccagagacaacagcaagaacaccctgtacctccagatgaacagcctgcggaccgaggacaccgccgtgtactactgtgccaagaccctgtccgctggcgagtggattggaggcggagccttcgatatctggggccacggcacaatggtcaccgtgtcctct

SEQ ID NO: 701 - DNA, 726 bp, Artificial Sequence
  Synthetic Polynucleotides
gacgtcgtgatgacccagacccctctgagcctgcctgtgtccctgggcgatcaggccagcatcagctgtagaagcagccagagcctggtgcacagcaacggcaacacctacctgcactggtatctccagaagcccggccagagccccaagctgctgatctacaaggtgtccaacagattcagcggcgtgcccgacagattctccggcagcggctctggcaccgacttcaccctgaagatcagccgggtggaagccgaggacctgggcgtgtacttctgtagccagaacacccccgtgccccccaagtttggcagcggcaccaagctggaaatcaagggcggaggcggaagtggaggcggaggatctggcggcggaggctctcaggtgcagctccagcagtctggcgctgaactcgtgcggcctggcgcttctgtgaagctgtcttgcaaggccagcggctacaccttcaacgactacgagatgcactgggtcaagcagacccctgtgcacggcctgaagtggatcggagccctggaacccaagaccggcgataccgcctacagccagaagttcaagggcaaggccaccctgaccgccgacaagagcagcagcacagcctacatggaactgcggagcctgaccagcgaggacagcgccgtgtactactgcaccagctgctactactacacctacagcggccagggcaccctcgtgacagtgtctgct

SEQ ID NO: 702 - DNA, 723 bp, Artificial Sequence
  Synthetic Polynucleotides
gacatccaactgacccagagccccagcagcctgtctgcctctgtgggcgacagagtgaccatcacctgtagagccagccagggcatcagaaacgacctgggctggtatcagcagaagcccggcaaggcccccaagcggctgatctatgctgccagctccctccagaatggcgtgcccagcagattttccggcagcggctctggcaccgagttcaccctgaccatcagctccctccagcccgaggacttcgccacctactactgcctccagcacaacacctaccccgccttcggccagggcaccaaggtggaaatcaagagaggcggaggcggaagtggaggcggaggatctggcggcggaggctctcaggtgcaactccaggaatctggccctggcctcgtgaagcctagccagaccctgagcctgacctgtaccgtgtctggcggcagcatcagcagcttcaactactactggtcctggatcagacaccaccctggcaagggcctggaatggatcggctacatctactacagcggcagcacctacagcaaccccagcctgaagtcccgcgtgaccatctccgtggacaccagcaagaaccagtttagcctgaccctgtccagcgtgacagccgccgataccgccgtgtactactgcgccagaggctacaactggaactacttcgactactggggccagggaaccctcgtgaccgtgtctagt

SEQ ID NO: 703 - DNA, 726 bp, Artificial Sequence
  Synthetic Polynucleotides
gacatcgtgctgacccagagccccgccagcctggccgtgagcctgggccagagcgtgaccatcagctgcagagccagcgagagcgtggagtactacggcaccagcctgatgcagtggtaccagcagaagcccggccagccccccaagctgctgatctacgccaccagcaacgtggagagcggcgtgcccgccagattcagcggcagcggcagcggcaccgacttcagcctgaacatccaccccgtggaggaggacgacatcgccatgtacttctgccagcagagcagaaagctgcccagcaccttcggcggcggcaccaagctggagatcaagggcggaggcggaagtggaggcggaggatctggcggcggaggctctgacgtgagactgcaggagagcggccccggccaggtgaagcccagccagaccgtgagcctgacctgcagcgtgaccggctacagcatcaccaacggcaaccactggtggaactggatcagacaggtgagcggcagcaagctggagtggatcggctacatcagcagcagcggcagcaccgacagcaaccccagcctgaagagcagaatcagcatcaccagagacaccagcaagaaccagctgttcctgcagctgaacagcgtgaccaccgaggacatcgccacctactactgcgccagaggctactacttcgactactggggccagggcaccaccctgaccgtgagcagc

SEQ ID NO: 704 - DNA, 723 bp, Artificial Sequence
  Synthetic Polynucleotides
gaccagagcgtgctgacacagcctcctagcgtgtcagtggcccctggcaagaccgccagaatcccctgcgagggcaactacatcggcagcagcaacgtgcactggtatcagcagaagcccggccaggctcccgtgctcgtgatccacttcgacagcgacagacccagcggcatccccgacagattcagcggcagcaacagcggcaacatggctaccctgaccatcagcagagtggaagccggggacgaggccgactactactgtcaagtgtgggagaaccacggctgggtgttcggcggaggcaccaagctgacagtgctgtctggcggaggcggaagtggaggcggaggatctggcggcggaggctctgaggtgcaactggtggaaacaggcggcggactggtgcagcctggcgagtctctgagactgagctgtgccgccagcggcttcaccttcagcgactacgagatgaactgggtgcgccaggcccctggaaagggcctggaatgggtgtcctacatcagcagctccggcagcaccatctactacgccgacagcgtgaagggccggtttaccatctaccgggacaacgccaagaacagcctgtacctccagatgaactccctgcgggccgaggacaccgccctgtactattgtgccagagcctggggcgtgggaccccctgattattggggacagggcaccctcgtgaccgtgtcctct

SEQ ID NO: 705 - DNA, 747 bp, Artificial Sequence
  Synthetic Polynucleotides
gacatccagatgacccagagccccagcagcctgtctgccagcgtgggcgataccgtgaccatcacctgtcaggccaacggctacctgaactggtatcagcagcggagaggcaaggcccccaagctgctgatctacgacggcagcaagctggaaagaggcgtgcccagcagattcagcggcagaagatggggccaggagtacaacctgaccatcaacaacctccagcccgaggatattgccacatacttttgccaggtgtacgagttcgtggtgcccggcacacggctggacctgaagagaacagtggctgctcctggcggaggcggaagtggaggcggaggatctggcggcggaggctctcaggtgcagctgctccagtctggcgctgccgtgacaaagcctggcgcttctgtgcgggtgtcctgtgaagccagcggctacaacatccgggactacttcatccactggtggcggcaggctccaggccagggactccagtgggtgggatggatcaaccccaagaccggccagcccaacaaccccagacagttccagggcagagtgtccctgaccagacacgccagctgggacttcgacaccttcagcttctacatggatctgaaggccctgcggagcgacgataccgccgtgtacttctgcgccagacagagaagcgactactgggatttcgacgtgtggggcagcggcacccaagtgacagtgtctagcgccagcaccaagggaccc

SEQ ID NO: 706 - DNA, 765 bp, Artificial Sequence
  Synthetic Polynucleotides
cagtctgccctgacacagcctcctagcgcctctggctctcccggccagagcatcaccatcagctgtaccggcaccagcaacaacttcgtgtcctggtatcagcagcacgccggcaaggcccccaagctcgtgatctacgacgtgaacaagcggcccagcggcgtgcccgatagattcagcggcagcaagagcggcaacaccgccagcctgacagtgtctggcctccagaccgatgacgaggccgtgtactactgcggcagcctcgtgggcaactgggacgtgatctttggcggaggcaccaagctgaccgtgctgggcggaggcggaagtggaggcggaggatctggcggcggaggctctcagccccagctccaggaatctggccccacactggtggaagccagcgagacactgagcctgacctgtgccgtgtccggcgattctaccgccgcctgcaatagcttctggggctgggtgcgccagcctcctggaaagggactggaatgggtgggaagcctgagccactgcgccagctattggaaccggggctggacctaccacaaccccagcctgaagtccagactgaccctggccctggacacccccaagaacctggtgttcctgaagctgaacagcgtgacagccgccgacaccgccacctactactgtgccagatttggcggcgaggtgctgcggtacaccgactggcctaaacctgcctgggtggacctgtggggcagaggaacactcgtgaccgtgtccagc

SEQ ID NO: 707 - DNA, 720 bp, Artificial Sequence
  Synthetic Polynucleotides
gagatcgtgctgacacagagccctggcaccctgagcctgtctccaggcgagacagccatcatcagctgccggacaagccagtacggcagcctggcctggtatcagcagaggccaggacaggcccccagactcgtgatctacagcggcagcacaagagccgccggaatccccgatagattcagcggctccagatggggacccgactacaacctgaccatcagcaacctggaaagcggcgacttcggcgtgtactactgccagcagtacgagttcttcggccagggcaccaaggtgcaggtggacatcaaaagaggcggaggcggaagtggaggcggaggatctggcggcggaggctctcaggtgcagctggtgcagtctggcggccagatgaagaaacccggcgagagcatgagaatcagctgtcgggcctccggctacgagttcatcgactgcaccctgaactggatcagactggcccctggcaagcggcctgagtggatgggatggctgaagcctagaggcggagccgtgaactacgccagacctctccagggcagagtgaccatgaccagggacgtgtacagcgataccgccttcctggaactgcggagcctgaccgtggatgataccgccgtgtacttctgcaccagaggcaagaactgcgattacaactgggacttcgagcactggggcagaggcacccctgtgatcgtgtctagc

SEQ ID NO: 708 - DNA, 750 bp, Artificial Sequence
  Synthetic Polynucleotides
gagctggtgctgacacagagccctggcaccctgtctctgtctgccggcgaaagagccaccctgagctgtagagccagccagagcgtgtcctctggcagcctggcttggtatcagcagaagccaggccaggcccccagactgctgatctacggcgcttctaccagagccaccggcatccccgatagattcagcggctctggctccggcaccgacttcaccctgacaatcggcagactggaacccgaggacctggccgtgtactactgccagcagtacggcaccagcccctacacattcggccagggcaccaagctggaaatcggcggaggcggaagtggaggcggaggatctggcggcggaggctctctggaacagagcggagccgaagtgaagaaacccggcagcagcgtgcaggtgtcctgcaaagcaagcggcggcaccttctctatgtacggcttcaactgggtgcgccaggctcctggacacggcctggaatggatgggcggcatcatccccatcttcggcacctccaactacgcccagaaattccggggcagagtgaccttcaccgccgaccaggccacaagcaccgcctacatggaactgaccaacctgcggagcgacgacaccgccgtgtattattgcgccagagacttcggccccgactgggaggatggcgacagctacgatggcagcggcagaggcttcttcgacttctggggccagggaacccttgtgaccgtgtcctca

SEQ ID NO: 709 - DNA, 738 bp, Artificial Sequence
  Synthetic Polynucleotides
gacgtggtcatgacacagagcccttctagcctgtctgccagcgtgggcgacagagtgacaatcacctgtcagagcagcctggacatcagccactacctgaactggtatcagcagaagcccggcaaggcccctaagctgctgatctacgacgccagcaatctggaaaccggcgtgcccagcagattttctggcagcggaagcggcacccacttcaccttcacaatatccagcctccagcctgaggacttcgccacctactactgccagcagtacgacaacctgcctctgacctttggcggaggcaccaagctggaaatcaagagaggcggaggcggaagtggaggcggaggatctggcggcggaggctctcaagttcaactggttcaatcaggcggaggcgtggtgcaacctggtggctctctgagagtgtcttgtgctgcctctggcgtgaccctgagcgactatggaatgcactgggtccgacaggcccctggcaaaggacttgagtgggtcgccttcatcagaaacgacggcagcgacaagtattacgccgacagcgtgaagggcagattcaccatcagccgggacaacagcgagaaaaccgtgtctctccagatgtctagcctgagagccgaggacaccgccgtgtactactgtgccaagaatggcgagagcggccctctggactactggtatctggatctgtggggcagaggcaccctggtcacagtctcttct

SEQ ID NO: 710 - DNA, 735 bp, Artificial Sequence
  Synthetic Polynucleotides
gacatcgtgatgacccagagccaggacagcatggctaccagcgtgggcgagcgcgtgaccgtgaattgcaaggccagccagaacgtggacaccaacgtggcctggtatcagcagaagcccggccagtctcctgagcccctgctgttcagcgccagctacagatacaccggcgtgcccgacagattcagcggcagcggctctggcaccgacttcaccctgacaatcagcagcgtgcaggccgaggacgtggccgagtatttctgccagcagtacaacagctaccccctgaccttcggccagggcaccaagctggaaatcaagagaggcggaggcggaagtggaggcggaggatctggcggcggaggctctgaagtgcaggtggaagtgtctggcggcggactggtgcagcctggcggatctatgagactgagctgtgccgtgtccggcttcaccttcagcaactactggatgaactgggtgcgccagtcccccgagaagggcctggaatggatcgccgagatccggctgaagtccaacaacttcgcccggtactacgccgagagcgtgaagggcagattcaccatcagccgggacaacagcaagaacagcctgtacctccagatgatctccctgagagccgaggacaccgccatctactactgcaccagctacggcaactacgtgggccactacttcgaccactggggccagggaacactgctgaccgtgtctagc

SEQ ID NO: 711 - DNA, 750 bp, Artificial Sequence
  Synthetic Polynucleotides
agctacgagctgacacagcctccatccgtgtctggcacacctggacagagagtggctatctcctgtagcggcagcagcagcaacatcggcaccagaatggtcacctggtatcagcacgtgccaggcacagcccctaagctgctgatcttcaacaacaaccagcggcctagcggcgtgcccgatagattttctgccagcaagagcggcacaagcgccagcctggctatcatcggactccagtctgacgacgaggccgactactactgtgccacctgggacgacaacgtgaagtcctacgtgttcggcaccggcaccaaagtgacagtgcttggaagtagaggcggaggcggaagtggaggcggaggatctggcggcggaggctctcttgaaatggcccaggttcagctccagcagtggggagctggactgctgaagcctagcgagacactgagcctgacctgtgctgtgtacggcggcagcttcagcggctactactggtcctggatcagacagcctcctggcaaaggactggaatggatcggcgagatcaaccacagcggctccaccaactacaaccccagcctgaagtccagagtgaccatcagcgtggacaccagcaagaaccagttctccctgaagctgagcagcgtgacagccgctgataccgccgtgtactattgcgctagagcccctcagtcttggtacgtgggagatgtgtggggccagggcacactggttacagtgtcatct

SEQ ID NO: 712 - DNA, 741 bp, Artificial Sequence
  Synthetic Polynucleotides
cagtctgtgctgacacagcctcctagcctgtctgtggcccctggaaagacagccagcatcacatgcggcggcaacaacatcggcatgaagtccgtgcactggtatcagcagaggccaggacaggctcctgtgctggtcatctactacgacagcgacagaccctctggcatccccggcagattttccggcagcaactctggcaataccgccacactgaccatctccagagtggaagctggcgacgaggccgactactactgccaagtgtgggataccaccggcgatcaccctggctatgtgtttggcaccggcaccaaagtgacagtgcttggcggaggcggaagtggaggcggaggatctggcggcggaggctctcaagttcaactggttcagagcggagccgaagtgaagaaacctggcagcagcgtgaaggtgtcctgcaaagcaagcggcggcacctttagcagctacgccatctcttgggtccgacaggcacctggacaaggactggaatggatgggcggcatcatccccatcttcggcacagccaattacgcccagaaattccagggcagagtgaccatcaccgccgacgagtctacaagcaccgcctacatggaactgagcagcctgagaagcgaggacaccgccgtgtactattgtgccagaggcgtgtacggctacagcggctctgccccttatgatgagtggggccagggaaccctggtcaccgtttcttct

SEQ ID NO: 713 - DNA, 756 bp, Artificial Sequence
  Synthetic Polynucleotides
gagatcgtgctgacccagagccctctgagcctgcctgtgacacctggcgagcctgccagcatctcctgtagaagcagccagagcctgctgcacagcaacggctacaactacctggactggtatctccagaagcccggccagagcccccaactgctgatctacctgggcagcaacagagccagcggcgtgcccgatagattttccggcagcggctccggcaccgacttcaccctgaagatcagccgggtggaagccgaggacgtgggcgtgtactactgtatgcaggccctccagaccccccggacctttggacagggcaccaaggtggaaatcaagcggggcggaggcggaagtggaggcggaggatctggcggcggaggctctcaggtgcaactggtgcagtctggcggcggagtggtgcagcctggaagaagcctgagactgagctgtgccgccagcggcttcaccttcagcagctacggaatgcactgggtgcgccaggcccctggcaaaggactggaatgggtggccgtgatctcctacgacggctccaacaagtattacgccgacagcgtgaagggccggttcaccatctccagagacaacagcaagaacaccctgtacctccagatgaacagcctgcgggccgaggacaccgccgtgtactattgcgccagagacttcgactacggcgacagctactactactatggcatggacgtgtggggccagggcacaaccgtgaccgtgtcatct

SEQ ID NO: 714 - DNA, 738 bp, Artificial Sequence
  Synthetic Polynucleotides
gagatcgtgctgacacagagccctgccaccctgtctctgagccctggcgaaagagccaccctgagctgtagagccagccagagcgtgggcagctacctggcctggtatcagcagaagcctggcgctccccggctgctgatctacgatgcctctcacagagccaccggcatccccgccagattttctggcagcggctccggcaccgacttcaccctgacaatcagctccctggaacccgaggacttcgccgtgtactactgccagcagcggagcaactggccccccatgtataccttcggccagggcaccaagctggaaatcaagagaggcggaggcggaagtggaggcggaggatctggcggcggaggctctgaagtgcagctggtgcagtctggcgctgaggtgtccgtgaaggtgtcctgcaaagccagcggcggcaagaagcccggcagcacctttagcagctacaccatcagctgggtgcgccaggcacctggacagggcctggaatggatgggcggcatcatccccatcttcggcaccgccaactacgcccagaaattccagggcagagtgaccatcaccgccgacaagagcaccagcaccgcctacatggaactgagcagcctgcggagcgaggacacagccgtgtattattgtgccggcgacaccgacagcagcggctactatggcgctgtggactattggggccagggaaccctcgtgaccgtgtcctct

SEQ ID NO: 715 - DNA, 690 bp, Artificial Sequence
  Synthetic Polynucleotides
gacatccagatgacccagagccccagcagcctgtctgccagcgtgggcgacagagtgaccatcacctgtcaggccagccaggacatcaacaactacctgaactggtatcagcagaagcccggcaaggcccccaagctgctgatctacgacgccagcaatctgcagaccggcgtgcccagcagattttccggctctggcagcggcaccgacttcaccttcaccatcgaggacattgccacctactactgccagcagtacaccttcggccctggcaccaaggtggacatcaaaggcggaggcggaagtggaggcggaggatctggcggcggaggctctgaagtgcaactgctggaatctggcggcggactggtgcagcctggcggatctctgagactgagctgtgccgccagcggcttcacctttagctggtacagcatgacctgggtgcgccaggcccctggcaaaggactggaatgggtgtccagcatcgtgccctggggcgatttcacccagtacgccgatagcgtgaagggccggttcaccatcagccgggacaacagcaagaacaccctgtacctgcagatgaacagcctgcgggccgaggacaccgccgtgtactattgtgccaagggacctggctggggcagcttcgatctgtggggcagaggaacccttgtgaccgtgtccagc

SEQ ID NO: 716 - DNA, 720 bp, Artificial Sequence
  Synthetic Polynucleotides
gacatccagatgacccagagccccagcagcctgtctgccagcgtgggcgacagagtgaccatcacctgtaccgccagcctgagcgtgtccagcacctacctgcactggtatcagcagaagcccggcagcagccccaagctgtggatctacagcaccagcaacctggcctccggcgtgcccagcagattttctggcagcggctctggcaccagctacaccctgaccatcagctccctccagcccgaggacttcgccacctactactgccaccagtaccacagaagccccctgacctttggcggaggcaccaaggtggaaatcaagagaggcggaggcggaagtggaggcggaggatctggcggcggaggctctgaagtgcaactggtggaatctggcggcggactggtgcagcctggcggatctctgagactgagctgtgccgccagcggcttcagcctgaccaaatacggcgtgcactgggtgcgccaggcccctggaaaaggactggaatgggtgggagtgaagtgggctggcggctccaccgactacaacagcgccctgatgagccggttcaccatcagcaaggacaacgccaagaacagcctgtacctccagatgaactccctgcgggccgaggacaccgccgtgtactactgtgccagagatcaccgggacgctatggactactggggccagggaacactcgtgaccgtgtcctct

SEQ ID NO: 717 - DNA, 732 bp, Artificial Sequence
  Synthetic Polynucleotides
gacatccagatgacccagagccccagcagcctgtctgccagcgtgggcgacagagtgaccatcacatgcaaggccagccaggacgtgggaacagccgtggcctggtatcagcagaagcctggcaaggcccccaagctgctgatctacagcgccagctacagatccaccggcgtgcccagcagattttccggctctggcagcggcaccgacttcaccctgaccatctctagcctccagcccgaggacttcgccacctactactgccagcaccactactccgccccctggacatttggcggaggcaccaaggtggaaatcaagggcggaggcggaagtggaggcggaggatctggcggcggaggctctgaagtgcaactggtggaatcaggcggcggactggtgcagcctggcggatctctgagactgagctgtgccgccagcggcttcaccttcagcagaaacggcatgagctgggtgcgccaggcccctggaaaaggactggaatgggtggcaaccgtgtccagcggcggcagctacatctactacgccgacagcgtgaagggccggttcaccatctccagagacaacgccaagaacagcctgtacctccagatgaactccctgcgggccgaggacaccgccgtgtactattgtgccagacagggcaccaccgccctggctaccagattcttcgatgtgtggggccagggcaccctcgtgaccgtgtcatct

SEQ ID NO: 718 - DNA, 750 bp, Artificial Sequence
  Synthetic Polynucleotides
gacatcgtgatgacccagagccccagcagcctgaccatgagcgtgggccagaaagtgaccatgtcctgcaagagcagccacagcctgctgaacagccggaaccagaagaactacctggcctggttccagcagaagcccggccagtcccccaagctgctggtgtacttcgcaagcacccgcgagagcggcgtgcccgacagattcatcggcagcggctccggcaccgacttcaccctgaccatcagcaacgtgcaggccgaggacctggccgactacttctgccagcagcactacaccaccctgcccaccttcggcggaggcaccaagctggaaatcaagggcggaggcggaagtggaggcggaggatctggcggcggaggctctcagatccagctggtgcagagcggccctgacctgaagaaacccggcgagacagtgaagatcagttgcaaggcctccggctacaccttcaccaacacaggcatgaactgggtcaagcaggcccctggcaagggcctgaagtggatgggctggatcaacacctacaccggcgagcccacctacgccgacgacttcaagggccggttcaccttcagcctggaaaccagcgccagcaccgcctacctgcagatcaacaacctgaagaacgaggacaccgccacctatttctgcaccagatggggctacggcagcagcctgtactacgccatggactactggggccagggcaccagcgtgaccgtgtcctct

SEQ ID NO: 719 - DNA, 720 bp, Artificial Sequence
  Synthetic Polynucleotides
gacatccagatgacccagagcccccctagcctgtctgcctctgtgggcggcaaagtgaccatcacatgcaaggccagccaggacatcgaccgctacatggcctggtatcaggacaagcccggcaagggacccaagctgctgatccacgataccagcaccctccagcccggcatccccagcagattttctggcagcggctccggcagagactacagcttcagcatcagcaacctggaacccgaggacattgccacctactactgcctccagtacgacaacctgtggaccttcggcggaggcaccaagctggaaatcaagagaggcggaggcggaagtggaggcggaggatctggcggcggaggctctcaggtgcaactggtgcagagcggagccgagcttgtgaagcctggcgcttccgtgaagatgagctgcaaagccagcggctacatcttcaccaactacaacatccactgggtcaagaagtccccaggccagggcctggaatggatcggagccatctaccccggaaacggcgacgccccttacagccagaagttccaggacagagccaccctgaccgccgacaccagcagcagcaccacctacatggaactgagcagcctgaccagcgaggacagcgccgtgtactattgcgtgcgggccaactgggatgtggccttcgcctattggggccagggcacactggtgtccgtgtcctct

SEQ ID NO: 720 - DNA, 723 bp, Artificial Sequence
  Synthetic Polynucleotides
gacatccagatgacccagagccctgccagcctgtctgcctctgtgggcgagacagtgaccatcacctgtcgggtgtccggcaacatccacaactacctggcctggtatcagcagaagcagggcaagagcccccaactgctggtgtacaacgccaagaccctggccgatggcgtgcccagcagattttctggctctggcagcggcacccagtacagcctgaagatcaacagcctccagcccgaggacttcggcagctactactgccagcacttctggtccaacccctacaccttcggcggaggcaccaagctggaaatcaagggcggaggcggaagtggaggcggaggatctggcggcggaggctctcaggtgcaactccagcagtctggcgcttccgtgaaggtgtcctgcaaggccagcgaactcgtgcggcctggcacaggctacgccttcaccaattacctgatcgagtgggtcaagcagaggcccggacagggcctggaatggatcggagtgattaacccaggcagcggcggcaccaactacaacgagaagttcaagggcaaggccaccctgaccgccgacaagagcagcagcacagcctacatgcaactgagcagcctgaccagcgacgacagcgccgtgtacttctgcgcccggtacagaagctacgactggtacttcgacgtgtggggagccggcaccaccgtgacagtgtcatct

SEQ ID NO: 721 - DNA, 735 bp, Artificial Sequence
  Synthetic Polynucleotides
gacatccagatgacccagagccccagcagcctgtctgccagcgtgggcgacagagtgaccatcacctgtcggagcagccagcggatcgtgcacagcaacggcaacacctacctggaatggtatcagcagacccccggcaaggcccccaagctgctgatctacaaggtgtccaacagattcagcggcgtgcccagcaggtttagcggctctggcagcggcaccgactacacccctaccatctctagcctccagcccgaggacattgccacctactactgttttcaaggcagccacgtgccccccaccttcggccagggaacaaagctccagatcaccggcggaggcggaagtggaggcggaggatctggcggcggaggctctgaggtgcaactggtggaatctggcggcggagtggtgcagcctggcagaagcctgagactgagctgtagcagcagcggccctaccttcagcgactactacatgtactgggtgcgccaggcccctggcaagggactggaatgggtggcctacatgagcaacgtgggagccatcaccgattaccccgacaccgtgaagggcagacccaccatcagccgggacaacagcaagaataccctgttcctgatggacagcctgcggcccgaggataccggcgtgtacttttgcgccagaggcaccagggacggcagttggttcgcctattggggccagggcacacccgtgaccgtgtctagt

SEQ ID NO: 722 - DNA, 720 bp, Artificial Sequence
  Synthetic Polynucleotides
gacatccagatgacccagagcttcagcagcctgagcgccagcgtgggcgacagagtgaccatcacctgtagagccagccaggacatcagcaactacctgaactggtatcagcagaagcccggcaaggcccccaagctgctgatctactacaccagcagactgcacagcggcgtgcccagcagattttctggcagcggctccggcaccgactacaccctgacaatcagctccctgcagcccgaggacttcgctacctacttctgtcagcaaggcaacaccctgccctggacctttggcggaggcaccaagctggaaatcaagagaggcggaggcggaagtggaggcggaggatctggcggcggaggctctgaagtgcaactggtgcagtccggcggagggctggtgcagagcggaggatctctgagactgagctgcagagccagcggctacaccttcacccggtactggatgctgtgggtgcgccagaggccaggcaagggactggaatgggtggccgagatcaacccccggaacgaccggaccaactacaacgagaagttcaagacccggttcaccatcagcgtggacagaagcaagaacaccctgtacctgcagatggacagcctgcgggccgaggataccgccgtgtacttttgtgctctgggaggcggctacgctatggactactggggccagggaacccttgtgaccgtgtcctct

SEQ ID NO: 723 - DNA, 723 bp, Artificial Sequence
  Synthetic Polynucleotides
gacatccagatgacacagtctccggcgtcactgtccgcctccgtgggggagactgtgactattatttgtagggcatcagttaacatctactcttatttggcctggtaccagcagaagcaaggcaagagtcctcagctgctggtgtataatgcgaagatcctggcagagggcgtgccgagccggttctccggcagcggctcaggtacccaattttccctcaagatcaattcactgcagccagaggactttggcagttactattgtcaacaccactacggcacattcactttcgggtccggtacaaaattggagattaagcgaggcggaggcggaagtggaggcggaggatctggcggcggaggctctcaggtacagttgaaagaaagcgggcctggactggtagcgccttcccaatctctctccatcacgtgcaccatctctggcttctccctgacttcctatggagttcactgggtgaggcagccccccggcaagggactggaatggctggtcgtcatctggtccgacgggtccacaacctacaactccgctctgaaaagtcggctctctatttctaaagataatagcaagagccaggtgtttctgaaaatgaactctctgcagaccgatgatacggccatttactactgcgcttcacactatggctcaaccttggcattcgcttcctggggccacggaacactggtgaccgtttccgcagcc

SEQ ID NO: 724 - DNA, 747 bp, Artificial Sequence
  Synthetic Polynucleotides
gacattgtgatgacccagtctcacaaattcatgtccacatcagtaggagacagggtcagcgtcacctgcaaggccagtcagaatgtgggtaataatgtagcctggtatcaacagaaaccagggcaatctcctaaagtactgatttactcggcatcctaccggtacagtggagtccctgatcgcttcacaggcagtggatctgggacagatttcactctcaccatcagtaatgtgcagtctgaagacttggcagagtatttctgtcagcaatataacacctatccattcacgttcggctcggggacaaagttggaaataaaaggcggaggcggaagtggaggcggaggatctggcggcggaggctctgaggtacagctggaggaaagcggtggaggactggtgcaacctggagggtctatgaagctctcttgcgtagcttctgggttcacgttctccaattactggatgaactgggtgcggcagtcccccgagaaaggcctggaatgggtagcagaaattcggttcaagtcccataactatgctacacactttgccgagtctgtcaaaggccggttcactattagtcgagacgacagcaagtcttcagtctacctgcagatgaataacttgcgggcagaggacacaggtatctactactgcaccaggagaatcggcaactccgactatgactggtggtactttgacgtctggggagcaggcaccagcgtgacggtgagttcagcctca

SEQ ID NO: 725 - DNA, 732 bp, Artificial Sequence
  Synthetic Polynucleotides
gacatccagttgacccagtcccccagctcactcagcgccagtgtgggggaccgggtgaccattacctgtaaagccagtcagagtgtggactatgagggggatagcttcctgaattggtatcagcagaagcctggcaaagccccaaagctgctgatctacgctgcatctaatctggagtcaggcgtgccttctaggttctccggtagtgggtctgggaccgatttcacattgaccatttcatccctccaacccgaggatttcgctacatattactgtcagcagtccaatgaggaccctctcacctttggccagggcaccaaagttgaaattaagagaggcggaggcggaagtggaggcggaggatctggcggcggaggctctgaagtccaacttgtggagtctggagggggcctggtgcagcccggcggctctctcagactgtcttgtgcggcaagcggctacaccttcagctcttactggatagaatgggtgaggcaggcacctggaaagggactggagtggattggagagattctgccaggagggggagatacaaattacaatgaaatcttcaaggggcgggccaccttttcagcggataccagcaagaatacagcttacctgcagatgaatagcctccgggcagaagataccgctgtttattattgcacgagacgggtgccaataagactggactattgggggcaagggactcttgtcaccgtcagttca

SEQ ID NO: 726 - DNA, 753 bp, Artificial Sequence
  Synthetic Polynucleotides
gaccagagcgtgctgacacagcctccatccgtgtctggcgctccaggccagagagtgaccatctcctgtaccggcagcagcagcaacatcggagccggctatgacgtgcactggtatcagcaactgcccggcaccgcccccaagctgctgatctacggcaacagcaacagacccagcggcgtgcccgatagattcagcggcagcaagagcggcacaagcgccagcctggctatcactggactccaggccgaggacgaggccgactactactgccagagctacgacaacagcctgtcctcctgggtgttcggcggaggcaccaagctgacagtgctgggccagcctaagggcggaggcggaagtggaggcggaggatctggcggcggaggctctgaagtgcaactccagcagagcggagccgaagtgaagaaacccggcagctccgtgaaggtgtcctgcaaggcttccggcggcaccttcagcagctacgccatttcttgggtgcgccaggcccctggacagggcctggaatggatgggcagaatcatccccatcctgggaatcgccaactacgcccagaaattccagggccgcgtgaccatcaccgccgacaagagcacaagcaccgcctacatggaactgagcagcctgcggagcgaggacaccgccgtgtactactgcgccagagatgtgggcagcggctcctacagcctggactattggggccagggcaccctcgtgaccgtgtctagt

SEQ ID NO: 727 - DNA, 744 bp, Artificial Sequence
  Synthetic Polynucleotides
gaccagagcgtcgtgacacagcctccatctgtgtctgccgcccctggccggaaagtgaccatctcttgtagcggcagcagcagcaacatcggcagcaactacgtgtcctggtatcagcaggtgcccggcaccgcccctaagctgctgatctacgaggacgacaagcggcccagcggcatccccgatagattcagcggctctaagagcggcaccagcgccacactgggcatcaccggactccagacaggcgacgaggccgactacttctgcgccacctgggacagaaccgtgaacgtggtgcgctttggcggcggaaccagactgacagtgcacagccagcctaagggcggaggcggaagtggaggcggaggatctggcggcggaggctctcaactccaactccaggaaagcggccctggcctcgtgaagcctagcgagacactgagcctgacctgcaccgtgtctggcggcagcatctccagcagctcctactactggggctggatcagacagccccctggcaagggcctggaatggatcggctccatctactacagcggaagcacctactacaaccccagcctgaagtcccgcgtgaccatcagcgtggacaccagcaagaaccagttctccctgaagctgagcagcgtgacagccgccgataccgccgtgtactactgtgccagacatgtgggccacgagctggattactggggccagggcacactcgtgaccgtgtctagt

SEQ ID NO: 728 - DNA, 726 bp, Artificial Sequence
  Synthetic Polynucleotides
gacatccagatgacccagagccccagcagcctgtctgccagcgtgggcgacagagtgaccatcacctgtagagccagccagagcatcagcagctacctgaactggtatcagcagaagcccggcaaggcccccaaactgctgatctacgccgccagctctctgcagtctggcgtgccatctggctttagcggcagcggctctggcaccgacttcaccctgaccatcagctccctgcagcccgaggacttcgccacctactactgccagcagagctacagcacccccctgacctttggcggaggcaccaaggtggaaatcaagagaggcggcggaggctcaggcggaggcggatctggcgggggaggatctcaggtgcaactgcaggaatctggccctggcctcgtgaagcccagcgagacactgagcctgacctgtaccgtgtctggcggctctgtgtccagcggcagctactactggtcctggatcagacagccccctggcaagggcctggaatggatcggctacatctactacagcggctccaccaactacaaccccagcctgaagtcccgcgtgaccatctccgtggacaccagcaagaaccagttctccctgaagctgagcagcgtgacagccgccgataccgccgtgtactactgtgccagagagggcaagaacggggccttcgacatctggggccagggcacaatggtcaccgtgtcctct

SEQ ID NO: 729 - DNA, 726 bp, Artificial Sequence
  Synthetic Polynucleotides
gaccagatcgtgctgacccagtcccccgctattatgtccgcatcaccgggcgaaaaagtgacgatctcctgtagcgcttcatctagcgtctcctacatgtattggtatcaacagaaacctgggtctagcccaaagccgtggatctacagaaccagtaaccttgccagtggggtgccagcccgcttcagcggtagtggcagtggaacttcctatagcctcacaataagcaacatggaggctgaagatgccgctgcctattactgccagcagtaccacagttacccaaccacgttcggcgggggaactaagctcgaagtaaaaggcggaggcggaagtggaggcggaggatctggcggcggaggctctgaggtgcagctggtggaatctgggggcggcctggtccaacctaagggatcactcaagctctcttgtgcggccagcggattctctttcaatacctatgctatgaattgggtgagacaggcgcccggaaagggcctcgaatggatagcccatatccggtcaaaatcaaacaatttcgcaacctactatgcggactccgtgaaggaccgattttccatctcccgagatgcctccgagaatattctgttcctgcagatgaataacctcaagacagaggacaccgccatgtactactgtgtgcgccagggcggtgactttcccatggattactgggggcaggggaccagcgtgaccgtgagctct

SEQ ID NO: 730 - DNA, 720 bp, Artificial Sequence
  Synthetic Polynucleotides
gacatccagatgacccagagcagcagcagcttcagcgtgagcctgggcgacagagtgaccatcacctgcatggccagcgaggacatctacatcagactggcctggtaccagcagaagcccggcaacgcccccagactgctgatcagcgccgccaccagcctggagaccggcgtgcccagcagattcagcggcagcggcagcggcaaggactacaccctgagcatcaccagcctgcagaccgaggacgtgggcacctactactgccagcagtactggagcagcccctggaccttcggcggcggcaccaagctggagatcaacggcggaggcggaagtggaggcggaggatctggcggcggaggctctgacgtgcagctgcaggagagcggccccggcctggtgaagcccagccagagcctgagcctgacctgcaccgtgaccggctacagcatcaccagcgactacacctggaactggatcagacagttccccggcaacaagctggagtggatgggctacatcacctacagcggcagcaccagctacaaccccagcctgaagagcagaaacagcatcaccagagacaccagcaagaaccagttcttcctgcagctgaacagcgtgaccaccgaggacaccgccacctactactgcgccagactgggcagaagatacacaatggactactggggccagggcaccagcgtgaccgtgagcagc

SEQ ID NO: 731 - DNA, 720 bp, Artificial Sequence
  Synthetic Polynucleotides
gatgtgcagctccaggaaagcggccctggcctcgtgaagcctagccagagcctgagcctgacatgcaccgtgaccggctacagcatcaccagcgactacacctggaactggatcagacagttccccggcaacaagctggaatggatgggctacatcacctacagcggcagcaccagctacaaccccagcctgaagtcccggaactccatcaccagagacaccagcaagaaccagttcttcttgcagctgaacagcgtgaccaccgaggacaccgccacctactactgcgccagactgggcagacggtacaccatggactattggggccagggcacctccgtgaccgtgtctagcggaggcggaggaagtggcggcggaggatctgggggaggcggaagcgatatccagatgacccagtccagcagcagcttcagcgtgtccctgggcgacagagtgaccatcacctgtatggcctccgaggacatctacatccggctggcctggtatcagcagaagcccggcaacgcccccagactgctgattagcgccgccacctctctggaaaccggcgtgccaagcagattcagcggctctggcagcggcaaggactacaccctgagcatcacctccttgcagaccgaggacgtgggcacctactattgccagcagtattggagcagcccctggacctttggcggaggcacaaagctggaaatcaac

SEQ ID NO: 732 - DNA, 723 bp, Artificial Sequence
  Synthetic Polynucleotides
gacatccagatgacccagagcagcagcagcttcagcgtgtccctgggcgacagagtgaccatcacatgcaaggccagcgaggacatctacatccggctggcctggtatcagcagaagcccggcaacgcccccagactgctgattagcgccgccacctctctggaaaccggcatccccagcagattctccggctctggcagcggcgaggactacaccctgacaatcaccagcctccagaccgaggacgtggcaacctactactgccagcagtattggaccaccccctggacctttggcggaggcaccaagctggaaatcaagagaggcggaggcggaagtggaggcggaggatctggcggcggaggctctgatgtgcagctccaggaatctggccccggactcgtgaagcctagccagagcctgagcctgacatgcaccgtgaccggctacagcatcaccatcgactacacctggaactggatcagacagttccccggcaacaaactggaatggatgggctacatcacctacagcggcagcaccgactacaaccccagcctgaagtccagaagctccatcaccagagacacctctatgaaccagttcttcttgcagctgaacagcgtgaccaccgaggacaccgccacctactattgcgccagactgggcagaagatacgccctggactattggggccagggcaccagcgtgacagtgtcctct

SEQ ID NO: 733 - DNA, 726 bp, Artificial Sequence
  Synthetic Polynucleotides
gacatcgtaatgacccaggctgccccatccataccagtcactcccggtgaatccgtgtctatatcttgtaggtccgataagagtctgcttcacagcaacggcaatacttatcttttctggtttttgcagcgaccgggacaaagcccacaactgctgatctatagaatgtcaaatcttgcatcaggggtcccagatcgctttagtggatctgggtcaggcacagctttcaccctgagaatctccggagtggaagcagaagacgtaggcgtgtattactgtatgcagcaccttgagtatccttatacctttggaggcggaactaagctcgaaattaaaggcggaggcggaagtggaggcggaggatctggcggcggaggctctcaggttcaactgcagcagtctggacctgaactggtgaagcctggggcctcagtgaagatgtcctgcaaggcttctggctacgcattcagtagttcctggttgaactgggtgaggcagaggcctggaaagggtcttgagtggattggacggatttatcctggagatggagaaaatcactataatgggaaattcaagggcaaggccacactgactgcagacaaatcctccagcacaggctacatgcaactcagcagcctgacgtctgaggactctgcggtctacttctgtgcaagttattatgaagggggttattggggccaagggactctaatcactgtctctgca

SEQ ID NO: 734 - DNA, 723 bp, Artificial Sequence
  Synthetic Polynucleotides
gacatcgtactgacacagagccccgcttctctggcagtgtcactgggccagtccgttacaatatcctgtcgggcgagtgaatccgtggaatactatggaacaagtctcatgcagtggtatcagcagaaacctggacagccccccaagctgctcatctacggtgcgtcaaatgtcgagagtggggttccggcccgattcagtggttccgggagtggcacagactttagcctcaacatccatcctgttgaggaagacgatattgccatgtatttttgccaacagtcccgcaaagtcccctggacctttggtggaggaactaagctggagatcaagggcggaggcggaagtggaggcggaggatctggcggcggaggctctgaggtcaagctggtagagagtggaggtgggctggttaaaccaggggggagcagaaaactgagttgtgccgcaagtggcttcaccttttctagctataccatgagctgggtaagacaaactccagcaaagcgccttgagtgggtcgcaacaattagcagcggatcttctactatttattacgctgacactgttaagggccggtttaccatatcaagagacaacgccaagaatacccttttccttcaaatgacttcactgcggtccgaggatacggcaatgtactattgtgcacgacggtggtttctcgactgctggggccaggggactacccttaccgtgtctagt

SEQ ID NO: 735 - DNA, 732 bp, Artificial Sequence
  Synthetic Polynucleotides
gaccaggtgcagctgcagcagtcgggcccaggactggtgaagccttcggagaccctgtccctcacctgcactgtctctggtgactccatcagtagttactactggagctggatcaggcagcccccagggaagggactggagtggattgggtatatctattacagtgggagcaccaactacaacccctccctcaagagtcgagtcaccatatcagtagacacgtccaagagccagttctccctgaagctgagctctgtgaccgccgcagacacggccgtgtattactgtgcgcgcggcaggtacttcgatgtctggggacgaggcactatggtgactagcagcggcggaggcggaagtggaggcggaggatctggcggcggaggctcttcctcctacgtgctgactcagcctccctccgtgtctgggtctcctggacagtcgatcaccatctcctgcactggaaccagcagtgacgttggtggttataactatgtctcctggtaccaacaacacccaggcaaagcccccaaactcatgatttatgagggcagtaagcggccctcaggggtttctaatcgcttctctggctccaagtctggcaacacggcctccctgacaatctctgggctccaggctgaggacgaggctgattattactgcagctcatatacaaccaggagcacccgagttttcggcggagggaccaagctgaccgtcctaggtgccgccgca

SEQ ID NO: 736 - DNA, 735 bp, Artificial Sequence
  Synthetic Polynucleotides
gacatcgtaatgacacagtctcccctgtccctccctgtcacaccaggtgaacctgccagtatttcttgtagatccagtaagtcacttctgcactccaatgggaacacctacctgtattggttccagcaaaagcctggtcaggcacctcgcttgcttatttataggatgtccaatcttgcatccggcgtgccagaccgattctcaggctccggctctggtactgcatttaccctgaaaatctcccgcgtggaagcagaagatgtgggcgtgtactactgtatgcagcacatcgagtaccccttcacgtttggtcaaggcacaaagctggaaatcaaaggcggaggcggaagtggaggcggaggatctggcggcggaggctctcaggtccagctcgtccagtctggacccgaagtcaagaagccaggcgcctctgtgaaggtttcttgtaaggccagcggatatacattcactaattcatggatgaactgggtgaggcagcgccctggcaaggggcttgagtggatcgggcggatttacccaggggatggcgagacaatttacaacgggaaatttcgggtgagagtgacgatcaccgcagacgaatctacaagcacggcctacatggagttgtcctctctcaggagtgaggacaccgccgtctactattgtgctagaggttatgacgactattcattcgcatactggggccagggcaccaccgtcacagtatcatct

SEQ ID NO: 737 - DNA, 732 bp, Artificial Sequence
  Synthetic Polynucleotides
gagatcgtgatgacccagagccctgccaccctgtctctgagccctggcgaaagagccaccctgagctgtagagccagccagagcgtgtccagctacctggcctggtatcagcagaagcccggccaggctccccggctgctgatctacgatgccagcaatagagccaccggcatccccgccagattttccggctctggcagcggcaccgacttcaccctgaccatcagctccctggaacccgaggacttcgccgtgtactactgccaccagtacggcagcagcccccagacctttggacagggcaccaaggtggaaatcaagcggggcggaggcggaagtggaggcggaggatctggcggcggaggctctgaagtgcagctggtgcagtctggggccgaagtgaagaaacccggcagctccgtgaaggtgtcctgcaaggcttccggcggcaccttcagcagctacgccatttcttgggtgcgccaggcccctggacagggactggaatggatgggcggcatcatccccatcttcggcaccgccaactacgcccagaaattccagggcagagtgaccatcaccgccgacgagagcaccagcaccgcctacatggaactgagcagcctgcggagcgaggacacagccgtgtattattgcgccgtgcactacggcgactacgtgttcagcagcatggacgtgtggggccagggcacaaccgtgaccgtgtcatct

SEQ ID NO: 738 - DNA, 741 bp, Artificial Sequence
  Synthetic Polynucleotides
gagacaaccctgacacagagccctggcaccctgagcctgtctccaggcgaaagagccacactgagctgtcgggccagccagagcgtgtccagctcttacctggcctggtatcagcagaagcccggccaggctccccggctgctgatctatggcgcttctagcagagccaccggcatccccgatagattcagcggctctggcagcggcaccgacttcaccctgaccatcagcagactggaacccgaggacttcgccgtgtactactgccagcagtacggcagcagccccagaacattcggccagggcaccaaggtggaaatcaagagaggcggaggcggaagtggaggcggaggatctggcggcggaggctctgaagtgcaactggtgcagagcggagccgaagtgaagaaacccggcagctccgtgaaggtgtcctgcaaggcttccggcggcaccttcagcagctacgccatttcttgggtgcgccaggcccctggacagggcctggaatggatgggcggcatcatccccatcttcggcaccgccaactacgcccagaaattccagggcagagtgaccatcaccgccgacgagagcaccagcaccgcctacatggaactgagcagcctgcggagcgaggacacagccgtgtattattgcgccagaggccccgagtattgcatcaacggcgtgtgcagcctggacgtgtggggccagggaacaaccgtgaccgtgtctagc

SEQ ID NO: 739 - DNA, 750 bp, Artificial Sequence
  Synthetic Polynucleotides
gacatcgagctgacccagagccctagcagcctggctgtgtctgccggcgagaaagtgaccatgagctgcaagagcagccagagcctgctgaacagccggacccggaagaatcaactggcctggtatcagcagaagcccggccagtctcccgagctgctgatctactgggccagcaccagacagagcggcgtgcccgatagattcacaggcagcggctccggcaccgacttcaccctgacaatcagcagcgtgcaggccgaggacctggccgtgtactactgccagcagagctacaacctgctgaccttcggccctggcaccaagctggaagtgaagagaggcggaggcggaagtggaggcggaggatctggcggcggaggctctgtgaagctgcaggaatctggcggcggattcgtgaagcctggcggctctctgaaggtgtcctgtgccgccagcggcttcaccttcagcagctacgccatgtcctgggtgcgcctgagccccgagatgagactggaatgggtggcaaccatcagctccgcaggcggctacatcttctacagcgactccgtgcagggccggttcaccatctccagagacaacgccaagaacaccctgcatctgcagatgggcagcctgagaagcggcgacaccgccatgtactattgcgccagacagggcttcggcaactacggcgactactacgctatggactactggggccagggaaccaccgtgaccgtgtctagt

SEQ ID NO: 740 - DNA, 747 bp, Artificial Sequence
  Synthetic Polynucleotides
gacatccagatgacccagagccccagcagcctgtctgccagcgtgggcgacagagtgaccatcacctgtcggagcagccagaacatcgtgcacagcaacggcaacacctacctggactggtatcagcagacccccggcaaggcccccaagctgctgatctacaaggtgtccaacagattcagcggcgtgcccagcaggtttagcggctctggcagcggcaccgacttcaccttcaccatcagctccctccagcccgaggacattgccacctactactgcttccagtacagccacgtgccctggaccttcggccagggcacaaagctccagatcggcggaggcggaagtggaggcggaggatctggcggcggaggctctcaggtgcagctccagcagtctggggccgaagtgaagaaacccggcagcagcgtgaaggtgtcctgcaaggccagcggctacacctttaccaactactacatctactgggtgcgccaggccccaggccagggactggaatggatcggcggcatcaatcctaccagcggcggcagcaacttcaacgagaagttcaagacccgcgtgacaatcaccgccgacgagagcagcaccaccgcctacatggaactgagcagcctgcggagcgaggataccgccttctacttctgcacccggcagggcctgtggttcgactctgatggcagaggcttcgacttctggggccagggaaccaccgtgaccgtgtctagt

SEQ ID NO: 741 - DNA, 717 bp, Artificial Sequence
  Synthetic Polynucleotides
gagatcgtgctgacacagagccctggcaccctgagcctgtctccaggcgaaagagccacactgagctgtcgggccagccagagcgtgtccagctcttacctggcctggtatcagcagaagcccggccaggctccccggctgctgatctatggcgcttctagcagagccaccggcatccccgatagattcagcggctctggcagcggcaccgacttcaccctgaccatcagcagactggaacccgaggacttcgccgtgtactactgccagcagtacggcagcagcccctggacctttggacagggcaccaaggtggaaatcaagagaggcggaggcggaagtggaggcggaggatctggcggcggaggctctcaagtgcatctccaggaaagcggacccggcctcgtgaagcctagcgagacactgagcctgacctgcaccgtgtccgacgacagcatcagcagctactactggtcctggatcagacagccccctggcaagggcctggaatggatcggccacatcagctacagcggcagcgccaactacaaccccagcctgaagtccagagtgaccatctccgtggacaccagcaagaaccagttctccctgaagctgagcagcgtgacagccgccgacaccgccgtgtattattgcgccaactgggacgacgccttcaacatctggggccagggcacaatggtcaccgtgtctagc

SEQ ID NO: 742 - DNA, 723 bp, Artificial Sequence
  Synthetic Polynucleotides
gacgtcgtgatgacccagacccctctgaccctgagcgtgaccattggacagcccgccagcatctcctgcaagagcagccagagcctgctggacagcgacggcaagacctatctccactggctgttgcaacggccaggtcagagccccaagagactgatcttcctggtgtccaagctggactccggcgtgcccgatagattcacaggcagcggctccggcaccgacttcaccctgaagatcagccgggtggaagccgaggacctgggcgtgtactactgttggcagggcacccacttcccccagacctttggcggcggaacaaagctggaaatcaagggcggaggcggaagtggaggcggaggatctggcggcggaggctctgtgcaactccaagagtccggccctgacctcgtgaagcctagccagtctctgagcctgacctgcaccgtgaccggctacagcatcaccagcggctactcttggcactggatcagacagttccccggcaacaagctggaatggatgggctacatccactacagcggcgacaccgactacaaccccagcctgaagtcccggttctccatcaccagagacaccagcaagaaccagttcttcttgcaactgaactccgtgaccaccgaggacaccgccacctactactgtgccacccctggcggctttgtgtactggggccagggaacactcgtgaccgtgtcctct

SEQ ID NO: 743 - DNA, 735 bp, Artificial Sequence
  Synthetic Polynucleotides
gaccagagcgagctgacccagcctagaagcgtgtccggcagccctggacagagcgtgaccatcagctgtaccggcaccgagagagatgtgggcggctacaactacgtgtcctggtatcagcagcaccccggcaaggcccccaagctgatcatccacgacgtgatcgagcggagcagcggcgtgcccgatagattcagcggcagcaagagcggcaacaccgccagcctgacaatcagcggactgcaggccgaggacgaggccgactactactgctggtctttcgctggcggctactacgtgttcggcaccggcacagatgtgaccgtgctgggcggaggcggaagtggaggcggaggatctggcggcggaggctctttcgaagtgcagctgctggaatctggcggcggactggtgcagcctggcggatctctgagactgagctgtgccgcctccggcttcaccttcagcacctaccagatgagctgggtgcgccaggcccctggcaaaggactggaatgggtgtccgggatcgtgtccagcggcggctctacagcctacgccgatagcgtgaagggccggttcaccatcagccgggacaacagcaagaacaccctgtacctgcagatgaacagcctgagagccgaggacaccgccgtgtactattgtgccggcgagctgctgccctactacggcatggatgtgtggggccagggcaccaccgtgaccgtgtcatct

SEQ ID NO: 744 - DNA, 732 bp, Artificial Sequence
  Synthetic Polynucleotides
gaccagagcgagctgacccagcctagaagcgtgtccggcagccctggacagagcgtgaccatcagctgtaccggcaccgagagagatgtgggcggctacaactacgtgtcctggtatcagcagcaccccggcaaggcccccaagctgatcatccacgacgtgatcgagcggagcagcggcgtgcccgatagattcagcggcagcaagagcggcaacaccgccagcctgacaatcagcggactgcaggccgaggacgaggccgactactactgctggtctttcgctggcggctactacgtgttcggcaccggcacagatgtgaccgtgctgggcggaggcggaagtggaggcggaggatctggcggcggaggctctgaagtgcagctgctggaatctggcggcggactggtgcagcctggcggatctctgagactgagctgtgccgccagcggcttcaccttcagcacctacgagatgcactgggtgcgccaggcccctggcaaaggactggaatgggtgtccgtgatcctgagcagcggcggagagacaaactacgccgacagcgtgaagggccggttcaccatcagccgggacaacagcaagaacaccctgtacctccagatgaacagcctgcgggccgaggacaccgccgtgtactattgtgccggaatgctgctgccctactacggcatggatgtgtggggccagggcaccaccgtgaccgtgtcatct

SEQ ID NO: 745 - DNA, 723 bp, Artificial Sequence
  Synthetic Polynucleotides
gacatccagatgacacagagccctagcagcctgtctgccagcgtgggagacagagtgaccatcacctgtagagccagccaggatgtgtctacagccgtggcctggtatcagcagaagcctggaaaggcccctaagctgctgatctacagcgccagctttctgtacagcggcgtgcccagcagattttctggcagcggctctggcaccgacttcaccctgacaatatccagcctccagcctgaggacttcgccacctactactgccagcagtacctgtatcaccccgccacctttggacagggcaccaaggtggaaatcaagagaggcggaggcggaagtggaggcggaggatctggcggcggaggctctgaagtgcagctggttgaatcaggtggcggcctggttcaacctggcggatctctgagactgagctgtgccgccagcggcttcacctttagcgacagctggattcactgggtccgacaggcccctggcaaaggacttgaatgggtcgcctggatcagcccttatggcggcagcacctattacgccgacagcgtgaagggcagattcaccatcagcgccgacaccagcaagaacaccgcctacctccagatgaactccctgagagccgaagataccgccgtgtactactgcgccagaaggcattggcctggcggctttgattattggggccagggcacactggtcaccgtgtcatct

SEQ ID NO: 746 - DNA, 726 bp, Artificial Sequence
  Synthetic Polynucleotides
gccatcgtgatgacccagacaccttctccagtgtctgccgccgttggcggcacagtgacaatcaactgtcaggccagcgagagcgtgtacagcaacaactacctgagctggttccagcagaagcccggccagcctcctaagctgctgatctacctggcctccacactggcaagcggagtgcccagtagattcaaaggcagcggctctggcacccagttcaccctgacaattagcggcgtgcagtgtgacgatgccgccacctattactgcatcggcggcaagagcagcagcaccgatggcaatgcttttggcggcggaacagaggtggtcgttagaggcggaggcggaagtggaggcggaggatctggcggcggaggctctcaatctctggaagaaagcggaggcagactggtcaagcccgacgagacactgaccatcacctgtaccgtgtccggcatcgacctgagcagcaatggactgacctgggtccgacaagctcctggcgaaggactggaatggatcggcaccatcaacaaggacgccagcgcctactatgcctcctgggccaaaggcaggctgaccatctctaagcccagctccacaaaggtggacctgaagatcacaagccccaccaccgaggacaccgccacatacttttgtggccggatcgccttcaagaccggcacctctatttggggacctggcacactggtcaccgtgtctagt

SEQ ID NO: 747 - DNA, 720 bp, Artificial Sequence
  Synthetic Polynucleotides
gacatccagatgacacagagccctagcagcctgtctgccagcgtgggagacagagtgaccatcacctgtagagccagccagggcatctcttcttggctggcctggtatcagcagaagcccgagaaggcccctaagagcctgatctatgccgccagctctctccagagcggagtgcctagcagattttctggcagcggctccggcaccgatttcaccctgacaatatccagcctccagcctgaggacttcgccacctactactgccagcagtacaacagctacccctacaccttcggccagggcaccaagctggaaatcaaaggcggaggcggaagtggaggcggaggatctggcggcggaggctctcaagtgcaactggttcagagcggcgctgaagtgaagaaacctggggcctctgtgaaggtgtcctgcaaggcttccggctacacctttaccagctacgacgtgcactgggtccgacaggctccaggacaaagactggaatggatgggatggctgcacgccgataccggcatcaccaagttcagccagaaattccagggccgcgtgacaatcaccagagacacatctgccagcaccgcctacatggaactgagcagcctgagaagcgaggacaccgccgtgtactactgcgccagagagagaatccagctttggttcgactactggggccagggaaccctggtcacagtctcttct

SEQ ID NO: 748 - DNA, 774 bp, Artificial Sequence
  Synthetic Polynucleotides
gacatcgtgatgacccagagccccctgagcctgcctgtgacacctggcgagcctgccagcatctcctgtagaagcagccagagcctgctgcacagcaacggctacaactacctcgtgtggtatctccagaagcccggccagagccctcaactgctgatctacctgggcagcatcagagccagcggcgtgcccgatagattttccggcagcggctccggcaccgacttcaccctgaagatcagccgggtggaagccgaggacgtgggcgtgtactactgtatgcagcccctccagacccccatcaccttcggccagggcaccagactggaaatcaagagaggcggaggcggaagtggaggcggaggatctggcggcggaggctctggactccagtgtgtggccgctcctagatgggtgctgagccaggtgcaactccagcagtggggagccggactgctgaagcctagcgagacactgagcctgacatgcgccgtgtacggcggcagcttcagcggcaattactggtcctggatcagacagccccctggcaagggcctggaatggatcggcgagatcaaccacagcggcagcaccaactacaaccccagcctgaagtccagagtgaccatcagcgtggacaccagcaagaaccagttctccctgaagctgagcagcgtgacagccgccgacaccgccgtgtattactgtgccagaggcggctcctacaattacttcgactactggggccagggaaccctcgtgaccgtgtctagt

SEQ ID NO: 749 - DNA, 765 bp, Artificial Sequence
  Synthetic Polynucleotides
cagctgacacagagccctagcagcgtgtcagccagcgtgggcgacagagtgaccatcacctgtagagccagccggggcatcagctcttggctggcctggtatcagcagaagcccggcaaggcccccaagctgctgatctacacagccagcagcctccagagcggcgtgcccagcagattttctggcagcggctccggcaccgacttcaccctgacaatcagcagcctccagcccgaggacttcgccacctactactgccagcaggcttacagcttcccccggacctttggccagggcaccaaggtggaaatcaagcggggcggaggcggaagtggaggcggaggatctggcggcggaggctctgtggctgctcctagatgggtgctgagccaggtgcagctccaggaatctggccccggactcgtgaagcctagccagaccctgagcctgacctgtaccgtgtctggcggcagcatcagcagcggcggctactactggatctggatcagacagcaccctggcaagggcctggaatggatcggctacatctactacaacggcaacacctactataaccccagcctgaagtcccgcgtgaccatgagcgtggacaccagcaagaaccagttctccctgaagctgtccagcgtgacagccgccgataccgccgtgtactactgcgccagagatggcatcaccatgatccggggctactattacggcatggacgtgtggggccagggaaccaccgtgaccgtgtcatct

SEQ ID NO: 750 - DNA, 690 bp, Artificial Sequence
  Synthetic Polynucleotides
gacatcgtcgtgacacagagccctgcttccctggccgtgtccctgggacagagagccaccatcagctaccgggccagcaagagcgtgtccaccagcggctacagctacatgcactggaaccagcagaagcccggccagccccctagactgctgatctacctggtgtccaacctggaaagcggcgtgcccgccagattttctggcagcggctctggcaccgacttcaccctgaacatccaccccgtggaagaagaggacgccgccacctactactgccagcacatcagagagctgaccagaagcgagggcggaccctcttggaagggcggaggcggaagtggaggcggaggatctggcggcggaggctctgaagtgaagctggaagagtctggcggcgaccttgtgaagcctggcggcagcctgaagctgagctgtgccgccagcggctttaccttctccggctacggcatgagctgggtgcgccagacccccgacaagagactggaatgggtggcaaccatcagcagcggcggcagctacacctactatcccgacagcgtgaagggccggttcaccatctccagagacaacgccaagaacaccctgtacctgcagatgtcctccctgaagtccgaggacaccgccatgtactattgcgccaggcacgaaggcggctactacggcagttct

SEQ ID NO: 751 - DNA, 735 bp, Artificial Sequence
  Synthetic Polynucleotides
gacatccagatgacccagagccccagcagcctgtctgccagcgtgggcgacagagtgaccatcacctgtagagccagccagggcatcagcaactacctggcctggtatcagcagaaaaccggcaaggtgcccaagttcctgatctacgaggccagcaccctgcagagcggcgtgccaagtagattttccggcggaggcagcggcaccgacttcaccctgacaatcagctccctgcagcccgaggacgtggcaacctactactgccagaactacaacagcgcccccttcaccttcggccctgggaccaaggtggacatcaagggcggaggcggaagtggaggcggaggatctggcggcggaggctctcaggtgcaactggtggaatctggcggaggcgtggtgcagcctggcagaagcctgagactgagctgtgccgccagcggcttcgccttcagcagatacggaatgcactgggtgcgccaggcccctggcaaaggactggaatgggtggccgtgatttggtacgacggcagcaacaagtactacgccgacagcgtgaagggccggttcaccatcagccgggacaacagcaagaacacccagtacctgcagatgaacagcctgcgggccgaggataccgccgtgtactattgtgccagaggcggcgacttcctgtactactactattacggcatggacgtgtggggccagggaaccaccgtgaccgtgtcatct

SEQ ID NO: 752 - DNA, 711 bp, Artificial Sequence
  Synthetic Polynucleotides
gacatccagatgacccagagccccagcagcctgtctaccagcgtgggcgatagagtgaccctgacctgcaaggccagccaggatgtgggaaccgccgtggactggtatcagcagaagcctggccccagccccaagctgctgatctactgggccagcaccagacacaccggcatccccagcagattttccggcagcggctccggcaccgacttcaccctgacaatcagctccctgcagcccgaggacttcgccgactactactgccagcagtacaacagctaccccctgaccttcggccctgggaccaaggtggacatcaagggcggaggcggaagtggaggcggaggatctggcggcggaggctctgaagtgcaactggtgcagagcggccctgaagtgaagaaacccggcgctaccgtgaagattagctgcaagaccagcggctacaccttcaccgagtacaccatccactgggtcaagcaggcccctggcaagggcctggaatggatcggcaacatcaaccccaacaacggcggcaccacctacaaccagaagttcgaggacaaggccaccctgaccgtggacaagagcaccgacaccgcctacatggaactgagcagcctgcggagcgaggataccgccgtgtactattgtgccgccggatggaacttcgactactggggacagggcaccctgctgaccgtgtctagt

SEQ ID NO: 753 - DNA, 714 bp, Artificial Sequence
  Synthetic Polynucleotides
gacatccagatgacccagagccccagcagcctgtctgccagcgtgggcgacagagtgaccatcacatgcaaggccagccaggacatctacccctacctgaactggttccagcagaagcccggcaaggcccccaagaccctgatctaccggaccaacagactgctggacggcgtgcccagcagattttctggcagcggctccggcaccgacttcaccttcaccatcagctccctccagccctactactgcctccagtacgacgagttccccctgacctttggagccggcaccaagctggaaatcaagagaggcggaggcggaagtggaggcggaggatctggcggcggaggctctcagatcaccctgaaagagtccggccccaccctcgtgaagcctacccagaccctgacactgacctgcaccttcagcggcttcagcctgagcaccagcaacatgggcgtgggctggatcagacagcctcccggaaaagccctggaatggctggcccacatttggtgggacgacgacaagtactacagccccagcctgaagtcccggctgacaatcaccaaggacaccagcaagaaccaggtggtgctgaccatgaccaacatggaccccgtggacaccgccacctactattgcgtgcggagcaactacggctacgcttggtttgcctactggggccagggcaccctcgtgaccgtgtcatct

SEQ ID NO: 754 - DNA, 714 bp, Artificial Sequence
  Synthetic Polynucleotides
gacatcgtgatgacccagagccagaaattcatgagcaccagcgtgggcgacagagtgaacgtgacctgcaaggccagccagaacgtgggcaccaacgtcgtgtggtatcagcagaaaaccggccagagccccaaggccctgatccacagcgccagctacagatacagcggcgtgcccgacagattcaccggcagcggctctggcaccgacttcaccctgaccctgagcaacgtgcagagcgaggacctggccgaatacttctgccagcactacaacagcttcccttacaccttcggcggaggcaccaagctggaaatcaagagaggcggaggcggaagtggaggcggaggatctggcggcggaggctctcaggtgcaactccagcagagcggagccgaactcgtgcggcctggcgtgtccgtgaagattagctgcaagggctccggctacaggttcaccgactaccccatccactgggtcaagcagagccacgccaagagcctggaatggatcggcatcatcagcacctactacggcgacgtgaccaacaaccccaagttccggggcaaggccaccatgacagtggacaagagcagcaccaccgcctacatggaactggcccggctgaccagcgaggactccgccatctactactgcgcccggaacgacctgttcgcctattggggccagggcaccctcgtgacagtgtctgct

SEQ ID NO: 755 - DNA, 723 bp, Artificial Sequence
  Synthetic Polynucleotides
gacatcaagatgacccagagccccagctctatgtacgccagcctgggcgagcgcgtgaccatcacctgtaaagccagccccgacatcaacagctacctgagctggttccagcagaagcccggcaagagccccaagaccctgatctaccgggccaacagactggtggatggcgtgcccagcagattctctggcggcggaagcggccaggactacagcctgaccatcaactccctggaatacgaggacatgggcatctactactgcctccagtacgacgagttcccctacaccttcggcggaggcaccaagctggaaatgaaaggcggaggcggaagtggaggcggaggatctggcggcggaggctctgaagtgaagctggtggaatcaggaggaggcctcgtgaaacctggcggctctctgaagctgagctgtgccgccagcggcttcaccttcagcagctacgccatgagctgggtgcgccagattcccgagaagcggctggaatgggtggcctccattagcagaggcggcaccacctactaccccgacagcgtgaagggccggttcaccatctccagagacaacgtgcggaacatcctgtacctccagatgagcagcctgcggagcgaggacaccgccatgtactactgcggcagatacgactacgacggctactacgctatggactactggggccagggcaccagcgtgaccgtgtcatct

SEQ ID NO: 756 - DNA, 729 bp, Artificial Sequence
  Synthetic Polynucleotides
gacgtggtcgtgacccctgtgtcctgcttcctgagctgcatctctggcgccgagggccaccacctgattcagggccagcagaagtgccagtacatctggctgctgtacgccctggaacccaccgagacaagaaccgccacccagacccctcacctgtcctgcatccagcccagaatctggggaccctgccaggtgcagtggcagtgggtgtgggatagactgcacccccagcaccctagttgtggcggcggaggctgttgcaacctgctgctgtctgcccacggcgcctacacatttggcggaggcacccggctggaactgaaaggcggaggcggaagtggaggcggaggatctggcggcggaggctctgaagtgaagctccaggaaagcggccctgagctcgtgaagcctggcgcctctgtgaagatgagctgcaaggccagcggctacaccttcaccagctacgtgatgcactgggtcaagcagaagcccggccagggcctggaatggatcggctacatcaacccctacaacgacggcaccaagtacaacgagaagttcaagggcaaggccaccctgaccagcgacaagagcagcagcaccgcctacatggaactgagcagcctgacctccgaggacagcgccgtgtactactgcgcccggtggaaaatctactacggcaactacgaggactactggggccagggcacacccctgacagtgtctagt

SEQ ID NO: 757 - DNA, 822 bp, Artificial Sequence
  Synthetic Polynucleotides
gacgaattccaggtgcaactggtgcagtctggcggagggctggtgcagccagggggatctctgagactgagctgtgccgccagcgacttcgacttcgccgcctacgagatgagctgggtgcgccaggctcctggacagggactggaatgggtggccatcatcagccacgacggcatcgacaagtattacaccgacagcgtgaagggccggttcaccatcagccgggacaacagcaagaacaccctgtacctgcagatgaataccctgcgggccgaggacaccgccacctactattgcctgagactgggagccgtgggccagggcacacttgtgacagtgtctagcctcgagggaggaggcggctccgggggaggcggaagtggaggcggaggatctgggtctggaggaagcggatctggaggctcagggtcagggggctcaggcagtggaggcagcttcgaacaggtgcaactggtgcagagcggaggcggactggtgcagcctgggggcagtctgaggctgtcttgtgccgcctccgatttcgccttcgatgattacgagatgtcttgggtgcggcaggccccaggcaaagccctggaatggatcggcgacatcaaccacagcggcaccaccatctacaaccccagcctgaagtccagagtgaccatctccagagacaactccaagaatactctgtacctgcagatgaacacactgagagccgaagatacagccatctactactgcgccagaccccactacggcgactacagcgacgccttcgacatctggggccagggaaccatggtcaccgtgtcctct

SEQ ID NO: 758 - DNA, 747 bp, Artificial Sequence
  Synthetic Polynucleotides
gagatcgtgatgacccagagccctgccaccctgtccgtgtctccaggcgaaagagccaccctgagctgtagagccagccagagcgtgtccagcaacctggcctggtatcagcagaagcccggccaggctccccggctgctgatctatggcgcttctaccagagccaccggcatccccgccagattttctggcagcggctccggcaccgacttcaccctgacaatcagctccctccagtccgtggacagcgccgtgtactactgccagcagtacaacaactggcccccctacaccttcggccagggcaccaagctggaaatcaagggcggaggcggaagtggaggcggaggatctggcggcggaggctctcaggtgcaactgctggaaagcggagggggcgtggtgcagcctggaagaagcctgagactgagctgtgccgccagcggcttcaccttcagcttctacggaatgcactgggtgcgccaggcccctggcaaaggactggaatgggtggccgccatcagctacgacggcagcaacaagtattacgccgacagcgtgaagggccggttcaccatcagccgggacaacagcaagaacaccctgtacctccagatgaacagcctgcgggccgaggacacagccgtgtattattgcgccaagcggcccaaccagttctactgctccgacggcagatgctacagcatcgactactggggccagggaaccctcgtgaccgtgtctagt

SEQ ID NO: 759 - DNA, 735 bp, Artificial Sequence
  Synthetic Polynucleotides
cagagcgtgctgacacagcctcctagtgcctctgccggcggaacacctggacagagagtgaccatctcctgctccggcagcagcagcaacatcggcagcaacttcgtgtactggtatcagcaactgcccggcaccgcccccaagctgctgatctacagaaacaaccagcggcccagcggcgtgcccgatagattctctggaagcagaagcggcaccagcgccagcctggctggactgagaagcgaggacgaggccgactactactgtgccgccgatagcctgggcggccactacgtgttcggcaccggaacaaaagtgctgggcggaggcggaagtggaggcggaggatctggcggcggaggctctcaggtgcaactggtggaatctggcggaggctctgtgcagcctggcagaagcctgagactgagctgtgaagcctccggcttcaccttcgaggcttacgccatgcactgggtgcgccagccacctggcaaaggactggaatgggtgtccagcatcaactggaacagcggcagaatcgcctacgccgacagcgtgaagggccggttcaccatcagccgggacaacgccagaaacagcctgtacctccagatgaacagcctgcggctggaagataccgccttctactactgcgccaaggacatccggcggttcagcacaggcggagccgagtttgagtattggggccagggcaccctcgtgaccgtgtctagt

SEQ ID NO: 760 - DNA, 720 bp, Artificial Sequence
  Synthetic Polynucleotides
gagaacgtgctgacacagagccctgccatcatgagcgcttccccaggcgagaaagtgaccatgacatgtagcgccagcagcagcgtgtcctacatgcactggtatcagcagaagtccagcacaagccccaagctgtggatctacgacaccagcaaactggcctctggcgtgccaggcagattttctggcagcggcagcggaaacagctacagcctgacaatcagcagcatggaagccgaggacgtggcaacctactactgctttcaaggcagcggctaccctctgacctttggagccggaacaaagctggaactgaaaggcggaggcggaagtggaggcggaggatctggcggcggaggctctcaggtgcagctgaaagaatctggccctggactggtggcccctagccagtctctgagcatcacctgtaccgtgtccggcttcagcctgagttctcagggcgtgtactgggtccgacagcctcctggaaaaggactggaatggctgggagccatttgggctggcggcagcaccaattacaacagcgccctgatgagccggctgagcatctccaaggacaacagcaagagccaggtgttcctgaagatgaacagcctccagaccgacgacaccgccatgtactactgcgccagagtggatggctaccggggctacaacatggactattggggccagggcaccagcgtgacagtctcttct

SEQ ID NO: 761 - DNA, 729 bp, Artificial Sequence
  Synthetic Polynucleotides
gacatccagatgacccagagccccagcagcctgtctgccagcgtgggcgacagagtgaccatcacctgtagagccagccagagcatcagcagctacctgaactggtatcagcagaagcccggcaaggcccccaaactgctgatctacgacgccagcaacctggaaaccggcgtgcccagcagattttccggcagcggctctggcaccgacttcaccttcaccatcagctccctccagcccgaggacattgccacctactactgccagcagtacgacaacctgcccctgacctttggcggaggcaccaaggtggacatcaagagaggcggaggcggaagtggaggcggaggatctggcggcggaggctctcaggtgcaactggtggaatctggcggcggagtggtgcagcctggcagaagcctgagactgagctgtgccgccagcggcttcacctttagcagctacgccatgcactgggtgcgccaggcccctggaaaaggcctggaatgggtggccgtgatctcctacgacggctccaacaagtattacgccgacagcgtgaagggccggttcaccatctccagagacaacagcaagaacaccctgtacctccagatgaacagcctgcgggccgaggacaccgccgtgtactattgtgccagggctcacaacagcagctcttggagcttcgactactggggccagggcaccctcgtgaccgtgtcatct

SEQ ID NO: 762 - DNA, 756 bp, Artificial Sequence
  Synthetic Polynucleotides
gacgtcgtgatgacccagagccctctgagcctgcctgtgtccctgggcgatcaggccagcatctcctgcagatccagccagagactggtgcacagcaacggcaacacctacctgcactggtatctgcagaagcccggccagagccccaagctgctgatctaccgggtgtccaacagattccccggcgtgcccgatagattcagcggctctggcagcggcaccgacttcaccctgaagatcagccgggtggaagccgaggacctgggcatctatttctgcagccagagcacccacgtgccctacacctttggcggaggcaccaagctggaaatcaagcggggcggaggcggaagtggaggcggaggatctggcggcggaggctctgaagtgcggctgcagcagtctggccccgacctgattaagcctggggccagcgtgaagatgagctgcaaggccagcggctacaccttcaccggctacgtgatgcactgggtcaagcagaggccaggccagggcctggaatggatcggcttcatcaacccctacaacgacgacatccagagcaacgagcggttccggggcaaggccaccctgaccagcgataagagcagcaccaccgcctacatggaactgagcagcctgacctccgaggacagcgccgtgtactactgtgctaggggagccggctacaacttcgacggggcctacagattcttcgacttttggggccagggcaccacactgaccgtgtcctct

SEQ ID NO: 763 - DNA, 729 bp, Artificial Sequence
  Synthetic Polynucleotides
agctacgagctgacccagcctcctagcgtgtccgtgtctcctggacagaccgccaccatctcttgcagcggcgatcaactgggcgggaagtacggccactggtatcagaagaagcccggccagagccccgtgctggtgctgtaccaggacagaaaacggcctgccggcatccccgagagattcagcggaagcagcagcggcaacaccatcaccctgaccatcagcggcacccaggccgtggatgaggccgactactactgccaggcttgggacaccaatctgggcggcgtgttcggcggaggcaccaaagtgacagtgctgggacagggcggaggcggaagtggaggcggaggatctggcggcggaggctctcaggtgcaactggtggaaagcggagccgaagtgaagaaacctggggccagcgtgaaggtgtcctgcaaggccagcggctacacctttaccggctactacatgcactgggtgcgccaggctccaggccagggactggaatggatgggccggatcaaccccaatagcggcggcaccaactacgcccagaaattccagggcagagtgaccatgaccagagacaccagcatcagcaccgcctacatggaactgagccggctgagaagcgacgacaccgccgtgtactactgcgccagccctagaggcagaggcagcgccttcgatatttggggccagggcacactcgtgaccgtgtcctct

SEQ ID NO: 764 - DNA, 738 bp, Artificial Sequence
  Synthetic Polynucleotides
aacttcatgctgacccagccccacagcgtgtccgagagccctggcaagaccgtgaccatctcctgcaccagaagcagcggctctatcgccagcaaatacgtgcagtggtatcagcagaggcccggcagcagccctaccaccgtgatctacgaggacaaccagaggcctagcggcgtgcccgatagattcagcggcagcatcgacaccagcagcaacagcgccagcctgaccatcagcggcctgagaacagaggacgaggccgactactactgccacagctacgacagcaacaaccactccgtgttcggcggaggcaccaaagtgacagtgctgggacagggcggaggcggaagtggaggcggaggatctggcggcggaggctctgaagtgcaactggtggaaagcgggggaggcgtggtgcagccaggcggatctctgagactgagctgtgccgccagcggcttcaccttcagcagctacgccatgagctgggtgcgccaggcccctggaaaaggcctggaatgggtgtccgccatctctggctctggcggcagcacctactacgccgatagcgtgaagggccggttcagcatcagccgggacaacagcaagaacaccctgtacctccagatgaacagcctgcgggccgaggacaccgccgtgtactactgtgccagaaccagaagctccggggccttcgacatctggggccagggaacactcgtgaccgtgtcctct

SEQ ID NO: 765 - DNA, 726 bp, Artificial Sequence
  Synthetic Polynucleotides
gacatccagatgaaccagagccccagcagcctgagcgccagcctgggcgataccatcaccatcacctgtcacgccagccagaacatcaacgtgtggctgagctggtatcagcagaagcccggcaacatccccaagctgctgatctacaaggccagcaacctgcacaccggcgtgcccagcagattttctggcagcggctctggcaccggcttcaccattaccatcagctccctccagcccgaggacattgccacctactactgccagcagggccagagctacccctggacatttggcggaggcaccaagctggaaatcaagagaggcggaggcggaagtggaggcggaggatctggcggcggaggctctgaagtgcaactccagcagagcggcccagagcttgtgaagcctggcgcttccgtgaagattagctgcaaagccagcggctacagcttcaccggctacttcatgaactgggtcaagcagagccacggcaagagcctggagtacatcggcagattcaacccctacaacggcgagacactgtacaaccagaagttcaagggcaaggccaccctgaccgtggacaagagcagcagcaccgtgcacatggaactgctgagcgtgaccagcgaggacagcgccgtgtactactgtggcagaagcggcaacgacgacgctatggactattggggccagggcaccagcgtgaccgtgtctagtgct

SEQ ID NO: 766 - DNA, 726 bp, Artificial Sequence
  Synthetic Polynucleotides
gacatccagatgacccagagccccagcatcctgagcgccagcgtgggcgacagagtgaccatcacctgtcgggccagccagagattcggcgactacctggcctggtatcagcagaagcctggacaggcccccaagctgctgatctacggcgcttccacactccagagcggcgtgcccagcagattttctggcagcggctccggcaccgagttcaccctgacaatcagcggcctccagcccgaggacttcgccacctactattgccagcaggccaacagcttccctatcaccttcggcaagggcacccggctggacatcagaagaggcggaggcggaagtggaggcggaggatctggcggcggaggctctcaggtgcagctggtgcagtctggggccgaagtgaagaaacccggcagcagcgtgaaggtgtcctgcaaggcttccggcggcaccttcagcagctacgccatttcttgggtgcgccaggccccaggacagggcctggaatggatgggctggatcaacgtgggcaacggcaacgccatctacagccagaaattccagggccgcgtgacaatcaccagagacaccagcgccaccaccgcctacatggaactgagcagcctgcggagcgaggacaccgccgtgtactactgtgccagggatggcgagagagcctgggacctggattattggggccagggcacactcgtgaccgtgtcctct

SEQ ID NO: 767 - DNA, 741 bp, Artificial Sequence
  Synthetic Polynucleotides
gagacaaccctgacacagagccctggcaccctgagcctgtctccaggcgaaagagccacactgagctgtcgggccagccagagcgtgtccagctcttacctggcctggtatcagcagaagcccggccaggctccccggctgctgatctatggcgcttctagcagagccaccggcatccccgatagattcagcggctctggcagcggcaccgacttcaccctgaccatcagcagactggaacccgaggacttcgccgtgtactactgccagcagtacggcagcagcccctacacattcggccagggcaccaagctggaaatcaagagaggcggaggcggaagtggaggcggaggatctggcggcggaggctctcaggtgcaactggtgcagtctggcggcggagtggtgcagcctggaagaagcctgagactgtcctgtgccgccagcggcttcaccttcagcagctacgccatgcactgggtgcgccaggcccctggaaaaggactggaatgggtggccgtgatctcctacgacggcagcaacaagtattacgccgacagcgtgaagggccggttcaccatctccagagacaacagcaagaacaccctgtacctccagatgaacagcctgcgggccgaggacacagccgtgtattattgcgccagagagctgcggttcctggaatggtccagcgacgccttcgacatctggggccagggaacaatggtcaccgtgtcctcc

SEQ ID NO: 768 - DNA, 720 bp, Artificial Sequence
  Synthetic Polynucleotides
gacatccagatgacacagagccctagcagcctgtctgccagcgtgggagacagagtgaccatcacctgtagagccagccagggcatctcttcttggctggcctggtatcagcagaagcccgagaaggcccctaagagcctgatctatgccgccagctctctccagagcggagtgcctagcagattttctggcagcggctccggcaccgatttcaccctgacaatatccagcctccagcctgaggacttcgccacctactactgccagcagtacaacagctacccctacaccttcggccagggcaccaagctggaaatcaaaggcggaggcggaagtggaggcggaggatctggcggcggaggctctcaagtgcaactggttcagagcggtgccgaagtgcggaagcctggcagctctgtgaaggtgtcctgtaaagcctccggcggcagcttcaacaactaccccatcttctgggtccgacaggcccctggacagggctttgaatggatgggcagaatcatccccatcctgggcatcaccgcctacgctcagaaattccagggccgcgtgacaatcaccgccgacaagtctacaagcacagcctacatggaactgaacagcctgcggagcgaggacaccgccgtgtattattgtgccggcggagatgacctggacgcctttgacatttggggccagggaacaatggtgtccgtgtcctct

SEQ ID NO: 769 - DNA, 729 bp, Artificial Sequence
  Synthetic Polynucleotides
gagatcgtgctgacacagagccctgccaccctgtctctgagccctggcgaaagagccaccctgagctgtagagccagccagagcgtgcggagctacctggcctggtatcagcagaagcctggacaggcccccagactgctgatctacgacgccagcaatcgggccacaggcatccccgccagattttctggctctggcagcggcaccgacttcaccctgacaatcagcagcctggaacccgaggacttcgccgtgtactactgccagcagcggagcaactggccccctacctttggacagggcaccaaggtggaaatcaagggcggaggcggaagtggaggcggaggatctggcggcggaggctctcaactccaggtgcaggaatctggccccggactcgtgaagcccagcgagacactgagcctgacctgtaccgtgtccggcggcagcatcagcaacagctacttctcctggggctggatcagacagccccctggcaagggcctggaatggatcggcagcttctactacggcgagaaaacctactacaaccccagcctgaagtccagagccaccatcagcatcgacaccagcaagagccagttctccctgaagctgagcagcgtgacagccgccgacaccgccgtgtattattgccccagaggccccaccatgatccggggcgtgatcgactcttggggccagggaacactcgtgaccgtgtcctct

SEQ ID NO: 770 - DNA, 756 bp, Artificial Sequence
  Synthetic Polynucleotides
gacatcgtgatgacccagacccccctgagcctgcctgtgacacctggcgagcctgccagcatctcctgcagaagcagcagaagcctgctggacagcgacgacggcaacacctacctggactggtatctgcagaaacccggccagagcccccaactgctgatctacaccctgagctacagagccagcggcgtgcccgatagattttccggctctggcagcggcaccgacttcaccctgaagatcagccgggtggaagccgaggacgtgggcgtgtactactgtatgcagcgggtggaatttcccatcaccttcggccagggcaccagactggaaatcaagagaggcggaggcggaagtggaggcggaggatctggcggcggaggctctcaggtgcaactggtggaatctggcgggggagtggtgcagcctggcagatccctgagactgagctgtgccgccagcggcttcatcttcagcagatacggaatgcactgggtgcgccaggcccctggcaagggactgaaatgggtggccgtgatttggtacgacggcagcaacaagctgtacgccgacagcgtgaagggccggttcaccatcagcagagacaacagcaagaacaccctgtacctgcagatgaacagcctgcgggccgaggacaccgccgtgtactattgcgccagagactactacgacaacagccggcaccactggggcttcgactattggggccagggaacccttgtgaccgtgtcctct

SEQ ID NO: 771 - DNA, 726 bp, Artificial Sequence
  Synthetic Polynucleotides
gagatccagatgacccagagccccagcagcatgtctgccagcctgggcgacaccatcaccatcacatgccaggccacccaggacatcttcaagaacctgaactggtatcagcagaagcccggcaagccccccagcctgctgatctactatgccaccgaactggccgagggcgtgcccagcagattttctggcagcggcagcggctccgactacagcctgaccatcagcaacctggaaagcgaggacttcgccgcctactactgcctccagttcttcgagttcccattcaccttcggctccggcaccaagctggaaatgaagggcggaggcggaagtggaggcggaggatctggcggcggaggctctcaggtgcaactccagcagtctggcgctgagcttgtgcggcctggcacctctgtgaaggtgtcctgtaaagccagcggctacgtgttcaccaactactggatcgagtggatcaagcagcggccaggccagggcctggaatggatcggcgtgatgaatccaggcagcggcgagacaacctacaacgagaagttcaagggcaaggccaccctgaccgccgacaagagcagcagcacagcctacatgcaactgtcctccctgaccagcgtggacagcgccgtgtacttctgcgccagggaccacgaccgggactactacgctatggactactggggccagggcaccagcgtgaccgtgtcatct

SEQ ID NO: 772 - DNA, 717 bp, Artificial Sequence
  Synthetic Polynucleotides
gacatcctgctgacacagagccccgccatcctgtccgtgtctccaggcgagagagtgtcctttagctgccgggccagccagaacatcggcaccagcatccactggtatcagcagcggaccaacggcagccccagactgctgattaagtacgccagcgagtccgtgtccggcatccccagcagattttctggcagcggctccggcaccgacttcaccctgagcatcaacagcgtggaaagcgaggacattgccgactactactgccagcacaccaatagctggcccaccacctttggcggaggcaccaagctggaaatcaagagaggcggaggcggaagtggaggcggaggatctggcggcggaggctctcaggtgcaactccagcagtccgacgccgagcttgtgaagcctggcgcttccgtgaagattagctgcaaggccagcggctacaccttcaccgaccacgccattcactgggtcaagcagaagcccgagcagggcctggaatggatcggctacttcagccccggcaacggcgacatcaagtacaacgagaagttcaagggcaaggccaccctgaccgccgacaagagcagcagcacagcctacatgcaactgaacagcctgaccagcgaggactccgccgtgtacttctgcaagcggagctacggcaactacgactactggggccagggcaccacactgaccgtgtctagt

SEQ ID NO: 773 - DNA, 732 bp, Artificial Sequence
  Synthetic Polynucleotides
gacatcgtgatgacccagagccccgatagcctggccgtgtctctgggagagagagccaccatcaactgcaagagcagccagagcctgctgaacagcggcgaccagaagaactacctgacctggtatcagcagaagcccggccagccccccaagctgctgatctactgggccagcaccagagaaagcggcgtgcccgatagattcagcggcagcggaagtggcaccgacttcaccctgaccatcagttctcttcaggccgaggacgtggccgtgtactactgccagaacgactacagctaccccctgaccttcggccagggcaccaaggtggaaatcaagggcggaggcggaagtggaggcggaggatctggcggcggaggctctcaggtgcagctggtgcagtctggggccgaagtgaagaaaaccggcagcagcgtgaaggtgtcctgcaaggccagcggctacacctttaccgaccacgccattcacgtgtggcggcaggctccaggacaggccctggaatggatgggccacttcagccccggcaacaccgacatcaagtacaacgacaagttcaagggcagagtgaccctgaccgtggaccgcagcatgagcaccgcctacatggaactgagcagcctgcggagcgaggacaccgccatgtactattgcaagaccagcaccttctttttcgactactggggccagggaacaatggtcaccgtgtccagc

SEQ ID NO: 774 - DNA, 729 bp, Artificial Sequence
  Synthetic Polynucleotides
gacatccagatgacccagagccccagcagcctgtctgccagcgtgggcgacagagtgaccatcacatgcaaggccagccaggacgtgtccattgccgtggcctggtatcagcagaagcccggcaaggcccccaaggtgctgatctacagcgccagctacagatacaccggcgtgcccgacagattcagcggctctggcagcggcaccgacttcaccttcaccatcagctccctccagcccgaggatattgccgtgtactactgccagcagcactacatcacccccctgacctttggcggaggcaccaaggtggaaatcaagggcggaggcggaagtggaggcggaggatctggcggcggaggctctcagatccaactggtgcagagcggccacgaagtgaagaaacctggggccagcgtgaaggtgtcctgcaaagccagcggctacacctttaccaactacggcatgaactgggtgcgccaggcccctggacagggcctggaatggatgggctggatcaacaccaagaccggcgagcccacctacgccgaagagttcaagggcagattcgtgttcagcctggaaaccagcgcctccaccgcctacctccagatcagctctctgaaggccgaggacaccgccatgtacttttgcggcagaggcggctacggcagcagctactggtacttcgatgtgtggggccagggcaccaccgtgaccgtgtcatct

SEQ ID NO: 775 - DNA, 735 bp, Artificial Sequence
  Synthetic Polynucleotides
gacatcgtgatgacccagagccccgatagcctggccgtgtctctgggagagagagccaccatcaactgccgggccagcaagagcgtgtccaccagcggctacagctacatgcactggtatcagcagaagcccggccagccccccaagctgctgatctacctggcctccaacctggaaagcggcgtgcccgatagattcagcggcagcggctctggcaccgacttcaccctgaccatcagttctcttcaggccgaggacgtggccgtgtactactgccagcacagcagagagctgccctacaccttcggccagggcaccaagctggaaatcaagggcggaggcggaagtggaggcggaggatctggcggcggaggctctcaggtgcaactccaggaatctggccctggccttgtgaagcccagcgagacactgagcctgacctgtaccgtgtccggcggcagcatcagctcttacggcgtgcactggattcggcagcctccaggcaagggcctggaatggatcggcgtgatctggacctccggcgtgaccgactacaacagcgccctgatgggcagagtgaccatctccgtggacaccagcaagaaccagttcagcctgaagctgagcagcgtgacagccgccgataccgccgtgtattattgcgccagagatggcgactacgaccgctacacaatggactactggggccagggaacccttgtgaccgtgtcctct

SEQ ID NO: 776 - DNA, 723 bp, Artificial Sequence
  Synthetic Polynucleotides
cagagcgtgctgacacagcctcctagcgtgtccgtgtctcctggccagaccgccagcatcacctgtagcggcgataagctgggcgataagtacgcctgctggtatcagcagaagcccggccagtctcccgtgctcgtgatctaccaggacagcaagaggcccagcggcatccccgagagattcagcggcagcaacagcggcaataccgccaccctgaccatcagcggcacccaggctatggacgaggccgactactactgccaggcttgggatagcagcaccgccgtggtgtttggcggaggcaccaagctgacagtgctgggcggaggcggaagtggaggcggaggatctggcggcggaggctctcaggtgcagctggtgcagtctggggccgaagtgaagaagcctggacagagcctgaagatcagctgcaaggccagcggctacagcctgaccgacaactggattggctgggtgcgccagaagccaggcaagggcctggaatggatgggcatcatctaccccggcgacagcgacaccagatacagccctagcttccagggccaagtgaccatctccgccgacaagagcatcaacaccgcctacctccagtggtccagcctgaaagcctccgacaccgccatctactactgtgtgggactggactggaactacaaccccctgcggtactggggacctggcacactcgtgaccgtgtcctct

SEQ ID NO: 777 - DNA, 717 bp, Artificial Sequence
  Synthetic Polynucleotides
gacatcgtgatgacccagagccagaaattcatgagcaccagcgtgggcgaccgggtgtccatcatctgcaaggccagccagaacgtgggcaccttcgtggcctggtatcagcagaagcctggccagagccccaagctgctggtgtacagcgccagcaacagatacaccggcgtgcccgatagattcaccggcagcggctctggcaccgacttcaccctgaccatcaacaacatgcagagcgaggacctggccgactacttctgtcggcagtacagcagctacccctacaccttcggcggaggcaccaagctggaaatcaagggcggaggcggaagtggaggcggaggatctggcggcggaggctctgaagtgcaactccagcagagcggccctgagcttgtgaagccaggggccagcatgaagattagctgcaaagccagcggctacagcttcagcgcctacaccatgaactgggtcaagcagagccacggcaagaacctggaatggatcggcctgattaacccctacaacggcggcaccaactacaaccaggaatttgagggcaaggccaccctgacagtgaacaagagcagcaacaccgccttcatggaactgctgagcctgaccagcgacgacagcgccgtgtactactgcgccagacgggactgggactacttcgactattggggccagggcaccacactgaccgtgtcctct

SEQ ID NO: 778 - DNA, 750 bp, Artificial Sequence
  Synthetic Polynucleotides
gccatccagatgacccagagccctagcagcctgagcgccagcgtgggcgacagagtgaccatcacctgtagagccagccagagcatcagcaactacctgaactggtatcagcagaagcccggcaaggcccccaagctgctgatctatgccgccagctctctccagagcggcgtgcccagcagattttctggcagcggctccggcaccgacttcaccctgacaatcagcagcctccagcccgaggacttcgccacctactactgccagcagagctacagcagcccctccaccacctttggacagggcaccaagctggaaatcaagagaggcggaggcggaagtggaggcggaggatctggcggcggaggctctgaagtgcagctggtggaatctggcggcggactgattcagcctggcggctctctgagactgagctgtgccgcctctggcttcaccgtgtcctccaactacatgagctgggtgcgccaggcccctggcaagggactggaatgggtgtccgtgacatacagcggcggcagcaccagctacgccgatagcgtgaagggccggttcaccatcagccgggacaacagcaagaacaccctgtacctccagatgaacagcctgcgggccgaggacaccgccgtgtactattgtgccaggggaggccggtactgctccagcatcagctgctatgccagaagcggctgcgactactggggccagggaacactcgtgaccgtgtccagt

SEQ ID NO: 779 - DNA, 735 bp, Artificial Sequence
  Synthetic Polynucleotides
gacatccagatgacccagagccccagcagcctgtctgccagcgtgggcgacagagtgaccatcacctgtagagccagccagagcatcggcaccagcctgcactggtatcagcagaagcctggcaaggcccccaagctgctgattaagttcgccagcagactgcagagcggcgtgcccagcagattttctggcagcggctccggcaccgacttcaccctgacaatcagctccctgcagcccgaggacttcgccacctactactgccagcagagccccggcttccctccaacctttggacagggcaccaagctggaaatcaagcggggcggaggcggaagtggaggcggaggatctggcggcggaggctctcaggtgcaactggtggaatctggcggcggacttgtgaagccaggcggcagcctgagactgagctgtgccgccagcggcttcagcatcaccaccagcggctactactggacctggatcagacagttccccggcaagggcctggaatggatgggctacatcggctacaacagcaagacctactacaaccccgccctgaagtcccggatcaccatcagcagagacaacgccaagaacagcctgtacctgcagatgaactccctgagagccgaggataccgccgtgtactactgcgccagatccctgtacggcggctacaaggacgccttcgatagctggggccagggaacccttgtgaccgtgtctagc

SEQ ID NO: 780 - DNA, 747 bp, Artificial Sequence
  Synthetic Polynucleotides
gagatcgtgctgacccagagccctctgagcctgcctgtgacacctggcgagcctgccagcatctcctgtagaagcagccagagcctgctgcacagcatcggctacaactacctggactggtatctccagaagcccggccagagcccccaactgctgatctacctgggcagcaacagagccagcggcgtgcccgatagattttccggcagcggctccggcaccgacttcaccctgaagatcagccgggtggaagccgaggacgtgggcgtgtactactgtatgcaggccctccagacccccctgacctttggcggaggcaccaaggtggaaatcaagcggggcggaggcggaagtggaggcggaggatctggcggcggaggctctgaagtgcaactggtggaaagcggaggcggcgtggtgcagcctggaagaagcctgagactgagctgtgccgccagcggcttcaccttccggtcctacggaatgcactgggtgcgccaggcccctggcaaaggactggaatgggtggccgtgatctcctacgacggctccaacaagtactacaccgacagcgtgaacggcagattcaccatcagcagagacaacagcaagaacaccctgtacctccagatgaacagcctgcgggccgaggacaccgccgtgtactattgtgctagaggcggaggctactacgagacaagcggccctgattactggggccagggcacactcgtgaccgtgtctagt

SEQ ID NO: 781 - DNA, 741 bp, Artificial Sequence
  Synthetic Polynucleotides
gacgtcgtgatgacccagagccctctgagcctgcctgtgacacctggcgagcctgccagcatctcctgtagaagcagccagagcctgctgcacagcatcggctacaactacctgcactggtttctccagaagcccggccagagcccccaactgctgatctacctgggcagcaacagagccagcggcgtgcccgatagattttccggcagcggctccggcaccgacttcaccctgaagatcagccgggtggaagccgaggacgtgggcgtgtactactgtatgcaggccctccagacccctcccacctttggacagggcaccagactggaaatcaagcggggcggaggcggaagtggaggcggaggatctggcggcggaggctctcaactccaactccaggaaagcggccctggcctcgtgaagcctagcggcacactgagcctgacatgtgccgtgtctggcggcagcatcagcagcagcaactggtggtcttgggtgcgccagcctcctggcaagggcctggaatggatcggcgaaatctaccacagcggcagcaccaactacaaccccagcctgaagtccagagtgaccatcagcgtggacaagagcaagaaccagttctccctgaagctgagcagcgtgacagccgccgataccgccgtgtactattgcgtgggcagcccctacggcgactacgtgctggattattggggccagggcaccctcgtgaccgtgtctagt

SEQ ID NO: 782 - DNA, 753 bp, Artificial Sequence
  Synthetic Polynucleotides
gacgtcgtgatgacccagagccctctgagcctgcctgtgacacctggcgagcctgccagcatcagctgtagaagcagccagagcctgctgcacagcaacggccacaactacctggactggtatctccagaagcccggccagagcccccagctgctgatctacctgggcagcaatagagccagcggcgtgcccgatagattcagcggctctggaagcggcaccgacttcaccctgaagatcagccgggtggaagccgaggacgtgggcgtgtactactgtatgcagaccctccagacccccctgacctttggccctggcaccaaggtggacatcaagagaggcggaggcggaagtggaggcggaggatctggcggcggaggctctgaagtgcagctggtggaaacaggcggaggcgtggtgcagcctggcagaagcctgagactgagctgtgccgccagcggcttcaccttcagcagctacggaatgcactgggtgcgccaggcccctggcaaaggactggaatgggtggccgtgatctcctacgacggcagcaacaagtattacgccgacagcgtgaagggccggttcaccatctccagagacaacagcaagaacaccctgtacctccagatgaacagcctgcgggccgaggacaccgccgtgtactattgcgccaaggacagatacggctggggcagcagcttcggccacttcgattattggggccagggcaccctcgtgaccgtgtctagt

SEQ ID NO: 783 - DNA, 735 bp, Artificial Sequence
  Synthetic Polynucleotides
gagatcgtgctgacacagagccctggcaccctgagcctgtctctgggagagagagccacactgagctgtcgggccagccagtctatcagcagcagcttcctggcctggtatcagcagaagcccggccaggcccctaagctgctgatctacgccgccagcacaagagccaccggcatccccgatagattcagcggctctggcagcggcaccgacttcaccctgaccatcagcagactggaacccgaggacttcgccgtgtactactgccagcagtacggcagaagcctgagcttcggcggaggcaccaaggtggaagtgaagggcggaggcggaagtggaggcggaggatctggcggcggaggctctcaggtgcaactccagcagtctggccccggactcgtgaagcctagccagacactgagcctgacctgcgccatcagcggcgatagcgtgtccggcaatagcgccacctggaactggatcagacagagcccatctcggggcctggaatggctgggccggacctactaccgcagcaagtggaaccacgactacgccgagagcgtgaagtcccggatcaccatcaaccccgacaccagcaagaaccagttctccttgcaactgaacagcgtgacccccgaggacacagccgtgtattattgcgccagaggcgacagcagctcttggtacgccttcgactattggggccagggcaccctcgtgaccgtgtctagt

SEQ ID NO: 784 - DNA, 735 bp, Artificial Sequence
  Synthetic Polynucleotides
cagaccgtcgtgacacagcctcctagcgcctctggcacaccaggccagagagtgaccatctcctgtagcggcagcagcagcaacatcggcagcaactacgtgtactggtatcagcaactgcccggcaccgcccccaagctgctgatctacagaagcaaccagcggcccagcggcgtgcccgatagattttctggcagcaagagcggcaccagcgccagcctggctatctctggacctagaagcgtggacgaggccgactactactgcgccgcctgggacgatagcctgaacggcgtggtgtttggcggaggcaccaagctgacagtgctgggtggcggaggcggaagtggaggcggaggatctggcggcggaggctctcaggtgcaactggtgcagtctggggccgaagtgaagaaacccggcagctccgtgaaggtgtcctgcaaggcttccggcggcaccttcagcagctacgccatttcttgggtgcgccaggcccctggacagggcctggaatggatgggcggcatcatccccatctttggcaccgccaactacgcccagaaattccagggccgcgtgaccatcaccgccgacgagtctacaagcaccgcctacatggaactgagcagcctgcggagcgaggataccgccgtgtactactgtgccagaagaatccccccctactacggcatggacgtgtggggccagggaaccaccgtgaccgtgtcatct

SEQ ID NO: 785 - DNA, 735 bp, Artificial Sequence
  Synthetic Polynucleotides
cagagcgtcgtgacacagcctcctagcgtgtcagtggcccctggcaagaccgccagaatcacctgtggccggaacaacatcggcagcaagagcgtgcactggtatcagcagaagcccggccaggctcctgtgctggtggtgtacgacgacagcgacagacccagcggcatccccgagagattcagcggcagcaactccggcaataccgccaccctgaccatcagcagagtggaagccggcgacgaggccgactactactgccaagtgtgggacagcagcagcgatcacgtggtgtttggcggaggcaccaagctgacagtgctgggtggcggaggcggaagtggaggcggaggatctggcggcggaggctctgaagtgcaactggtgcagtctggcggaggggtcgtgcggcctggcggatctctgagactgtcttgtgccgccagcggcttcaccttcgacgactacggcatgagctgggtgcgccaggcccctggaaaaggcctggaatgggtgtccggcatcaactggaatggcggcagcaccggctacgccgattctgtgcggggcagattcaccatcagccgggacaacgccaagaacagcctgtacctgcagatgaactccctgcgggccgaggacaccgccctgtactattgcgccagagagcggggctacggctaccacgaccctcacgattattggggccagggcacccttgtcaccgtgtcctct

SEQ ID NO: 786 - DNA, 738 bp, Artificial Sequence
  Synthetic Polynucleotides
caggctgtcgtgacacagcctcctagcgcctctggcacaccaggccagagagtgaccatctcctgtagcggcagcagcagcaacatcggcagcaacaccgtgaactggtatcagcaggtgcccggcaccgctcccaagctgctgatctacagcaacaaccagcggcccagcggcgtgcccgatagattttctggcagcaagagcggcaccagcgccagcctggctatctctggactccagtccgaggacgaggccgactactattgcgccgcctgggacgatagcctgaacggctgggtgttcggcggaggcaccaagctgacagtgctgggcggaggcggaagtggaggcggaggatctggcggcggaggctctcagatgcaactggtgcagagcggagccgaagtgaaagagcctggcgagagcctgcggatctcctgcaagggcagcggctacagcttcaccaatttctggatctcttgggtgcgccagatgcccggcaagggcctggaatggatgggcagagtggaccccggctactcctacagcacctacagccctagcttccagggccacgtgaccatcagcgccgacaagagcaccagcaccgcctacctccagtggaacagcctgaaggccagcgacaccgccatgtactactgcgccagagtgcagtacagcggctattacgattggttcgacccctggggccagggcacactcgtgacagtgtcaagc

SEQ ID NO: 787 - DNA, 720 bp, Artificial Sequence
  Synthetic Polynucleotides
gacatccagatgacccagagccccagcacactgagcgccagcgtgggcgacagagtgaccatcacctgtcgggccagccagaacatcaacaagtggctggcctggtatcagcagaggcccggaaaagccccccagctgctgatctacaaggccagcagcctggaaagcggcgtgcccagcagattttctggcagcggctctggcaccgagtacaccctgaccatcagctccctccagcccgacgacttcgccacctactactgccagcagtacaacagctacgccaccttcggccagggcaccaaggtggaaatcaagagaggcggaggcggaagtggaggcggaggatctggcggcggaggctctcaggtgcagctggtgcagtctggggccgaagtgaagaagcctggcgagagcctgaagatcagctgcaagggctccggctacaacttctctaacaagtggatcggctgggtgcgccagctgcctggcagaggactggaatggatcgccatcatctaccccggctacagcgacatcacctacagccccagcttccagggccgcgtgacaatcagcgccgacaccagcatcaacaccgcctacctgcactggcacagcctgaaggccagcgacaccgccatgtactactgcgtgcggcatacagccctggctggcttcgattattggggcctgggcaccctcgtgaccgtgtctagt

SEQ ID NO: 788 - DNA, 726 bp, Artificial Sequence
  Synthetic Polynucleotides
gagatcgtgctgacacagagccctggcaccctgagcctgtctccaggcgaaagagccacactgagctgtcgggccagccagagcgtgtccaatacctacctggcctggtatcaccagaggcccggacaggctccccggctgctgatctatggcgcttctagcagagccaccggcatccccgatagattcagcggctctggcagcggcaccgacttcgccctgacaatcagctccctggaacccgaggacttcgccgtgtactactgccagcagtacagcaactcctggaccttcggccagggcaccaaggtggaaatcaagagaggcggaggcggaagtggaggcggaggatctggcggcggaggctctcaggtgcaactggtggaatctggcgggggagtggtgcagcctggcagaagcctgagactgtcttgtgccgccagcggcttcaccttcagcagctacgacatgcactgggtgcgccaggcccctggcaaaggactggaatgggtggccgtgatctcctacgacggcaccaacgagtattacgccgacagcgtgaagggccggttcaccatctccagagacaccagcaagaacaccctgtacctccagatgaacagcctgcgggccgaggacacagccgtgtattattgcgccagagagcggtacttcgactggtccttcgactactggggccagggaaccctggtgtccgtgtctagt

SEQ ID NO: 789 - DNA, 723 bp, Artificial Sequence
  Synthetic Polynucleotides
gagctgacacaggaccctgctgtgtctgttgccctgggccagacagtgcggattacctgtcaaggcgacagcctgagaagcaactacgccaactggtatcagcagaagcccggacaggctcccgtgctggttatctacggccagaacaacagacccagcggcatccccgatagattcagcggctctagctctggcaataccgccagcctgacaatcactggcgctcaggctgccgatgaggccgactactactgcgatagcagagtgtccaccggcaatcacgtggtgtttggcggcggaacaaagctgacagtgctcggacaaggcggaggcggaagtggaggcggaggatctggcggcggaggctctgaagttcagctggtgcagagcggagccgaagtgaagaaacctggggcctctgtgaaggtgtcctgcaaggcttccggctacacctttaccagctacgccatgcactgggtccgacaggcacctggacaacggcttgaatggatgggctggatcaacgccggcaacggcaacaccaagtacagccagaaattccagggccgcgtgaccatcaccagagatacaagcgccagcaccgcctacatggaactgtctagcctgagatccgaggacaccgccgtgtactactgtgccagagacatcagctacggcagcttcgactattggggccagggcacactggtcaccgttagctct

SEQ ID NO: 790 - DNA, 729 bp, Artificial Sequence
  Synthetic Polynucleotides
gacatcgtgctgacacagacaccagccacactgagcgtgacacctggcgattctgtgtccctgagctgtagagccagccagagcatcagcaacaacctgcactggtatcagcagaagtcccacgagagccccagactgctgattaagaacgccagccagtctatcagcggcatccccagcaagtttagcggctctggcagcggcaccgacttcaccctgagaatcaacagcgtggaaaccgaggacttcgggatgtacttctgccagcagagcaatagctggccctacacatttggctccggcaccaagctggaaatcaaaggcggaggcggaagtggaggcggaggatctggcggcggaggctctcaagtgaagctgcaacagagcggacccgagctggttaagccaggcgcttccgtgaagattagctgcaaggccagcggctacagcttcaccggctactacatgcactgggtcaagcagagccacggcaacatcctggactggatcggctacatctacccctacaacggcgtgtccagctacaaccagaagttcaagggcaaagccactctgaccgtggacaagagcagcagcaccgcctacatggaactgagaagcctgaccagcgaggacagcgccgtgtactattgtgccagagagcggggcctgtaccagctcagagcaatggattattggggccagggcaccagcgtgaccgtttcttct

SEQ ID NO: 791 - DNA, 702 bp, Artificial Sequence
  Synthetic Polynucleotides
gacatcgtgatgacacagacccctgccatcatgagcgcctctccaggccagaaagtgaccatcacatgtagcgccagcagcagcgtgaactacatgcactggtatcagcagaagctgggcagcagccccaagctgtggatctacgataccagcaaactggcccctggcgtgccagccagattttctggttctggcagcggcaccagctacagcctgacaatcagcagcatggaagccgaggatgccgccagctacttctgccatcagtggtctagctacccctacacctttggctccggcaccaagctggaaatcaaaggcggaggcggaagtggaggcggaggatctggcggcggaggctctgaagttcagctccaagagtctggccccgacctggtcaagcctagccaaagcctgagcctgacctgtaccgtgaccggctacagcatcacaagcggctatggatggcactggatcagacagttccccggcaacaaactggaatggatgggctacatccactacagcggcagcaccacctacaatcccagcctgaagtcccggatcagcatcagcagagacaccagcaagaaccagttcttcctgcaactgaacagcgtgaccaccgaggacaccgccacctactattgtgctcggagcctgagatattggggccagggcacaaccctgaccgtgtcatct

SEQ ID NO: 792 - DNA, 711 bp, Artificial Sequence
  Synthetic Polynucleotides
gacatccagatgacacagagccctagcagcctgtctgccagcgtgggagacagagtgaccatcacctgtagcgccaccagcagcatcagctacatgcactggtatcagcagaagcccggcaaggcccctaaaggctggatctacgataccagcaaactggcccacggcgtgcccagcagattttctggttctggcagcggcaccgacttcaccctgacaatatctagcctccagcctgaggacttcgccacctactactgccaccagagaagaagctaccccttcaccttcggccagggcaccaaggtggaaatcaaaggcggaggcggaagtggaggcggaggatctggcggcggaggctctgaagtgcaactggttcagagcggagccgaagtgaagaaacctggggcctctgtgaaggtgtcctgcaaggcttccggctacacctttaccaatttctggattcactgggtccgacaggctccaggccaaggactggaatggatcggagagatcgaccccagcgacagctacaccaactacaaccagaaattcaaaggccgggtcaccatcaccagagacaccagcacaagcaccgcctacctggaactgagcagcctgagaagcgaggacaccgccgtgtactactgcgccagggaaatcaccaccgtggattattggggccagggaaccctggtcaccgtgtcatct

SEQ ID NO: 793 - DNA, 732 bp, Artificial Sequence
  Synthetic Polynucleotides
gacatccagatgacacagagccctagcagcctgtctgccagcgtgggagacagagtgaccatcacatgcaaggccagccagggcttcaacaaatacgtggcctggtatcagcagaagcccggcaaggctcctaagctgctgatctactacaccagcacactccagcctggcgtgcccagcagattttctggctctggcagcggcagagactacaccctgacaatatccagcctccagccagaggacttcgccacctactactgtctccagtacggcaacctgctgtacgcctttggacagggcaccaaggtggaaatcaagagaggcggaggcggaagtggaggcggaggatctggcggcggaggctctgaagttcagcttgtgcagagcggagccgaagtgaagaaacctggggcctctgtgaaggtgtcctgcaaagccagcggctacacctttaccagctactggatcggctgggtccgacaggctcctggacaaggactggaatggatcggcgacatctatcccggcggaggctacaccaactacaacgagaagttcaagggccgcgtgacaatcaccagagacacctctacaagcaccgcctacctggaactgagcagcctgagaagcgaggacaccgccgtgtactactgcgccagactggatggcagcagctacagaggcgctatggattcttggggccagggcacactggtcaccgtttcttct

SEQ ID NO: 794 - DNA, 744 bp, Artificial Sequence
  Synthetic Polynucleotides
gacatccagctcacacagagcccttctagcctgtctgccagcgtgggcgacagagtgaccatcacatgtagagccagccagagcgtggactacgacggcgacagctacatgaactggtatcagcagaagcccggcaaggcccctaagctgctgatctacgccgccagctatctggaaagcggcgtgccaagcagattttccggctctggcagcggcaccgatttcaccctgacaatatccagcctccagcctgaggacttcgccacctactactgccagcagagccatgaggacccctacacctttggacagggcaccaaggtggaaatcaagagaggcggaggcggaagtggaggcggaggatctggcggcggaggctctgaagtgcaactggttgaatctggcggcggactggttcagcctggcggatctctgagactgagctgtgccgtgtctggctacagcatcaccagcggctactcttggaactggatcagacaggcccctggcaaaggactggaatgggtcgcctccatcacctacgatggcagcaccaactacaaccccagcgtgaagggcagaatcaccatcagcagggacgacagcaagaacaccttctacctgcaaatgaacagcctgagagccgaggacaccgccgtgtactattgtgccagaggcagccactacttcggccactggcattttgctgtgtggggccagggaaccctggtcacagtttcttct

SEQ ID NO: 795 - DNA, 720 bp, Artificial Sequence
  Synthetic Polynucleotides
gacatccagatgacacagagccctagcagcctgtctgccagcgtgggagacagagtgaccatcacctgtagagccagccaggacatccggtactacctgaactggtatcagcagaagcccggcaaggcccctaagctgctgatctatgtggcctccagcctccagagcggagtgccttctagattttctggcagcggctccggcaccgagtttaccctgacagtgtctagcttgcagcccgaggacttcgccacctactactgcctgcaagtgtacagcacccctcggacctttggacagggcaccaaggtggaaatcaaaggcggaggcggaagtggaggcggaggatctggcggcggaggctctgaagtgcagcttgttgaatctggcggcggactggctaagcctggcggatctctgagactgtcttgtgccgccagcggcttccggttcaccttcaacaactactacatggactgggtccgacaggcccctggacaaggacttgaatgggtgtccagaatcagcagcagcggcgaccctacttggtacgccgattctgtgaagggcagattcaccatcagcagagagaacgccaagaacaccctgttcctccagatgaactccctgagagccgaggacaccgccgtgtactattgtgcctctctgaccaccggcagcgattcttggggacagggcgtgctggttaccgtgtcatct

SEQ ID NO: 796 - DNA, 723 bp, Artificial Sequence
  Synthetic Polynucleotides
gagatcgtgatgacacagagccccgccacactgagtgtgtctccaggcgaaagagccacactgtcctgtagagccagccagagcgtgtccagaaacctggcctggtatcagcagaagcctggacaggctccccggctgttgatctacggcgcttctacaagagccaccggcattcccgccagattttctggctctggcagcggcaccgagttcaccctgacaatcggaagcctccagagcgaggacttcgccgtgtactactgccagcagtacaagacctggcctcggacctttggacagggcaccaacgtggaaatcaaaggcggaggcggaagtggaggcggaggatctggcggcggaggctctcaagttcagctgcaacaatggggagccggcctgctgaagcctagcgaaacactgtctctgacctgcgccgtgttcggcggctctttcagcggctactactggtcctggatcagacagcctcctggcaaaggactggaatggatcggcgagatcaaccaccggggcaacaccaacgacaaccccagcctgaaaagcagagtgaccatcagcgtggacaccagcaagaaccagttcgccctgaagctgagcagcgtgacagccgctgataccgccgtgtattattgcgccagagagcggggctacacctacggcaatttcgatcactggggccagggcaccctggtcacagtttcttct

SEQ ID NO: 797 - DNA, 726 bp, Artificial Sequence
  Synthetic Polynucleotides
gagatcgtgatgacccctagcagcgccacactgagtgtgtctccaggcgaaagagccacactgtcctgtagagccagccagagcgtgtccagaaacctggcctggtatcagcagaagcctggacaggctccccggctgttgatctacggcgcttctacaagagccaccggcattcccgccagattttctggctctggcagcggcaccgagttcaccctgacaatctctagcctccagagcgaggacttcgccgtgtactactgccaccagtacagcaactggatgtgcagcttcggccagggcaccaagctggaaatcaaaggcggaggcggaagtggaggcggaggatctggcggcggaggctctgaagttcagctccttgagtcaggtggcggcctggttcaacctggcggatctctgagactgagctgtgccgccagcggcttcacctttagcagatacgccatgaactgggtccgacaggcccctggcaaaggactggaatgggtgtccggcatctctggaagcggcggcagaacctactacgccgattctgtgaagggcagattcaccatcagccgggacaacagcaagaacaccctgtacctccagatgaacagcctgagagccgaggacacagccgtgtattattgcgccaaggaccgggacttttggagcggcccttttgactattggggccagggaaccctggtcaccgttagctct

SEQ ID NO: 798 - DNA, 741 bp, Artificial Sequence
  Synthetic Polynucleotides
gacatccagatgacccagagccccagcagcctgtctgccagcgtgggcgacagagtgaccatcacatgcaaggccagcaagaacatcagaagctacctggcctggtatcagcagaagcccggcaaggcccccaagctgctgatctacagcggcagcacactgcacagcggcgtgcccagcagattttccggctctggcagcggcaccgacttcaccctgaccatctctagcctccagcccgaggacttcgccacctactactgccagcagcaccacgagtaccccctgacattcggccagggcaccaaggtggaaatcaagagaggcggaggcggaagtggaggcggaggatctggcggcggaggctctcaggtgcaactccaggaatctggccccggactcgtgaagcccagcgagacactgagcctgacctgtaccgtgtccggctacaccatcaccagcggctacgactggtcctggatcagacagcctcctggcaagggcctggaatggatcggctacatcaactacggcggctccaccaactacaagcccagcctgggaagccgcgtgacaatcagcgtggacacctccaagaaccagttcagcctgaagctgagcagcgtgacagccgccgataccgccgtgtactactgcgcccggtacaacgagtacaagagctacatctacgattggtacttcgacttctggggccagggaaccctcgtgaccgtgtctagt

SEQ ID NO: 799 - DNA, 30 bp, Artificial Sequence
  Synthetic Polynucleotides
gagcagaaactgatctcggaagaggatctg

SEQ ID NO: 800 - DNA, 24 bp, Artificial Sequence
  Synthetic Polynucleotides
gactacaaggacgacgatgacaag

SEQ ID NO: 801 - DNA, 25 bp, Artificial Sequence
  Synthetic Polynucleotides
gattataaagatgatgacgataaag

SEQ ID NO: 802 - DNA, 27 bp, Artificial Sequence
  Synthetic Polynucleotides
agttggaaggatgcctctggatggtcc

SEQ ID NO: 803 - DNA, 27 bp, Artificial Sequence
  Synthetic Polynucleotides
agttggaaggatgcctctggatggtct

SEQ ID NO: 804 - DNA, 42 bp, Artificial Sequence
  Synthetic Polynucleotides
gggaaaccaattcccaaccctcttctgggactggattcaacc

SEQ ID NO: 805 - DNA, 27 bp, Artificial Sequence
  Synthetic Polynucleotides
tacccctacgatgtgcccgattacgct

SEQ ID NO: 806 - DNA, 27 bp, Artificial Sequence
  Synthetic Polynucleotides
caccatcatcaccatcacggcagcggc

SEQ ID NO: 807 - DNA, 45 bp, Artificial Sequence
  Synthetic Polynucleotides
ggcctgaacgacatcttcgaggctcagaagatcgaatggcacgag

SEQ ID NO: 808 - DNA, 24 bp, Artificial Sequence
  Synthetic Polynucleotides
tggtctcatccccagtttgaaaag

SEQ ID NO: 809 - DNA, 24 bp, Artificial Sequence
  Synthetic Polynucleotides
tggtcccatccccagttcgagaaa

SEQ ID NO: 810 - DNA, 198 bp, Artificial Sequence
  Synthetic Polynucleotides
ggaggcagctggagccaccctcagtttgaaaaagactacaaagacgatgacgataagggatcagattacaaggatgatgatgacaaggggtcagattataaagacgacgatgataaagggagcgactacaaggacgacgatgacaaggcctggtcccatccccagttcgagaaacaccatcaccaccaccatcatcac

SEQ ID NO: 811 - DNA, 90 bp, Artificial Sequence
  Synthetic Polynucleotides
gactacaaggacgacgatgacaaggattataaagatgatgacgataaagtcgagaccgatttctacgactacaaggacgacgatgacaag

SEQ ID NO: 812 - DNA, 156 bp, Artificial Sequence
  Synthetic Polynucleotides
tacccctacgatgtgcccgattacgcttggagccaccctcagtttgaaaaatacccctatgacgtgccggactacgctggctatccttacgacgtcccagactacgcaggctacccctacgacgtcccagattaccaccatcaccaccaccatcat

SEQ ID NO: 813 - DNA, 504 bp, Artificial Sequence
  Synthetic Polynucleotides
aagcccaccgagaacaacgaagacttcaacatcgtggccgtggccagcaacttcgcgaccacggatctcgatgctgaccgcgggaagttgcccggcaagaagctgccgctggaggtgctcaaagagatggaagccaatgcccggaaagctggctgcaccaggggctgtctgatctgcctgtcccacatcaagtgcacgcccaagatgaagaagttcatcccaggacgctgccacacctacgaaggcgacaaagagtccgcacagggcggcataggcgaggcgatcgtcgacattcctgagattcctgggttcaaggacttggagcccatggagcagttcatcgcacaggtcgatctgtgtgtggactgcacaactggctgcctcaaagggcttgccaacgtgcagtgttctgacctgctcaagaagtggctgccgcaacgctgtgcgacctttgccagcaagatccagggccaggtggacaagatcaagggggccggtggtgac

SEQ ID NO: 814 - DNA, 510 bp, Artificial Sequence
  Synthetic Polynucleotides
gtcttcacactcgaagatttcgttggggactggcgacagacagccggctacaacctggaccaagtccttgaacagggaggtgtgtccagtttgtttcagaatctcggggtgtccgtaactccgatccaaaggattgtcctgagcggtgaaaatgggctgaagatcgacatccatgtcatcatcccgtatgaaggtctgagcggcgaccaaatgggccagatcgaaaaaatttttaaggtggtgtaccctgtggatgatcatcactttaaggtgatcctgcactatggcacactggtaatcgacggggttacgccgaacatgatcgactatttcggacggccctatgaaggcatcgccgtgttcgacggcaaaaagatcactgtaacagggaccctgtggaacggcaacaaaattatcgacgagcgcctgatcaaccccgacggctccctgctgttccgagtaaccatcaacggagtgaccggctggcggctgtgcgaacgcattctggcg

SEQ ID NO: 815 - DNA, 441 bp, Artificial Sequence
  Synthetic Polynucleotides
gaagccgaggccgagagaggcaagctgcccggcaaaaagctgcccctggaagtgctgatcgagctggaagccaacgccagaaaggccggctgcaccagaggctgcctgatctgcctgagcaagatcaagtgcaccgccaagatgaagaagtacatccccggcagatgcgccgactacggcggcgataagaaaacaggccaggccggcatcgtgggagccatcgtggatatccctgagatcagcggcttcaaagaaatggaacccatggaacagtttatcgcccaggtggaccgctgcgccgattgcacaacaggctgtctgaagggcctggctaacgtgaagtgcagcgacctgctgaagaagtggctgcctggcagatgtgccaccttcgccgacaagatccagagcgaggtggacaacatcaagggactggccggcgac

SEQ ID NO: 816 - DNA, 456 bp, Artificial Sequence
  Synthetic Polynucleotides
aaccccaccgtgaacaacgacgtgaaccggggcaagatgcccggcaagaaactgcccctggaagtgctgatcgagctggaagccaacgccttcaaggccggctgcaccagaggctgcctgatctgcctgagcaagatcaagtgtaccgccaagatgaagcagtacatccccggcagatgccacgactacggcggcgacaagaaaacaggccaggccggaatcgtgggagccatcgtggacatccctgagatcagcggcttcaaagagatggaacccctggaacagtttatcgcccaggtggacctgtgcgccgattgcacaaccggctgtctgaagggcctggctaacgtgaagtgcagcgagctgctgaagaagtggctgcccgacagatgcgccagcttcgccgacaagatccagaaagaggcccacaacatcaagggactggccggcgacaga

SEQ ID NO: 817 - DNA, 615 bp, Artificial Sequence
  Synthetic Polynucleotides
ctgcctgccagccccaccgacagatccatcgtgctggacaacggctacgtgtgcagctgggagggcatccccgacgacctgagagactgccccaagaccgaggacatgagcaagcagcatggcgctgccctgaagctgccccccgatgtgctggacgagatggaatgcaacgccaagaaaagcggctgcgtgcggggctgcctccagtgtctggccctgattaagtgcaccgccaagatgcggaagtacatccccggcagatgccacagctacgagggcgacaaggacattgcccagggcggcatcggcaaagagctgaccatcgacatccccgagatccccggcttcctggacctggcccctatggatcagttcgtggcccaggtggacctgtgcgtggactgctccagcagatgcctgaagggcctggctaacgtgcagtgctcctgcaagctgtataagtggctgcccaccagatgcaccggcttccaggccaagatcaagaaagaggccgacaccgtgatcggactggaagatgccctggccctgggcttcgacaccatccaggcttgtgtggccgctggcaagtgcaaggacaccgtgggcagatacagc

SEQ ID NO: 818 - DNA, 504 bp, Artificial Sequence
  Synthetic Polynucleotides
gccgcctctgaagaggccgatgacgatcacgtgtccctcgtgaagaactactggcggatcggcgtgggcaacgagcgggatgtgtctctggatagaggcggccctcccaagctgagcaaagaactgctggccgagatgcacgccattgccagcaatgccggctgctccagagtgtgcctgatcggcctgagcaagatcaagtgcacccccaagatgaagaccttcctgcccggcagatgcaacaccttcgcccctaaacctgccaccggcgacggaccttttgccgccgctgctgccatccctggcttcagcgatctgaccgctatggaacagtacaaggcccaggtggcccagtgcgactgctccaacagatgcctcgtgggcctggctaacatcaagtgttctgccgccctgaaggccgccctgcctcagagatgtaccacctttgccaccaacatccagaaagagggcgaggtggacagcatcaagggctacggcagaaag

SEQ ID NO: 819 - DNA, 582 bp, Artificial Sequence
  Synthetic Polynucleotides
cagcccaccgagaacaagcaggaaagccagatcgaggacatcgacagaagcaccagcctgggcctgatgtgctacgagcagtgtacaggccagagcggcctggatctgaagtgctacaaagagtgcgccgacttcaccggcgaccggaacagaggcagaaagctgcccggcaagaaactgcccctggaagtgctgaagatcatggaagccaacgccagaagggccggctgcaccagaggctgcctgatctgcctgagcaagatcaagtgcaccgccaagatgaagcagtacatccccggcagatgccacacctacgagggcgacaagtctatcggccagggcggcatcggaggccccatcgtggatatccctgagatcatcggcttccagaacatggaacctatggaacagtttatcgcccaggtggacctgtgcgccgattgcacaaccggctgtctgaagggcctggctaacgtgcggtgcaacgacctgctgaagaagtggctgcccgacagatgcgccggcttcgccaacaagatccagagcgaggtggacaacatcaagggactggccggcgacaga

SEQ ID NO: 820 - DNA, 507 bp, Artificial Sequence
  Synthetic Polynucleotides
aagagcatagacagctacgaaaatattgatatagtggctgttgcgggcaacttcgctgctgttgaccaggacgctaaccgcggaggaaacctgccgggtaagaaaatgccaatagaggttcttaaagaaatggaagctaacgccaagcgagcagggtgtgttcggggctgtttgatatgcttgtcccacatcaaatgcacagctaaaatgaaaaaattcataccaggtcggtgtcatagctatcatggagatgcagatacgaagcaaggggcacttgaagaagtggttgacatgcccgagataccgggatttgtggacatggagcccatggaacagtttatagcccaggtggataaatgcgaggactgtaccactggttgtttgaaaggtctcgccaacgtccactgcagcgatctcctcaagaaatggctgccgcaaagatgctcacagtttgcggataagatccaatccgaggtggacacaataaagggcctggcaggggaccgg

SEQ ID NO: 821 - DNA, 576 bp, Artificial Sequence
  Synthetic Polynucleotides
aacccgacggagaacaaggacgatattgatattgtgggagtggaaggcaaattcgggactacggatcttgaaactgatctctttacgattgttgaggacatgaacgtaatctcaagggatacgaacctggcaaatagtgacgcagaccgaggcaaaatgccgggaaaaaaacttccgttggaagtactgatcgagatggaagcgaatgcacgcaaggcagggtgtacacggggatgcttgatctgtctgagtaagattaaatgcaccgctaaaatgaaagtttatatacccggtcggtgccacgattatgggggcgataagaaaaccggtcaggcagggatcgtcggagcaatcgtggatattcctgaaatttcaggattcaaagaacttggaccaatggagcaatttatagcacaagtggacctctgcgctgactgcacgacgggatgtctgaaaggtcttgcaaatgtaaagtgttcagcactccttaagaaatggcttcccgaccgatgtgcctcttttgctgacaagattcagtctgaagttgataacataaagggtcttgcgggtgatcgg

SEQ ID NO: 822 - DNA, 507 bp, Artificial Sequence
  Synthetic Polynucleotides
aagcctaccgaaaataatgatgatattgatatagttgggatcgcaagtacatttatcacgacaaacaccgacgcggaccggggcaagatgccgggaaagaaacttcccttggcagtcctcaaggaaatggaggcgaacgctgcaaaggcagggtgttccagaggttgtctgatctgcttgtctaaaatcaagtgtacagctaagatgaagcagtttattccggggcgctgtcacgactacggtggtgataaaaaaacgggccaggcggcgctggtcggagcaatattcgacatccctgaaatcttcggatttctcgatatggaacctatcgagcagttcatagcacaagtagatttgtgtgctggctgcacaacaggctgcttgaaaggactcgcaaatattaagtgttctgaactcttgaagaagtggcttccgaaaagatgtacctccttcgcgtataaaatgcaaaaggaaatgcacaatataaaaggcatggcaggagatcgg

SEQ ID NO: 823 - DNA, 507 bp, Artificial Sequence
  Synthetic Polynucleotides
aaagcgaccgaaaacaatgacgacatagacatagttggaatcgcgtcaaccttcataacgacaaacacggacgccgaccgaggcaaaatgccggggaaaagattgccactggcggtgttgaaagagatggaagcgaacgcagtcaaagcgggatgtagcaggggctgccttatatgtctgagtaagattaaatgcaccgcgaagatgaagcaatacatccccggcaggtgccacgattacggaggagacaagaagaccgggcaggcggctatagagggcgcgatagatgatattcctgaaatctctggctttaaggagatggcgcctatggagcaattcattgcgcaggttgacttgtgcgcagactgcacgacaggatgcctcaagggcttggcaaatgtaaaatgttccgaacttctgaaaaaatggctgcccaagaggtgtacctccttcgccacgaagatgcaaaaggagatccataacatcaaaggcatggggggggaccgc

SEQ ID NO: 824 - DNA, 585 bp, Artificial Sequence
  Synthetic Polynucleotides
aaccctacggagacccaggacggagtggacattctcggcgtggaagggaaattcgggacagaaaccaacttggagactgatctgtttaccatttgggagataaatggaataattaaatctgatcgcgacacaaatagggcaaatgcagacgctgatcgaggaaaaatgcccggcaagaaacttcctttggcggtgctcatagagatggaggcaaacgcattcaaagcgggttgcactcgcggttgtctcatttgtttgtccaaaatcaaatgcacggctaagatgaaagagtatatcccaggacggtgccatgattacggtggggataaaaaaacgggacaagcaggtatagtaggtgctatcgtggacattccagaaatctcaggatttaaagagcttggccccatggagcaattcatagcgcaagtagacctttgcgctgattgcactactggctgtcttaagggactggcgaatgttaagtgcagcgccctgttgaagaagtggctgccagaccgatgcgcatcattcgcggataagatacagtccgaagtccataatataaaaggtctcgcaggtgatcgc

SEQ ID NO: 825 - DNA, 519 bp, Artificial Sequence
  Synthetic Polynucleotides
gccacaatcaatgaaaatttcgaagacatcgaccttgtcgcgattggaggctcatttgctacagatgtggacgccaacaggggtggtcatggtggacatccgggcaaaaagatgcctaaagaggtcttgttggaaatggaagcgaacgcaaaacgagccggatgtcataggggttgtttgatttgtctttctcacatcaaatgtacgcagaagatgaagaaattcataccgggacggtgtcactcctatgctggtgacaaggatagcgctcagggcggcataacagaggaggagactgttgacatgcccgagatcgctgggttcaaggatcttgaacctatggagcagtttattgcacaggtagacttgtgcgttgactgcacaactggttgtttgaaagggctggccaacgtccactgttctgacttgctcaaaaagtggctgccttcccggtgcaagacttttgcctcaaaaattcagagtcaggttgacaccatcaaggggttggctggtgacagg

SEQ ID NO: 826 - DNA, 576 bp, Artificial Sequence
  Synthetic Polynucleotides
aatcctacagagaacaatgatcatatcaatattgtcgggatcgagggtaaattcggaatcacagacttggagacggatctcttcactatctgggagacaaatcgcatgatttctaccgataacgaacaggcaaatacagacagtaatagagggaagatgccaggtaagaaactgccattggcagttcttatagagatggaagccaacgctttcaaggcgggttgtacaagaggctgtctcatttgcttgtctaaaatcaagtgtactgctaagatgaagaaatacataccgggaagatgccatgactacggaggtgataagaagactgggcaggcaggaatcgtgggcgcgattgtcgacatacccgacatatccgggttcaaggaaatgggaccgatggagcaattcatcgcccaagtggatcgatgcaccgactgcacaacgggatgtttgaagggtcttgcaaatgttaagtgctccgagctgttgaagaagtggttgccggaccgctgcgcgagtttcgccgataaaattcaaagtgaggtgcataatattaaaggtctggcgggagatcgc

SEQ ID NO: 827 - DNA, 495 bp, Artificial Sequence
  Synthetic Polynucleotides
caacccactgagaataaaaaggaatcctataccgaagacacagacgtaaacggggaccatgatcgaggcaggaagcttccggggaagaaacttccactggaagttctgaaaatcatggaagctaacgcaaggagagcaggttgcacgcgaggctgtttgatatgtcttagcaagataaaatgtactgcaaaaatgaagcaatacataccgggaagatgccatacttatgagggggacaaaagcatagggcaggcaggcataggaggcccaatcattgatataccggaaattatagggtttaagaacatggaaccaatggaacagttcatcgcacaggtggatctctgtgcggactgcactactggatgcctcaaaggtctcgcaaatgtaagatgcaacgatcttttgaaaaaatggttgccagatcgatgcgcggggttcgcactcaagatacaaggtgaagtggaaaacataaaggggatggccggggatcga

SEQ ID NO: 828 - DNA, 615 bp, Artificial Sequence
  Synthetic Polynucleotides
cttccagcgtcacccaccgataggtcaatagtccttgacaacggctatgtgtgttcctgggagggtatcccagacgacctgcgggactgtccgaagacagaggatatgtctaagcagcacggagctgctctcaaactgccgccagatgtgttggatgagatggaatgtaatgctaaaaagagtggatgcgtgcgaggatgtcttcagtgtctggcactcataaaatgtactgcaaaaatgagaaagtatatccccggacgctgtcatagctacgagggtgacaaggacattgctcagggggggatcggaaaggaactgacaattgacatccctgagattcctggcttcttggatcttgcaccaatggaccagttcgtggcgcaggtcgacctctgcgtggactgcagcagtcggtgcctgaagggcttggctaatgtccaatgcagttgtaagctctacaaatggttgccaacccggtgtaccggcttccaagcgaaaataaagaaagaagctgacacggtaattgggctggaagatgcgctcgcactcggattcgacaccatccaggcatgcgtagcggccggtaaatgcaaggatacggttggccggtactct

SEQ ID NO: 829 - DNA, 531 bp, Artificial Sequence
  Synthetic Polynucleotides
tgggcggcctccgaggaggccgatgacgacctcgtatctttggtcaaaaactactggggcgtaggcgtaagcaatgaacgcgatgtatctctcgacagggggggccatggcaagctgccgaaaaagcttagcgttgagattctcgctgaaatggaagcaaacgcccagaagagtaattgctctcgggggtgtctgatagggctttctaaaattaaatgcacgcccaaaatgaaaaaattcctccctggcaggtgccacgaatactctggtgatcccaaaactggacagggtccgcttactgcggctgcggttataccagggtatagtgatcttacagctatggagcagttcaagctccaagtagacaagtgtgactgttcaactcaatgtcttaagggtcttgcaaatgtcaagtgctcagcggccctcaaagcggtgttgccaacaagatgctcacaattcgcaactcagatccaagctgaagtaggcaccataaaagggaaggggaagaaaccgactccaccgataggt

SEQ ID NO: 830 - DNA, 930 bp, Artificial Sequence
  Synthetic Polynucleotides
gcttccaaggtgtacgaccccgagcaacgcaaacgcatgatcactgggcctcagtggtgggctcgctgcaagcaaatgaacgtgctggactccttcatcaactactatgattccgagaagcacgccgagaacgccgtgatttttctgcatggtaacgctgcctccagctacctgtggaggcacgtcgtgcctcacatcgagcccgtggctagatgcatcatccctgatctgatcggaatgggtaagtccggcaagagcgggaatggctcatatcgcctcctggatcactacaagtacctcaccgcttggttcgagctgctgaaccttccaaagaaaatcatctttgtgggccacgactggggggcttgtctggcctttcactactcctacgagcaccaagacaagatcaaggccatcgtccatgctgagagtgtcgtggacgtgatcgagtcctgggacgagtggcctgacatcgaggaggatatcgccctgatcaagagcgaagagggcgagaaaatggtgcttgagaataacttcttcgtcgagaccatgctcccaagcaagatcatgcggaaactggagcctgaggagttcgctgcctacctggagccattcaaggagaagggcgaggttagacggcctaccctctcctggcctcgcgagatccctctcgttaagggaggcaagcccgacgtcgtccagattgtccgcaactacaacgcctaccttcgggccagcgacgatctgcctaagatgttcatcgagtccgaccctgggttcttttccaacgctattgtcgagggagctaagaagttccctaacaccgagttcgtgaaggtgaagggcctccacttcagccaggaggacgctccagatgaaatgggtaagtacatcaagagcttcgtggagcgcgtgctgaagaacgagcag

SEQ ID NO: 831 - DNA, 65 bp, Artificial Sequence
  Synthetic Polynucleotides
gtgaagcagaccctgaatttcgacctgctgaagctggctggcgacgtggaatccaacccaggccc

SEQ ID NO: 832 - DNA, 54 bp, Artificial Sequence
  Synthetic Polynucleotides
gagggcagaggaagtctactaacctgcggagatgtggaagaaaatcctggccca

SEQ ID NO: 833 - DNA, 54 bp, Artificial Sequence
  Synthetic Polynucleotides
gagggaagaggtagcctcctcacctgtggggacgttgaagagaaccccggccca

SEQ ID NO: 834 - DNA, 57 bp, Artificial Sequence
  Synthetic Polynucleotides
gcaacaaacttctcactactcaaacaagcaggtgacgtggaggagaatcccgggcct

SEQ ID NO: 835 - DNA, 57 bp, Artificial Sequence
  Synthetic Polynucleotides
gcaacaaacttctcactactcaaacaagcaggtgacgtggagcagaatcccgggcct

SEQ ID NO: 836 - DNA, 60 bp, Artificial Sequence
  Synthetic Polynucleotides
caatgcactaattacgcattgctcaagctggccggtgacgttgagagtaatcctggcccc

SEQ ID NO: 837 - DNA, 12 bp, Artificial Sequence
  Synthetic Polynucleotides
tctggatctgga

SEQ ID NO: 838 - DNA, 12 bp, Artificial Sequence
  Synthetic Polynucleotides
agcggatctggc

SEQ ID NO: 839 - DNA, 12 bp, Artificial Sequence
  Synthetic Polynucleotides
cgggccaagaga

SEQ ID NO: 840 - DNA, 12 bp, Artificial Sequence
  Synthetic Polynucleotides
agggccaagcga

SEQ ID NO: 841 - DNA, 12 bp, Artificial Sequence
  Synthetic Polynucleotides
cgcgccaagaga

SEQ ID NO: 842 - DNA, 216 bp, Artificial Sequence
  Synthetic Polynucleotides
gcgaagcccaccacgacgccagcgccgcgaccaccaacaccggcgcccaccatcgcgtcgcagcccctgtccctgcgcccagaggcgtgccggccagcggcggggggcgcagtgcacacgagggggctggacttcgcctgtgacatctacatctgggcgcccttggccgggacttgtggggtccttctcctgtcactggttatcaccctttactgc

SEQ ID NO: 843 - DNA, 678 bp, Artificial Sequence
  Synthetic Polynucleotides
gcgaagcccaccacgacgccagcgccgcgaccaccaacaccggcgcccaccatcgcgtcgcagcccctgtccctgcgcccagaggcgtgccggccagcggcggggggcgcagtgcacacgagggggctggacttcgcctgtgacatctacatctgggcgcccttggccgggacttgtggggtccttctcctgtcactggttatcaccctttactgcaaacggggcagaaagaaactcctgtatatattcaaacaaccatttatgagaccagtacaaactactcaagaggaagatggctgtagctgccgatttccagaagaagaagaaggaggatgtgaactgagagtgaagttcagcaggagcgcagacgcccccgcgtaccagcagggccagaaccagctctataacgagctgaatctaggacgaagagaggagtacgatgttttggacaagagacgtggccgggaccctgagatggggggaaagccgagaaggaagaaccctcaggaaggcctgtacaatgaactgcagaaagataagatggcggaggcctacagtgagattgggatgaaaggcgagcgccggaggggcaaggggcacgatggcctttaccagggtctcagtacagccaccaaggacacctacgacgcccttcacatgcaggccctgccccctcgc

SEQ ID NO: 844 - DNA, 342 bp, Artificial Sequence
  Synthetic Polynucleotides
gcgaagcccaccacgacgccagcgccgcgaccaccaacaccggcgcccaccatcgcgtcgcagcccctgtccctgcgcccagaggcgtgccggccagcggcggggggcgcagtgcacacgagggggctggacttcgcctgtgacatctacatctgggcgcccttggccgggacttgtggggtccttctcctgtcactggttatcaccctttactgcaaacggggcagaaagaaactcctgtatatattcaaacaaccatttatgagaccagtacaaactactcaagaggaagatggctgtagctgccgatttccagaagaagaagaaggaggatgtgaactg

SEQ ID NO: 845 - DNA, 126 bp, Artificial Sequence
  Synthetic Polynucleotides
aaacggggcagaaagaaactcctgtatatattcaaacaaccatttatgagaccagtacaaactactcaagaggaagatggctgtagctgccgatttccagaagaagaagaaggaggatgtgaactg

SEQ ID NO: 846 - DNA, 336 bp, Artificial Sequence
  Synthetic Polynucleotides
agagtgaagttcagcaggagcgcagacgcccccgcgtaccagcagggccagaaccagctctataacgagctgaatctaggacgaagagaggagtacgatgttttggacaagagacgtggccgggaccctgagatggggggaaagccgagaaggaagaaccctcaggaaggcctgtacaatgaactgcagaaagataagatggcggaggcctacagtgagattgggatgaaaggcgagcgccggaggggcaaggggcacgatggcctttaccagggtctcagtacagccaccaaggacacctacgacgcccttcacatgcaggccctgccccctcgc

SEQ ID NO: 847 - DNA, 336 bp, Artificial Sequence
  Synthetic Polynucleotides
agagtgaagttcagcaggagcgcagacgcccccgcgtaccagcagggccagaaccagctctataacgagctcaatctaggacgaagagaggagtacgatgttttggacaagagacgtggccgggaccctgagatggggggaaagccgagaaggaagaaccctcaggaaggcctgtacaatgaactgcagaaagataagatggcggaggcctacagtgagattgggatgaaaggcgagcgccggaggggcaaggggcacgatggcctttaccagggtctcagtacagccaccaaggacacctacgacgcccttcacatgcaggccctgccccctcgc

SEQ ID NO: 848 - DNA, 324 bp, Artificial Sequence
  Synthetic Polynucleotides
aaaattgaagttatgtatcctcctccttacctagacaatgagaagagcaatggaaccattatccatgtgaaagggaaacacctttgtccaagtcccctatttcccggaccttctaagcccttttgggtgctggtggtggttgggggagtcctggcttgctatagcttgctagtaacagtggcctttattattttctgggtgaggagtaagaggagcaggctcctgcacagtgactacatgaacatgactccacgccgccccggacccacccgcaagcattaccagccctatgccccaccacgcgacttcgcagcctatcgctcc

SEQ ID NO: 849 - DNA, 501 bp, Artificial Sequence
  Synthetic Polynucleotides
aaagagagcagcggcggacccgacagccctgatacagagcctggaagctctgccggacctacccagaggcccagcgacaacagccacaatgaacacgcccctgccagccagggactgaaggccgagcacctgtacatcctgatcggcgtgtccgtggtgttcctgttctgcctgctgctgctggtgctgttctgtctgcaccggcagaaccagatcaagcagggacctcccagaagcaaggacgaggaacagaagcctcagcagaggcccgacctggccgtggacgtgctggaaagaacagccgacaaggccaccgtgaacggcctgcccgagaaggacagagagacagacacaagcgccctggccgctggcagctctcaggaagtgacatacgcccagctggaccactgggctctgacccagagaacagccagagccgtgtccccccagagcaccaaacctatggccgagagcatcacctacgccgccgtggctagacac

SEQ ID NO: 850 - DNA, 597 bp, Artificial Sequence
  Synthetic Polynucleotides
atgaccgagtacaagcccacggtgcgcctcgccacccgcgacgacgtccccagggccgtacgcaccctcgccgccgcgttcgccgactaccccgccacgcgccacaccgtcgatccggaccgccacatcgagcgggtcaccgagctgcaagaactcttcctcacgcgcgtcgggctcgacatcggcaaggtgtgggtcgcggacgacggcgccgcggtggcggtctggaccacgccggagagcgtcgaagcgggggcggtgttcgccgagatcggcccgcgcatggccgagttgagcggttcccggctggccgcgcagcaacagatggaaggcctcctggcgccgcaccggcccaaggagcccgcgtggttcctggccaccgtcggcgtctcgcccgaccaccagggcaagggtctgggcagcgccgtcgtgctccccggagtggaggcggccgagcgcgccggggtgcccgccttcctggagacctccgcgccccgcaacctccccttctacgagcggctcggcttcaccgtcaccgccgacgtcgaggtgcccgaaggaccgcgcacctggtgcatgacccgcaagcccggtgcc

SEQ ID NO: 851 - DNA, 396 bp, Artificial Sequence
  Synthetic Polynucleotides
atggccaagcctttgtctcaagaagaatccaccctcattgaaagagcaacggctacaatcaacagcatccccatctctgaagactacagcgtcgccagcgcagctctctctagcgacggccgcatcttcactggtgtcaatgtatatcattttactgggggaccttgtgcagaactcgtggtgctgggcactgctgctgctgcggcagctggcaacctgacttgtatcgtcgcgatcggaaatgagaacaggggcatcttgagcccctgcggacggtgccgacaggtgcttctcgatctgcatcctgggatcaaagccatagtgaaggacagtgatggacagccgacggcagttgggattcgtgaattgctgccctctggttatgtgtgggagggc

SEQ ID NO: 852 - DNA, 516 bp, Artificial Sequence
  Synthetic Polynucleotides
atgggcaacgaggccagctaccctctggagatgtgctcccacttcgacgccgacgagatcaagcggctgggcaagcgcttcaagaagctggacctggacaacagcggcagcctgagcgtggaggagtttatgtctctgcccgagctgcagcagaaccccctggtgcagcgcgtgatcgacatcttcgacaccgacggcaacggcgaggtggacttcaaggagttcatcgagggcgtgagccagttcagcgtgaagggcgacaaggagcagaagctgcggttcgccttccgcatctacgatatggataaagatggctatatttctaatggcgagctgttccaggtgctgaagatgatggtgggcaacaataccaagctggccgatacccagctgcagcagatcgtggacaagaccatcatcaacgccgacaaggacggcgacggcagaatcagcttcgaggagttctgtgccgtggtgggaggcctggatattcacaaaaaaatggtggtggacgtg

SEQ ID NO: 853 - DNA, 1071 bp, Artificial Sequence
  Synthetic Polynucleotides
atgctgctgctcgtgaccagcctgctgctgtgcgaactgccccaccctgcctttctgctgatcccccggaaagtgtgcaacggcatcggcatcggagagttcaaggacagcctgagcatcaacgccaccaacatcaagcacttcaagaactgcaccagcatcagcggcgacctgcacatcctgcccgtggcctttagaggcgacagcttcacccacacccccccactggaccctcaggaactggacatcctgaaaaccgtgaaagagatcaccggatttctgctgattcaggcttggcccgagaaccggaccgatctgcacgccttcgagaacctggaaatcatccggggcaggaccaagcagcacggccagttttctctggccgtggtgtccctgaacatcaccagcctgggcctgcggagcctgaaagaaatcagcgacggggatgtgattatcagcggcaacaagaacctgtgctacgccaacaccatcaactggaagaagctgttcggcacctccggccagaaaacaaagatcatcagcaaccggggcgagaacagctgcaaggccacaggacaagtgtgccacgccctgtgtagccctgagggctgttggggacccgagcccagagattgcgtgtcctgccggaatgtgtccagaggccgcgagtgcgtggacaagtgcaacctgctggaaggcgagccccgcgagtttgtggaaaacagcgagtgcatccagtgccaccccgagtgtctgccccaggccatgaatatcacctgtaccggcagaggccccgacaactgtatccagtgcgcccactacatcgacggcccccactgcgtgaaaacctgtccagctggcgtgatgggagagaacaacaccctcgtgtggaagtacgccgacgccggccatgtgtgccacctgtgtcaccccaactgcacctacggctgtacaggccctggcctggaaggctgccctaccaacggacccaagatccccagcattgccaccggcatggtgggagcattgctgctgctgctggtggtggccctgggcatcggcctgtttatg

SEQ ID NO: 854 - DNA, 1272 bp, Artificial Sequence
  Synthetic Polynucleotides
atgcgaccctccgggacggccggggcagcgttcctggcgctgctggctgcgctctgcccggcgagtcgggctctggaggaaaagaaaggtaattatgtggtgacagatcacggctcgtgcgtccgagcctgtggggccgacagctatgagatggaggaagacggcgtccgcaagtgtaagaagtgcgaagggccttgccgcaaagtgtgtaacggaataggtattggtgaatttaaagactcactctccataaatgctacgaatattaaacacttcaaaaactgcacctccatcagtggcgatctccacatcctgccggtggcatttaggggtgactccttcacacatactcctcctctggatccacaggaactggatattctgaaaaccgtaaaggaaatcacagggtttttgctgattcaggcttggcctgaaaacaggacggacctccatgcctttgagaacctagaaatcatacgcggcaggaccaagcaacatggtcagttttctcttgcagtcgtcagcctgaacataacatccttgggattacgctccctcaaggagataagtgatggagatgtgataatttcaggaaacaaaaatttgtgctatgcaaatacaataaactggaaaaaactgtttgggacctccggtcagaaaaccaaaattataagcaacagaggtgaaaacagctgcaaggccacaggccaggtctgccatgccttgtgctcccccgagggctgctggggcccggagcccagggactgcgtctcttgccggaatgtcagccgaggcagggaatgcgtggacaagtgcaaccttctggagggtgagccaagggagtttgtggagaactctgagtgcatacagtgccacccagagtgcctgcctcaggccatgaacatcacctgcacaggacggggaccagacaactgtatccagtgtgcccactacattgacggcccccactgcgtcaagacctgcccggcaggagtcatgggagaaaacaacaccctggtctggaagtacgcagacgccggccatgtgtgccacctgtgccatccaaactgcacctacggatgcactgggccaggtcttgaaggctgtccaacgaatgggcctaagatcccgtccatcgccactgggatggtgggggccctcctcttgctgctggtggtggccctggggatcggcctcttcatgcgaaggcgccacatcgttcggaagcgcacgctgcggaggctgctgcaggagagggagcttgtggagcct

SEQ ID NO: 855 - DNA, 999 bp, Artificial Sequence
  Synthetic Polynucleotides
atgccccctcccagactgctgttcttcctgctgttcctgacccctatggaagtgcggcccgaggaacccctggtcgtgaaagtggaagagggcgacaacgccgtgctccagtgtctgaagggcacctccgatggccctacccagcagctgacatggtccagagagagccccctgaagcccttcctgaagctgtctctgggcctgcctggcctgggcatccacatgaggccactggctatctggctgttcatcttcaacgtgtcccagcagatgggcggcttctacctgtgtcagcctggccccccaagcgagaaagcctggcagcctggctggaccgtgaacgtggaaggatctggcgagctgttccggtggaacgtgtccgatctgggcggcctgggatgcggcctgaagaacagaagcagcgaaggccccagcagccccagcggcaaactgatgagccccaagctgtacgtgtgggccaaggaccggcccgagatttgggaaggcgagcctccttgcctgccccccagagatagcctgaaccagagcctgagccaggacctgacaatggcccctggcagcacactgtggctgagctgtggcgtgccacccgactctgtgtccagaggccctctgagctggacccacgtgcaccccaagggacctaagagcctgctgagcctggaactgaaggacgacagacccgccagagatatgtgggtcatggaaaccggcctgctgctgcctagagccacagcccaggatgccggcaagtattactgccaccggggcaacctgaccatgagcttccacctggaaatcaccgccagacccgtgctgtggcactggctgctgagaaccggcggatggaaagtgtccgccgtgaccctggcctacctgatcttctgcctgtgctccctcgtgggcatcctgcatctccagcgggctctggtgctgcggcggaagagaaagagaatgaccgaccccacccggcggttc

SEQ ID NO: 856 - DNA, 246 bp, Artificial Sequence
  Synthetic Polynucleotides
atgttgcagatggctgggcagtgctcccaaaatgaatattttgacagtttgttgcatgcttgcataccttgtcaacttcgatgttcttctaatactcctcctctaacatgtcagcgttattgtaatgcaagtgtgaccaattcagtgaaaggaacgaatgcgattctctggacctgtttgggactgagcttaataatttctttggcagttttcgtgctaatgtttttgctaaggaagataaactct

SEQ ID NO: 857 - DNA, 327 bp, Artificial Sequence
  Synthetic Polynucleotides
actagaggagtgcaggtggagactatctccccaggagacgggcgcaccttccccaagcgcggccagacctgcgtggtgcactacaccgggatgcttgaagatggaaagaaagttgattcctcccgggacagaaacaagccctttaagtttatgctaggcaagcaggaggtgatccgaggctgggaagaaggggttgcccagatgagtgtgggtcagagagccaaactgactatatctccagattatgcctatggtgccactgggcacccaggcatcatcccaccacatgccactctcgtcttcgatgtggagcttctaaaactggaa

SEQ ID NO: 858 - DNA, 322 bp, Artificial Sequence
  Synthetic Polynucleotides
ggcgtccaagtcgaaaccattagtcccggcgatggcagaacatttcctaaaaggggacaaacatgtgtcgtccattatacaggcatgttggaggacggcaaaaaggtggacagtagtagagatcgcaataaacctttcaaattcatgttgggaaaacaagaagtcattaggggatgggaggagggcgtggctcaaatgtccgtcggccaacgcgctaagctcaccatcagccccgactacgcatacggcgctaccggacatcccggaattattccccctcacgctaccttggtgtttgacgtcgaactgttgaagctcggga

SEQ ID NO: 859 - DNA, 651 bp, Artificial Sequence
  Synthetic Polynucleotides
atgggcgtccaagtcgaaaccattagtcccggcgatggcagaacatttcctaaaaggggacaaacatgtgtcgtccattatacaggcatgttggaggacggcaaaaaggtggacagtagtagagatcgcaataaacctttcaaattcatgttgggaaaacaagaagtcattaggggatgggaggagggcgtggctcaaatgtccgtcggccaacgcgctaagctcaccatcagccccgactacgcatacggcgctaccggacatcccggaattattccccctcacgctaccttggtgtttgacgtcgaactgttgaagctcgggactagaggagtgcaggtggagactatctccccaggagacgggcgcaccttccccaagcgcggccagacctgcgtggtgcactacaccgggatgcttgaagatggaaagaaagttgattcctcccgggacagaaacaagccctttaagtttatgctaggcaagcaggaggtgatccgaggctgggaagaaggggttgcccagatgagtgtgggtcagagagccaaactgactatatctccagattatgcctatggtgccactgggcacccaggcatcatcccaccacatgccactctcgtcttcgatgtggagcttctaaaactggaa

SEQ ID NO: 860 - DNA, 1257 bp, Artificial Sequence
  Synthetic Polynucleotides
atggggagtagcaagagcaagcctaaggaccccagccagcgcggcgtccaagtcgaaaccattagtcccggcgatggcagaacatttcctaaaaggggacaaacatgtgtcgtccattatacaggcatgttggaggacggcaaaaaggtggacagtagtagagatcgcaataaacctttcaaattcatgttgggaaaacaagaagtcattaggggatgggaggagggcgtggctcaaatgtccgtcggccaacgcgctaagctcaccatcagccccgactacgcatacggcgctaccggacatcccggaattattccccctcacgctaccttggtgtttgacgtcgaactgttgaagctcgggactagaggagtgcaggtggagactatctccccaggagacgggcgcaccttccccaagcgcggccagacctgcgtggtgcactacaccgggatgcttgaagatggaaagaaagttgattcctcccgggacagaaacaagccctttaagtttatgctaggcaagcaggaggtgatccgaggctgggaagaaggggttgcccagatgagtgtgggtcagagagccaaactgactatatctccagattatgcctatggtgccactgggcacccaggcatcatcccaccacatgccactctcgtcttcgatgtggagcttctaaaactggaaactagtgccacttacgaggttctctgtgaggtggcgcggaaactgggcacggatgacagggaagtggtattgttcctcctaaacgtgttcatacctcaacccacactggcccaattaattggagctcttagagctttaaaggaggagggcaggttaacgtttcccctgttagcggaatgtctgtttcgtgcaggtcgcagagacctcttgcgcgacctgcttcacttagacccgcgttttttagagcgccacctagcgggcacaatgagttatttcagcccttatcagctcactgttctccacgtagacggggagctgtgtgcgagggatattaggtctttgatatttttaagcaaggacactatagggtctcgcagcacaccacagacattcttacactgggtgtactgtatggaaaacttagacctactgggtcccactgacgtggatgccctaatgtcaatgcttagatctttgtcaagagtagacctacagcgccaagtgcaaaccctaatgggccttcacctttccggcccatcacactcccaacactatcgccatacacca

SEQ ID NO: 861 - DNA, 42 bp, Artificial Sequence
  Synthetic Polynucleotides
atggggagtagcaagagcaagcctaaggaccccagccagcgc

SEQ ID NO: 862 - DNA, 1389 bp, Artificial Sequence
  Synthetic Polynucleotides
atgggcagcagcaagagcaagcctaaggaccccagccagagactgaatgctgctggtggacctggcgctggatctgctgctcctgtgtctagcacaagcagcctgcctctggccgctctgaacatgagagtcagaagaaggctgagcctgttcctgaacgtgcggacacaggtggccgctgattggacagctctggccgaggaaatggacttcgagtacctggaaatccggcagctggaaacccaggccgatcctacaggcagactgctggatgcttggcaaggcagaccaggcgcttctgtggggagactgcttgacctgctgacaaagctgggcagagatgacgtgctgctggaactgggacccagcatcgaggaagattgccagaagtacatcctgaagcagcaacaagaagaggccgagaagcctctgcaggttgccgccgtggatagcagcgttccaagaacagctgagctggccggcatcaccacactggatgatcctctgggacacatgcccgagagattcgacgccttcatctgctactgccccagcgacatcgtgggcaagaagcccacaaacaaggcccctcatcctaagcaagagccccaagagatcaacttccccgacgatctgcccggcagcaatactgctgcacccgtgcaagaaaccctgcacggttgtcagcccgtgacacaagaggacggcaaagaaagccggatctccgtccaagagcggcaagttggcggagtgcaggtcgagacaatctctcctggcgacggcagaacattccccaagaggggacagacctgctggcactacaccggaatgctggaagatggcaagaaggtggacagcagccgggacagaaacaagcccttcaagttcatgctgggcaagcaagaagtgattcgcggctgggaagagggcgtcgcacagatgtctgttggacagagagccaagctgacaatcagccccgactacgcctatggcgctacaggacaccctggcatcattcctccacacgccacactggtgttcgacgtggaactgctgaagctggaagtcggaggcgtccaggtggaaaccatcagtccaggcgacggacggacctttcctaagagaggccagacttgttggcattatacagggatgcttgaggacgggaagaaagtggactcctccagagatcggaacaagccgtttaagtttatgctcggaaaacaagaagtcataagaggctgggaagagggtgttgcccaaatgagcgtgggccagcgcgccaaactgaccatctctccagattatgcctacggcgcaaccggccatccaggcattattccacctcatgctaccctggtgtttgatgtcgagctgctcaaactggaa

SEQ ID NO: 863 - DNA, 1620 bp, Artificial Sequence
  Synthetic Polynucleotides
atgtgccatcagcagctcgtgattagctggttcagcctggtgttcctggcctcccccctggtggctatctgggagctgaagaaagacgtgtacgtggtggaactggactggtatcccgacgcccctggcgagatggtggtgctgacctgcgatacccccgaagaggacggcatcacctggaccctggatcagagcagcgaggtgctgggcagcggcaagaccctgaccatccaagtgaaagagttcggcgacgccggccagtacacctgtcacaagggcggagaggtgctgagccacagcttgctgctgctgcacaagaaagaggatggcatttggagcaccgacatcctgaaggaccagaaagagcccaagaacaagaccttcctgagatgcgaggccaagaactacagcggcagattcacctgttggtggctgaccaccatcagcaccgacctgaccttcagcgtgaagtccagcagaggcagcagcgaccctcagggcgtgacatgtggcgctgctacactgagcgccgagagagtgcggggcgacaacaaagaatacgagtacagcgtggaatgccaggaagatagcgcctgccctgccgccgaggaaagcctgcctatcgaagtgatggtggacgccgtgcacaagctgaagtacgagaactacaccagcagctttttcatccgggacatcatcaagcccgacccccccaagaacctccagctgaagcccctgaagaacagcagacaggtggaagtgtcctgggagtaccccgacacctggtccaccccccacagctacttcagcctgacattctgtgtgcaagtgcagggcaagtccaagcgcgagaaaaaggaccgggtgttcaccgacaagaccagcgccaccgtgatctgccggaagaacgccagcatcagcgtgcgcgcccaggatcggtactacagcagctcttggagcgagtgggccagcgtgccatgttctggcggcggaggatctgggggaggcggaagcggagggggaggatctaggaatctgcccgtggctacccccgaccccggcatgtttccttgtctgcaccacagccagaacctgctgcgggccgtgtccaacatgctccagaaggccagacagaccctggagttctacccctgcaccagcgaggaaatcgaccacgaggacatcaccaaggataagaccagcaccgtggaagcctgtctgcccctggaactgaccaagaacgagagctgcctgaacagccgggaaaccagcttcatcaccaacggctcttgcctggcttccagaaagacctccttcatgatggccctgtgcctgagcagcatctacgaggacctgaagatgtaccaggtggagttcaagaccatgaacgccaaactgctgatggaccccaagaggcagattttcctggaccagaatatgctggccgtgatcgacgagctgatgcaggccctgaacttcaacagcgagacagtgccccagaagtcctccctggaagaacccgacttctacaagaccaagatcaagctgtgcatcctgctgcacgccttcagaatccgggccgtgaccatcgacagagtgatgagctacctgaacgcctcc

SEQ ID NO: 864 - DNA, 762 bp, Artificial Sequence
  Synthetic Polynucleotides
atggaatacgcctctgacgcttcactggaccccgaagccccgtggcctcccgcgccccgcgctcgcgcctgccgcgtactgccttgggccctggtcgcggggctgctgctgctgctgctgctcgctgccgcctgcgccgtcttcctcgcctgcccctgggccgtgtccggggctcgcgcctcgcccggctccgcggccagcccgagactccgcgagggtcccgagctttcgcccgacgatcccgccggcctcttggacctgcggcagggcatgtttgcgcagctggtggcccaaaatgttctgctgatcgatgggcccctgagctggtacagtgacccaggcctggcaggcgtgtccctgacggggggcctgagctacaaagaggacacgaaggagctggtggtggccaaggctggagtctactatgtcttctttcaactagagctgcggcgcgtggtggccggcgagggctcaggctccgtttcacttgcgctgcacctgcagccactgcgctctgctgctggggccgccgccctggctttgaccgtggacctgccacccgcctcctccgaggctcggaactcggccttcggtttccagggccgcttgctgcacctgagtgccggccagcgcctgggcgtccatcttcacactgaggccagggcacgccatgcctggcagcttacccagggcgccacagtcttgggactcttccgggtgacccccgaaatcccagccggactcccttcaccgaggtcggaa

SEQ ID NO: 865 - DNA, 783 bp, Artificial Sequence
  Synthetic Polynucleotides
atgatcgagacatacaaccagaccagccccagaagcgccgccaccggactgcccatcagcatgaagattttcatgtacctgctgaccgtgttcctgattacccagatgatcggcagcgccctgttcgccgtgtacctgcacagacggctggacaagatcgaggacgagcggaacctgcacgaggacttcgtgtttatgaagaccatccagcggtgcaacaccggcgagagaagcctgagcctgctgaactgcgaggaaatcaagagccagttcgagggcttcgtgaaggacatcatgctgaacaaagaggaaactaagaaagaaaacagcttcgagatgcagaagggcgaccagaacccccagattgccgcccacgtgatctctgaggccagcagcaagaccacctccgtgctccagtgggccgagaagggctactacaccatgagcaacaacctcgtgaccctggaaaacggcaagcaactgaccgtgaagcggcagggcctgtactacatctacgcccaagtgaccttctgctccaacagagaggccagctcccaggccccctttatcgccagcctgtgcctgaagtcccccggcagattcgagagaatcctgctgagagccgccaacacccacagcagcgccaagccttgtggacagcagagcatccacctgggcggcgtgttcgagcttcagcctggcgcttccgtgttcgtgaacgtgaccgaccctagccaggtgtcccacggcaccggctttaccagcttcggactgctgaagctg

SEQ ID NO: 866 - DNA, 564 bp, Artificial Sequence
  Synthetic Polynucleotides
atggccacttacgaggttctctgtgaggtggcgcggaaactgggcacggatgacagggaagtggtattgttcctcctaaacgtgttcatacctcaacccacactggcccaattaattggagctcttagagctttaaaggaggagggcaggttaacgtttcccctgttagcggaatgtctgtttcgtgcaggtcgcagagacctcttgcgcgacctgcttcacttagacccgcgttttttagagcgccacctagcgggcacaatgagttatttcagcccttatcagctcactgttctccacgtagacggggagctgtgtgcgagggatattaggtctttgatatttttaagcaaggacactatagggtctcgcagcacaccacagacattcttacactgggtgtactgtatggaaaacttagacctactgggtcccactgacgtggatgccctaatgtcaatgcttagatctttgtcaagagtagacctacagcgccaagtgcaaaccctaatgggccttcacctttccggcccatcacactcccaacactatcgccatacacca

SEQ ID NO: 867 - DNA, 723 bp, Artificial Sequence
  Synthetic Polynucleotides
atgtccgactccaaggaggtccctagccttccatttttgcgacacttgctcgaagagttggacagccatgaggacagcttgctgctgtttctgtgtcacgacgcggccccgggctgcacgacggtcacgcaagctttgtgctcgcttagccaacagcgcaagctgaccctcgcggctctggtcgagatgctctacgtgctgcagcgtatggatcttctcaagagccgcttcgggctcagcaaggagggggccgagcaattgctgggcacaagctttctcacgcgctaccgcaagctcatggtttgcgtgggtgaggagctcgactcgagcgagctacgcgctctacgcttgttcgcgtgcaacctgaatccgagcctgagcacggcgctttctgagagcagccgctttgtcgagcttgtactcgcgcttgaaaacgtaggactcgtctcgccatcgagtgtttccgtgcttgcggacatgttgcgcactcttcggcgcctcgatttgtgccagcagcttgttgagtacgaacaacaagagcaagccaggtaccgttactgttacgcggcctcgccctcattgccagttcgtacgttacgtcgggggcacggcgcgagtgaacacgagcagctgtgcatgcccgtgcaagaatcctctgacagccccgagctgctgcgcacgcccgtacaagaatcctccagcgacagccccgagcaaacgact

SEQ ID NO: 868 - DNA, 1113 bp, Artificial Sequence
  Synthetic Polynucleotides
atggcgcacgagccaatccccttctctttcctgcggaatctgctggcagagctggacgctagcgagcacgaggtcttacggttcctgtgccgcgatgtggcgcctgctagcaagactgcagaagacgctttgcgagcgttgcagagacggcgtctgctgacactatcgagcatggcagaactgctctgtgcgctccggcgctttgacgttctcaaggtccgctttggtatgacgcgcgagtgcgcggggcgcttgctggggcacggtttcctttcgcagtacaggcttcaagttgctgccatcaacaacatggtcgggagcgaagacctacgcgtcatgtgcctttgcgcgggaaagctcttgccgccaagctgcacgccgcgctgccttgtcgatcttgtctccgcgctagaggacgcgggggctatctctccgcaggacgtttctgtcctggtgaccctccttcacgccgtttgcagatacgatctttccgtggcgctgtcggcagtagcacatgggcacatgactgtgggcgtgggaacgccagtacaggacgagcccatggacgtgctcgaagtcgatgacgcggagcccatggaagcgacaccagcgtgcgatgagatcggagttgtcaagctcgcgggcgcggcttccgcgggggcgcctctcgcggacggggcttttgcagcctgtacgagcgcgggcaagggcgaggacctcgcaacatcggatctcacggactccgagcccgaggactctgttttcgcggtcgcggatccggtgtacgcagacgtggacttgtccatgtttgtgcgcgcgaacgctactgcagattcctccatgtttgtgaacgcggacgcgggtgcagactcctcgcttgtgaacgcggacgcgggtgcagattcctcgcttgtgaacgcggacgcgggtgcagactcctcgcttgtgaacgcggtcgcggatgcaaactcctcgttaatgcgcacgacctcggcttgtacggactccgagcccgaggactctgcagggccatcgtgcgcgggcatggccttgtccatgtttgggcgcgcgaaatcggtgtcgtcgcttcttctgcgaacgaaagcttcctac

SEQ ID NO: 869 - DNA, 513 bp, Artificial Sequence
  Synthetic Polynucleotides
atgagtcactacagtatgattgacacttacttctccctggacgaggatgagaccgagacctatctgtacctctgcagggacctcctgaaaaataagggagagttccagtgcaccagggacgcctttaaatttctgtcagactatgcgtgcctctcggccgccaaccagatggagctattgtttagggtggggaggctggacttgataaggagaatctttggccagacctggacgccagactcgtgccccaggtactacatgcccatctgctcccccttcaggtgcctgatggccctggtcaatgacttcctctcggacaaggaggtggaggagatgtactttctgtgcgccccgcgcctggagagtcacttagagccgggctccaaaaagtctttcctcagactggccagtctgctggaagacctggagctgctggggggcgataagctaacatttttaaggcacctcttgaccaccatcggacgggccgacctggtaaaaaatctacaggtt

SEQ ID NO: 870 - DNA, 504 bp, Artificial Sequence
  Synthetic Polynucleotides
atggacttaaaaacaactgtgttacacataacagactcatttacagatgaagaaatgtactgtctattatttttaattaatgggtgtattccaagaagctgtaatgcagttaacatctcagatttaattatagaaactttatcaaaaagtacacaatgggatatttgtctaatgcagtgtttatatgtgcttagaaaaataggactattactgaacctcttccaagtaacaaaagaagctgtaaagcaatccttttttacacagccacaattagaaacacatgttttgactctagttaatgtcaataacaacttaactgctaaagacgaaaagcgcttgtgttttattctcgatcaattctttcccagaaatgtagctgccccatctgtaattttatgtgtgttttctaatatgttatgtgaaatgcatgtgctagagtgtttatgtcagctgaaaaagtgcctcaaacagatagggcgaagtgaccttgccaaaactgtttaa

SEQ ID NO: 871 - DNA, 522 bp, Artificial Sequence
  Synthetic Polynucleotides
atgttccctcacaaacgcctggtggatctgggccgccacctggaggccgatgatagggaggccgtgctgtggctgttcgaccgccccgccagcgacgataccccagagggcttcgccaacggcctgtgtccaagcacaggggaacccggcatccctctgcctgtgctgctggaagccgtgtttctggtggggagactggacctggtgagcacatttttcctgctggacgtggggtttatcattgaacgcctgaggtcctctccctcctacttcagcccatacaagcacctgatgctgtccatcgaccggcagctgtccgagcgcgacgtgaagaacctggtgtttctgacaggcgaccagctgggccggcggcgcaatcagagcccaacatttttccgctggctgagccagatggagaaggccgccctggtgtctccttctaactatatggtgctgagcgatctgctgcaggccgtgagcaggagagacgtggccaaggtggtggccgccaacgctcccggc

SEQ ID NO: 872 - DNA, 543 bp, Artificial Sequence
  Synthetic Polynucleotides
atggtgacccgcgatgtgctgctggccatcgagacccacctgaatcagaacgagaagaccttcgtgatgtatttcctgctggacccttacatcccaaaagaatgcaaggacttcctgcctacactggaaaacctgcacagcaagcgcaagattagatatccaatcctgatcgagctgatgtacatcctgcagagattcgacctgctgcgctccatcttcctgctggatcacaggtttgtgaaggatcacattacatcttcccactggaagtacatcagcccatataagcagctgatctttagcatcggacagaatatcgacgacgaggatctgatctccattaagttcattagcatgaattacattggcaagagcccaagcaagatcaagaactacctggattgggtgagagccctggagaaggtggacatggtgggacctgacaacctggacctgttcgagacattcttcaaacagatccacagaatggacatcgtgaagatgatcaaaaactatcgcacccgggagaccctgcagatcacc

SEQ ID NO: 873 - DNA, 1440 bp, Artificial Sequence
  Synthetic Polynucleotides
atgtctgctgaagtcatccatcaggttgaagaagcacttgatacagatgagaaggagatgctgctctttttgtgccgggatgttgctatagatgtggttccacctaatgtcagggaccttctggatattttacgggaaagaggtaagctgtctgtcggggacttggctgaactgctctacagagtgaggcgatttgacctgctcaaacgtatcttgaagatggacagaaaagctgtggagacccacctgctcaggaaccctcaccttgtttcggactatagagtgctgatggcagagattggtgaggatttggataaatctgatgtgtcctcattaattttcctcatgaaggattacatgggccgaggcaagataagcaaggagaagagtttcttggaccttgtggttgagttggagaaactaaatctggttgccccagatcaactggatttattagaaaaatgcctaaagaacatccacagaatagacctgaagacaaaaatccagaagtacaagcagtctgttcaaggagcagggacaagttacaggaatgttctccaagcagcaatccaaaagagtctcaaggatccttcaaataacttcaggctccataatgggagaagtaaagaacaaagacttaaggaacagcttggcgctcaacaagaaccagtgaagaaatccattcaggaatcagaagcttttttgcctcagagcatacctgaagagagatacaagatgaagagcaagcccctaggaatctgcctgataatcgattgcattggcaatgagacagagcttcttcgagacaccttcacttccctgggctatgaagtccagaaattcttgcatctcagtatgcatggtatatcccagattcttggccaatttgcctgtatgcccgagcaccgagactacgacagctttgtgtgtgtcctggtgagccgaggaggctcccagagtgtgtatggtgtggatcagactcactcagggctccccctgcatcacatcaggaggatgttcatgggagattcatgcccttatctagcagggaagccaaagatgttttttattcagaactatgtggtgtcagagggccagctggaggacagcagcctcttggaggtggatgggccagcgatgaagaatgtggaattcaaggctcagaagcgagggctgtgcacagttcaccgagaagctgacttcttctggagcctgtgtactgcggacatgtccctgctggagcagtctcacagctcaccatccctgtacctgcagtgcctctcccagaaactgagacaagaaagaaaacgcccactcctggatcttcacattgaactcaatggctacatgtatgattggaacagcagagtttctgccaaggagaaatattatgtctggctgcagcacactctgagaaagaaacttatcctctcctacaca

SEQ ID NO: 874 - DNA, 588 bp, Artificial Sequence
  Synthetic Polynucleotides
atgtctgctgaagtcatccatcaggttgaagaagcacttgatacagatgagaaggagatgctgctctttttgtgccgggatgttgctatagatgtggttccacctaatgtcagggaccttctggatattttacgggaaagaggtaagctgtctgtcggggacttggctgaactgctctacagagtgaggcgatttgacctgctcaaacgtatcttgaagatggacagaaaagctgtggagacccacctgctcaggaaccctcaccttgtttcggactatagagtgctgatggcagagattggtgaggatttggataaatctgatgtgtcctcattaattttcctcatgaaggattacatgggccgaggcaagataagcaaggagaagagtttcttggaccttgtggttgagttggagaaactaaatctggttgccccagatcaactggatttattagaaaaatgcctaaagaacatccacagaatagacctgaagacaaaaatccagaagtacaagcagtctgttcaaggagcagggacaagttacaggaatgttctccaagcagcaatccaaaagagtctcaaggat

SEQ ID NO: 875 - DNA, 1059 bp, Artificial Sequence
  Synthetic Polynucleotides
atggcccatttcccagggtttggacagagtcttcttttcggatacccagtctacgtgtttggagactgtgtacaaggcgactggtgccccatctctgggggactatgttcggcccgcctacatcgtcacgccctactggccacctgtccagagcatcagatcacctgggaccccatcgacggacgcgttatcggctcagctctacagttccttatccctcgactcccctccttccccacccagagaacctctaagaccctcaaggtccttaccccgccaatcactcatacaacccccaacattccaccctccttcctccaggccatgcgcaaatactcccccttccgaaatggatacatggaacccacccttgggcagcacctcccaaccctgtcttttccagaccccggactccggccccaaaacctgtacaccctctggggaggctccgttgtctgcatgtacctctaccagctttccccccccatcacctggcccctcctgccccacgtgattttttgccaccccggccagctcggggccttcctcaccaatgttccctacaagcgaatagaagaactcctctataaaatttccctcaccacaggggccctaataattctacccgaagactgtttgcccaccacccttttccagcctgctagggcacccgtcacgctaacagcctggcaaaacggcctccttccgttccactcaaccctcaccactccaggccttatttggacatttaccgatggcacgcctatgatttccgggccctgccctaaagatggccagccatctttagtactacagtcctcctcctttatatttcacaaatttcaaaccaaggcctaccacccctcatttctactctcacacggcctcatacagtactcttcctttcatagtttacatctcctgtttgaagaatacaccaacatccccatttctctactttttaacgaaaaagaggcagatgacaatgaccatgagccccaaatatcccccgggggcttagagcctcccagtgaaaaacatttccgagaaacagaagtc

SEQ ID NO: 876 - DNA, 1068 bp, Artificial Sequence
  Synthetic Polynucleotides
atggcgcactttccgggctttggacagtcactcctgtacggctatcccgtctatgtattcggtgattgtgtgcaagccgattggtgtccagtgtccggtggtctgtgcagtacacggcttcaccggcacgccctgctggcaacttgccccgaacaccagcttacatgggacccaatcgacggtcgcgtagtgtcttctcccctccagtatctgattcctagattgccttcctttccaacacagaggaccagccggaccctgaaggttctgaccccaccgactacaccagtgtcccccaaagtgcctcccgccttcttccaaagtatgagaaaacatactccctataggaatggctgcttggagccaaccctcggtgaccaactcccctcactcgccttccccgaacctggcctgcgcccacagaacatctatactacttggggcaagactgtggtatgcctttacctgtaccagctgagtcccccgatgacatggcccctcatcccccacgtcattttctgtcacccacggcagctgggagcgttccttaccaaagttccgctcaaacgcctggaggaactgctgtataagatgtttctgcacactggtgccgtgatcgtgctgcccgaggacgatctgcccaccacaatgttccagccggtgcgggctccttgcatccagactgcttggtgcacaggccttctgccttaccactccatactcacaacccctggtctgatctggaccttcaatgacggaagccctatgatttcaggaccttgtcccaaggctggacagccatctctggttgtgcagtcatctctgctcatcttcgagaaattccaaaccaaggcctttcatccatcctacctcctctcccatcagctgatacagtacagctccttccacaacttgcacctgctctttgatgaatatacgaatattccagtcagcatactcttcaacaagggcgaggccgatgataatggcgaccagccgcctgagcctgccgcacagggtgaaagctccacacagaaggtgcggccctcccatactaacaatccaaag

SEQ ID NO: 877 - DNA, 1068 bp, Artificial Sequence
  Synthetic Polynucleotides
atggcgcactttccgggctttggacagtcactcctgtacggctatcccgtctatgtattcggtgattgtgtgcaagccgattggtgtccagtgtccggtggtctgtgcagtacacggcttcaccggcacgccctgctggcaacttgccccgaacaccagcttacatgggacccaatcgacggtcgcgtagtgtcttctcccctccagtatctgattcctagattgccttcctttccaacacagaggaccagccggaccctgaaggttctgaccccaccgactacaccagtgtcccccaaagtgcctcccgccttcttccaaagtatgagaaaacatactccctataggaatggctgcttggagccaaccctcggtgaccaactcccctcactcgccttccccgaacctggcctgcgcccacagaacatctatactacttggggcaagactgtggtatgcctttacctgtaccagctgagtcccccgatgacatggcccctcatcccccacgtcattttctgtcacccacggcagctgggagcgttccttaccaaagttccgctcaaacgcctggaggaactgctgtataagatgtttctgcacactggtgccgtgatcgtgctgcccgaggacgatctgcccaccacaatgttccagccggtgcgggctccttgcatccagactgcttggtgcacaggccttctgccttaccactccatactcacaacccctggtctgatctggaccttcaatgacggaagccctatgatttcaggaccttgtcccaaggctggacagccatctctggttgtgcagtcatctctgctcatcttcgagaaattccaaaccaaggcctttcatccatcctacctcctctcccatcagctgatacagtacagctccttccacaacttgcacctgctctttgatgaatatacgaatattccagtcagcagaagcttcaacaagggcgaggccgatgataatggcgaccagccgcctgagcctgccgcacagggtgaaagctccacacagaaggtgcggccctcccatactaacaatccaaag

SEQ ID NO: 878 - DNA, 903 bp, Artificial Sequence
  Synthetic Polynucleotides
atgactagaggagtgcaggtggagactatctccccaggagacgggcgcaccttccccaagcgcggccagacctgcgtggtgcactacaccgggatgcttgaagatggaaagaaagttgattcctcccgggacagaaacaagccctttaagtttatgctaggcaagcaggaggtgatccgaggctgggaagaaggggttgcccagatgagtgtgggtcagagagccaaactgactatatctccagattatgcctatggtgccactgggcacccaggcatcatcccaccacatgccactctcgtcttcgatgtggagcttctaaaactggaagggatccacatggccacttacgaggttctctgtgaggtggcgcggaaactgggcacggatgacagggaagtggtattgttcctcctaaacgtgttcatacctcaacccacactggcccaattaattggagctcttagagctttaaaggaggagggcaggttaacgtttcccctgttagcggaatgtctgtttcgtgcaggtcgcagagacctcttgcgcgacctgcttcacttagacccgcgttttttagagcgccacctagcgggcacaatgagttatttcagcccttatcagctcactgttctccacgtagacggggagctgtgtgcgagggatattaggtctttgatatttttaagcaaggacactatagggtctcgcagcacaccacagacattcttacactgggtgtactgtatggaaaacttagacctactgggtcccactgacgtggatgccctaatgtcaatgcttagatctttgtcaagagtagacctacagcgccaagtgcaaaccctaatgggccttcacctttccggcccatcacactcccaacactatcgccatacacca

SEQ ID NO: 879 - DNA, 1224 bp, Artificial Sequence
  Synthetic Polynucleotides
atgggcgtccaagtcgaaaccattagtcccggcgatggcagaacatttcctaaaaggggacaaacatgtgtcgtccattatacaggcatgttggaggacggcaaaaaggtggacagtagtagagatcgcaataaacctttcaaattcatgttgggaaaacaagaagtcattaggggatgggaggagggcgtggctcaaatgtccgtcggccaacgcgctaagctcaccatcagccccgactacgcatacggcgctaccggacatcccggaattattccccctcacgctaccttggtgtttgacgtcgaactgttgaagctcgggactagaggagtgcaggtggagactatctccccaggagacgggcgcaccttccccaagcgcggccagacctgcgtggtgcactacaccgggatgcttgaagatggaaagaaagttgattcctcccgggacagaaacaagccctttaagtttatgctaggcaagcaggaggtgatccgaggctgggaagaaggggttgcccagatgagtgtgggtcagagagccaaactgactatatctccagattatgcctatggtgccactgggcacccaggcatcatcccaccacatgccactctcgtcttcgatgtggagcttctaaaactggaagggatccacatggccacttacgaggttctctgtgaggtggcgcggaaactgggcacggatgacagggaagtggtattgttcctcctaaacgtgttcatacctcaacccacactggcccaattaattggagctcttagagctttaaaggaggagggcaggttaacgtttcccctgttagcggaatgtctgtttcgtgcaggtcgcagagacctcttgcgcgacctgcttcacttagacccgcgttttttagagcgccacctagcgggcacaatgagttatttcagcccttatcagctcactgttctccacgtagacggggagctgtgtgcgagggatattaggtctttgatatttttaagcaaggacactatagggtctcgcagcacaccacagacattcttacactgggtgtactgtatggaaaacttagacctactgggtcccactgacgtggatgccctaatgtcaatgcttagatctttgtcaagagtagacctacagcgccaagtgcaaaccctaatgggccttcacctttccggcccatcacactcccaacactatcgccatacacca

SEQ ID NO: 880 - DNA, 1257 bp, Artificial Sequence; identical to SEQ ID NO: 860
  Synthetic Polynucleotides

SEQ ID NO: 881 - DNA, 1728 bp, Artificial Sequence
  Synthetic Polynucleotides
atgggcgtccaagtcgaaaccattagtcccggcgatggcagaacatttcctaaaaggggacaaacatgtgtcgtccattatacaggcatgttggaggacggcaaaaaggtggacagtagtagagatcgcaataaacctttcaaattcatgttgggaaaacaagaagtcattaggggatgggaggagggcgtggctcaaatgtccgtcggccaacgcgctaagctcaccatcagccccgactacgcatacggcgctaccggacatcccggaattattccccctcacgctaccttggtgtttgacgtcgaactgttgaagctcgggactagaggagtgcaggtggagactatctccccaggagacgggcgcaccttccccaagcgcggccagacctgcgtggtgcactacaccgggatgcttgaagatggaaagaaagttgattcctcccgggacagaaacaagccctttaagtttatgctaggcaagcaggaggtgatccgaggctgggaagaaggggttgcccagatgagtgtgggtcagagagccaaactgactatatctccagattatgcctatggtgccactgggcacccaggcatcatcccaccacatgccactctcgtcttcgatgtggagcttctaaaactggaagggatccacatggcgcactttccgggctttggacagtcactcctgtacggctatcccgtctatgtattcggtgattgtgtgcaagccgattggtgtccagtgtccggtggtctgtgcagtacacggcttcaccggcacgccctgctggcaacttgccccgaacaccagcttacatgggacccaatcgacggtcgcgtagtgtcttctcccctccagtatctgattcctagattgccttcctttccaacacagaggaccagccggaccctgaaggttctgaccccaccgactacaccagtgtcccccaaagtgcctcccgccttcttccaaagtatgagaaaacatactccctataggaatggctgcttggagccaaccctcggtgaccaactcccctcactcgccttccccgaacctggcctgcgcccacagaacatctatactacttggggcaagactgtggtatgcctttacctgtaccagctgagtcccccgatgacatggcccctcatcccccacgtcattttctgtcacccacggcagctgggagcgttccttaccaaagttccgctcaaacgcctggaggaactgctgtataagatgtttctgcacactggtgccgtgatcgtgctgcccgaggacgatctgcccaccacaatgttccagccggtgcgggctccttgcatccagactgcttggtgcacaggccttctgccttaccactccatactcacaacccctggtctgatctggaccttcaatgacggaagccctatgatttcaggaccttgtcccaaggctggacagccatctctggttgtgcagtcatctctgctcatcttcgagaaattccaaaccaaggcctttcatccatcctacctcctctcccatcagctgatacagtacagctccttccacaacttgcacctgctctttgatgaatatacgaatattccagtcagcagaagcttcaacaagggcgaggccgatgataatggcgaccagccgcctgagcctgccgcacagggtgaaagctccacacagaaggtgcggccctcccatactaacaatccaaag

SEQ ID NO: 882 - DNA, 1749 bp, Artificial Sequence
  Synthetic Polynucleotides
atgggcgtccaagtcgaaaccattagtcccggcgatggcagaacatttcctaaaaggggacaaacatgtgtcgtccattatacaggcatgttggaggacggcaaaaaggtggacagtagtagagatcgcaataaacctttcaaattcatgttgggaaaacaagaagtcattaggggatgggaggagggcgtggctcaaatgtccgtcggccaacgcgctaagctcaccatcagccccgactacgcatacggcgctaccggacatcccggaattattccccctcacgctaccttggtgtttgacgtcgaactgttgaagctcgggactagaggagtgcaggtggagactatctccccaggagacgggcgcaccttccccaagcgcggccagacctgcgtggtgcactacaccgggatgcttgaagatggaaagaaagttgattcctcccgggacagaaacaagccctttaagtttatgctaggcaagcaggaggtgatccgaggctgggaagaaggggttgcccagatgagtgtgggtcagagagccaaactgactatatctccagattatgcctatggtgccactgggcacccaggcatcatcccaccacatgccactctcgtcttcgatgtggagcttctaaaactggaagggatccgggcctacaaggacgacgatgacaaggcgcactttccgggctttggacagtcactcctgtacggctatcccgtctatgtattcggtgattgtgtgcaagccgattggtgtccagtgtccggtggtctgtgcagtacacggcttcaccggcacgccctgctggcaacttgccccgaacaccagcttacatgggacccaatcgacggtcgcgtagtgtcttctcccctccagtatctgattcctagattgccttcctttccaacacagaggaccagccggaccctgaaggttctgaccccaccgactacaccagtgtcccccaaagtgcctcccgccttcttccaaagtatgagaaaacatactccctataggaatggctgcttggagccaaccctcggtgaccaactcccctcactcgccttccccgaacctggcctgcgcccacagaacatctatactacttggggcaagactgtggtatgcctttacctgtaccagctgagtcccccgatgacatggcccctcatcccccacgtcattttctgtcacccacggcagctgggagcgttccttaccaaagttccgctcaaacgcctggaggaactgctgtataagatgtttctgcacactggtgccgtgatcgtgctgcccgaggacgatctgcccaccacaatgttccagccggtgcgggctccttgcatccagactgcttggtgcacaggccttctgccttaccactccatactcacaacccctggtctgatctggaccttcaatgacggaagccctatgatttcaggaccttgtcccaaggctggacagccatctctggttgtgcagtcatctctgctcatcttcgagaaattccaaaccaaggcctttcatccatcctacctcctctcccatcagctgatacagtacagctccttccacaacttgcacctgctctttgatgaatatacgaatattccagtcagcagaagcttcaacaagggcgaggccgatgataatggcgaccagccgcctgagcctgccgcacagggtgaaagctccacacagaaggtgcggccctcccatactaacaatccaaag

SEQ ID NO: 883 - DNA, 1200 bp, Artificial Sequence
  Synthetic Polynucleotides
atgctggaaggcgtgcaggtggaaaccatcagccctggcgacggcagaaccttccctaagaggggccagacctgcgtggtgcactacaccggaatgctggaagatggcaagaaggtggacagcagccgggaccggaacaagcccttcaagttcatgctgggcaagcaggaagtgatccggggctgggaagagggcgtggcccagatgtctgtgggccagagagccaagctgaccatctcccccgattacgcctacggcgctacaggccaccctggcatcattcctccacacgccacactggtgttcgacgtggaactgctgaagctggaaagcggcggaggcagcggagtggatggcttcggagatgtgggagccctggaaagcctgagaggcaacgccgacctggcctacatcctgagcatggaaccttgcggccactgcctgattatcaacaacgtgaacttctgccgcgagagcggcctgagaaccagaaccggcagcaacatcgactgcgagaagctgcggcggagattcagcagcctgcacttcatggtggaagtgaagggcgacctgaccgccaagaaaatggtgctggccctgctggaactggcccagcaggatcatggcgctctggactgctgtgtggtcgtgatcctgagccacggctgccaggcttcccatcttcagttccctggcgctgtgtacggcaccgatggctgtcctgtgtccgtggaaaagatcgtgaacatcttcaacggcaccagctgccccagcctgggcggaaagcccaagctgttctttattcaagcctgtggcggcgagcagaaggaccacggctttgaggtggcctccaccagccctgaggatgagagccctggcagcaaccctgagcctgacgccaccccattccaggaaggactgcggaccttcgaccagctggacgccatctctagcctgcccacccccagcgacatcttcgtgtcctacagcaccttccccggctttgtgtcctggcgggaccctaagagcggctcttggtacgtggaaaccctggacgacatctttgagcagtgggctcacagcgaggacctccagagcctgctgctgagagtggctaacgccgtgtccgtgaagggcatctacaagcagatgcctggctgcttcaacttcctgcggaagaagctgtttttcaagaccagc

SEQ ID NO: 884 - DNA, 363 bp, Artificial Sequence; identical to SEQ ID NO: 516
  Synthetic Polynucleotides

SEQ ID NO: 885 - DNA, 345 bp, Artificial Sequence; identical to SEQ ID NO: 513
  Synthetic Polynucleotides

SEQ ID NO: 886 - DNA, 810 bp, Artificial Sequence
  Synthetic Polynucleotides
atggattggatatggaggatactttttctcgtgggggcagcaaccggggctcattccgaggttcagttggtcgaatcaggcgggggcctcgtccaacccggcggaagcctgcggctgtcttgcgcagcaagtggtagtgtgttcaagatcaacgttatggcctggtatcgccaggctccgggaaaagggagagagctggttgcggggatcattagcggtggctccaccagctacgctgacagtgtgaagggaaggttcactatatcacgcgacaacgcaaagaatacattgtacctccagatgaatagcttgcggcccgaagacacggcagtctactattgtgcctttatcacaacagagagcgactatgacctgggccgccggtattgggggcagggaacccttgtgaccgtttcatccggcggaggcggaagtggaggcggaggatctggcggcggaggctctgaggtgcagctcgtggaatcaggcggaggtcttgtacagccaggaaattctcttcggctgtcttgcgccgcgagcgggttcaccttcagcagcttcggaatgagctgggtaagacaggcaccggggaaaggcctggagtgggtgagctcaatcagtgggagcgggtcagataccctgtacgcggattccgtgaagggcagattcacaatctctcgggacaatgctaagacaacactttaccttcagatgaactctctgcgacccgaggataccgctgtctactactgtacaataggaggttctctgtccagaagttctcaagggacactggtgaccgtctccagc

SEQ ID NO: 887 - DNA, 318 bp, Artificial Sequence
  Synthetic Polynucleotides
gagattgtactgactcagtctcccgctactctgtccctttcccccggcgaacgcgcgaccctctcatgctcagccagcatctctgtgtcttacatgtattggtatcagcaaaagcctgggcaagcgccaagactgctgatatacgacatgtccaacctggcaagcggcatcccggcgagattctccggatctggctcagggaccgattttacgctcactatcagttccttggagcctgaggatttcgcggtgtattactgtatgcagtggagcggttatccttacacatttggaggcggaactaaagtggagataaag

SEQ ID NO: 888 - DNA, 357 bp, Artificial Sequence
  Synthetic Polynucleotides
gaggtgcaactcgtggagtccggtggcggtctggtgcagccaggggggtccttgcgcctgagctgcgccgcttctgggtttacgttttccccattcgctatgtcctgggtccggcaggcgcccggtaaaggtctggaatgggtggcaaagatttccccaggggggtcttggacttattactccgacaccgtgacaggtcgatttaccatcagcagggataacgccaaaaacagcctctacctccagatgaactccttgcgagccgaagataccgccgtctattactgtgccaggcagctgtggggatactacgcgctggacatttgggggcagggaacaactgtgactgtatcctca

SEQ ID NO: 889 - DNA, 738 bp, Artificial Sequence
  Synthetic Polynucleotides
atggccctgcctgtgacagctctgctgctgcctctggcactgctgctgcacgccgccagacctgagatcgtgctgacacagagccctgccaccctgtctctgagccctggcgaaagagccaccctgagctgtagagccagccagagcgtgtccagctacctggcctggtatcagcagaagcccggccaggctccccggctgctgatctacgatgccagcaatagagccaccggcatccccgccagattttccggctctggcagcggcaccgacttcaccctgaccatcgaggacttcgccgtgtactactgccagcagagcaccttcggccagggcaccaaggtggaaatcaagggcggaggcggatctggcggcggaggatctgggggaggcggctctcaggtgtacctggtggaaagcggagggggcgtggtgcagcctggaagaagcctgagactgagctgtgccgccagcggcttcaccttcagcaactacggaatgcactgggtgcgccaggcccctggcaaaggactggaatgggtggccctgatttggtacgacggcagcaacaagtattacgccgacagcgtgaagggccggttcaccatcagccgggacaacagcaagaacaccctgtacctccagatgaccagcctgcgggtggaagataccgccgtgtattattgcgccagcaacgtggaccactggggccagggaacactcgtgaccgtgtctagc

SEQ ID NO: 890 - DNA, 759 bp, Artificial Sequence
  Synthetic Polynucleotides
atggccctgcctgtgacagctctgctgctgcctctggcactgctgctgcacgccgccagacctgagatcgtgctgacacagagccctgccaccctgtctctgagccctggcgaaagagccaccctgagctgtagagccagccagagcgtgtccagctacctggcctggtatcagcagaagcccggccaggctccccggctgctgatctacgatgccagcaatagagccaccggcatccccgccagattttccggctctggcagcggcaccgacttcaccctgaccatcagctccctggaacccgaggacttcgccgtgtactactgccagcagagcagcaactggccccggacctttggacagggcaccaaggtggaaatcaagggcggaggcggatctggcggcggaggatctgggggaggcggctctcaggtgcagctggtggaaagtgggggaggatggcagcctggcagaagcctgagactggactgcaaggccagcggcatcaccttcagcaacagcggaatgcactgggtgcgccaggcccctggaaagggactggaatgggtggccgtgatctatgacggcagcaagcggtactacgccgacagcgtgaagggccggttcatcagccgggacaacagcaagaataccctgttcctccagatgaacagcctgcgggccgaggacacagccgtgtattattgcgccaccaacgacgactactggggccagggaacactcgtgaccgtgtcctct

SEQ ID NO: 891 - DNA, 789 bp, Artificial Sequence
  Synthetic Polynucleotides
atggccctgcctgtgacagctctgctgctgcctctggcactgctgctgcacgccgccagacctgagatcgtgctgacacagagccctggcacactgtcactgtctccaggcgaaagagccacactgagctgtagagcctctcagagcgtgggcagctcttacctggcttggtatcagcagaagcccggacaggctcccagactgctgatctacggcgctttcagcagagccacaggcatccccgatagattttctggcagcggctccggcaccgacttcaccctgacaatcagcagactggaacccgaggacttcgccgtgtactactgtcagcagtacggcagcagcccttggacctttggacagggcaccaaggtggaaatcaagagaggcggaggcggaagtggaggcggaggatctggcggcggaggctctcaagtgcagctggttgaatcaggtggcggcgttgtgcagcctggcagaagtctgagactgtcttgtgccgccagcggcttcaccttcagcagctacacaatgcactgggtccgacaggcccctggcaaaggactggaatgggtcacctttatcagctacgacggcaacaacaagtattacgccgacagcgtgaagggcagattcaccatctccagagacaacagcaagaacaccctgtacctccagatgaacagcctgagagccgaggacaccgccatctactactgcgccagaacaggatggctgggacccttcgattattggggccagggcacactcgtgaccgtgtcatct

SEQ ID NO: 892 - DNA, 1128 bp, Artificial Sequence
  Synthetic Polynucleotides
atggccctgcctgtgacagctctgctgctgcctctggcactgctgctgcacgccgccagacctgagatcgtgctgacacagagccctgccaccctgtctctgagccctggcgaaagagccaccctgagctgtagagccagccagagcgtgtccagctacctggcctggtatcagcagaagcccggccaggctccccggctgctgatctacgatgccagcaatagagccaccggcatccccgccagattttccggctctggcagcggcaccgacttcaccctgaccatcgaggacttcgccgtgtactactgccagcagagcaccttcggccagggcaccaaggtggaaatcaagggcggaggcggatctggcggcggaggatctgggggaggcggctctcaggtgtacctggtggaaagcggagggggcgtggtgcagcctggaagaagcctgagactgagctgtgccgccagcggcttcaccttcagcaactacggaatgcactgggtgcgccaggcccctggcaaaggactggaatgggtggccctgatttggtacgacggcagcaacaagtattacgccgacagcgtgaagggccggttcaccatcagccgggacaacagcaagaacaccctgtacctccagatgaccagcctgcgggtggaagataccgccgtgtattattgcgccagcaacgtggaccactggggccagggaacactcgtgaccgtgtctagcggcggaggcggaagtggaggcggaggatctggcggcggaggctctgaggtgcagctcgtggaatcaggcggaggtcttgtacagccaggaaattctcttcggctgtcttgcgccgcgagcgggttcaccttcagcagcttcggaatgagctgggtaagacaggcaccggggaaaggcctggagtgggtgagctcaatcagtgggagcgggtcagataccctgtacgcggattccgtgaagggcagattcacaatctctcgggacaatgctaagacaacactttaccttcagatgaactctctgcgacccgaggataccgctgtctactactgtacaataggaggttctctgtccagaagttctcaagggacactggtgaccgtctccagc

SEQ ID NO: 893 - DNA, 1149 bp, Artificial Sequence
  Synthetic Polynucleotides
atggccctgcctgtgacagctctgctgctgcctctggcactgctgctgcacgccgccagacctgagatcgtgctgacacagagccctgccaccctgtctctgagccctggcgaaagagccaccctgagctgtagagccagccagagcgtgtccagctacctggcctggtatcagcagaagcccggccaggctccccggctgctgatctacgatgccagcaatagagccaccggcatccccgccagattttccggctctggcagcggcaccgacttcaccctgaccatcagctccctggaacccgaggacttcgccgtgtactactgccagcagagcagcaactggccccggacctttggacagggcaccaaggtggaaatcaagggcggaggcggatctggcggcggaggatctgggggaggcggctctcaggtgcagctggtggaaagtgggggaggatggcagcctggcagaagcctgagactggactgcaaggccagcggcatcaccttcagcaacagcggaatgcactgggtgcgccaggcccctggaaagggactggaatgggtggccgtgatctatgacggcagcaagcggtactacgccgacagcgtgaagggccggttcatcagccgggacaacagcaagaataccctgttcctccagatgaacagcctgcgggccgaggacacagccgtgtattattgcgccaccaacgacgactactggggccagggaacactcgtgaccgtgtcctctggcggaggcggaagtggaggcggaggatctggcggcggaggctctgaggtgcagctcgtggaatcaggcggaggtcttgtacagccaggaaattctcttcggctgtcttgcgccgcgagcgggttcaccttcagcagcttcggaatgagctgggtaagacaggcaccggggaaaggcctggagtgggtgagctcaatcagtgggagcgggtcagataccctgtacgcggattccgtgaagggcagattcacaatctctcgggacaatgctaagacaacactttaccttcagatgaactctctgcgacccgaggataccgctgtctactactgtacaataggaggttctctgtccagaagttctcaagggacactggtgaccgtctccagc

SEQ ID NO: 894 - DNA, 1179 bp, Artificial Sequence
  Synthetic Polynucleotides
atggccctgcctgtgacagctctgctgctgcctctggcactgctgctgcacgccgccagacctgagatcgtgctgacacagagccctggcacactgtcactgtctccaggcgaaagagccacactgagctgtagagcctctcagagcgtgggcagctcttacctggcttggtatcagcagaagcccggacaggctcccagactgctgatctacggcgctttcagcagagccacaggcatccccgatagattttctggcagcggctccggcaccgacttcaccctgacaatcagcagactggaacccgaggacttcgccgtgtactactgtcagcagtacggcagcagcccttggacctttggacagggcaccaaggtggaaatcaagagaggcggaggcggaagtggaggcggaggatctggcggcggaggctctcaagtgcagctggttgaatcaggtggcggcgttgtgcagcctggcagaagtctgagactgtcttgtgccgccagcggcttcaccttcagcagctacacaatgcactgggtccgacaggcccctggcaaaggactggaatgggtcacctttatcagctacgacggcaacaacaagtattacgccgacagcgtgaagggcagattcaccatctccagagacaacagcaagaacaccctgtacctccagatgaacagcctgagagccgaggacaccgccatctactactgcgccagaacaggatggctgggacccttcgattattggggccagggcacactcgtgaccgtgtcatctggcggaggcggaagtggaggcggaggatctggcggcggaggctctgaggtgcagctcgtggaatcaggcggaggtcttgtacagccaggaaattctcttcggctgtcttgcgccgcgagcgggttcaccttcagcagcttcggaatgagctgggtaagacaggcaccggggaaaggcctggagtgggtgagctcaatcagtgggagcgggtcagataccctgtacgcggattccgtgaagggcagattcacaatctctcgggacaatgctaagacaacactttaccttcagatgaactctctgcgacccgaggataccgctgtctactactgtacaataggaggttctctgtccagaagttctcaagggacactggtgaccgtctccagc

SEQ ID NO: 895 - DNA, 318 bp, Artificial Sequence; identical to SEQ ID NO: 887
  Synthetic Polynucleotides

SEQ ID NO: 896 - DNA, 357 bp, Artificial Sequence; identical to SEQ ID NO: 888
  Synthetic Polynucleotides

SEQ ID NO: 897 - DNA, 357 bp, Artificial Sequence; identical to SEQ ID NO: 167
  Synthetic Polynucleotides

SEQ ID NO: 898 - DNA, 321 bp, Artificial Sequence; identical to SEQ ID NO: 413
  Synthetic Polynucleotides

SEQ ID NO: 899 - DNA, 777 bp, Artificial Sequence
  Synthetic Polynucleotides
atggactggatttggcgcatccttttccttgtcggcgctgctaccggcgcgcattctgagattgtactgactcagtctcccgctactctgtccctttcccccggcgaacgcgcgaccctctcatgctcagccagcatctctgtgtcttacatgtattggtatcagcaaaagcctgggcaagcgccaagactgctgatatacgacatgtccaacctggcaagcggcatcccggcgagattctccggatctggctcagggaccgattttacgctcactatcagttccttggagcctgaggatttcgcggtgtattactgtatgcagtggagcggttatccttacacatttggaggcggaactaaagtggagataaagggcggtggcggttcaggtggagggggaagcggtggtggtggctcagaggtgcaactcgtggagtccggtggcggtctggtgcagccaggggggtccttgcgcctgagctgcgccgcttctgggtttacgttttccccattcgctatgtcctgggtccggcaggcgcccggtaaaggtctggaatgggtggcaaagatttccccaggggggtcttggacttattactccgacaccgtgacaggtcgatttaccatcagcagggataacgccaaaaacagcctctacctccagatgaactccttgcgagccgaagataccgccgtctattactgtgccaggcagctgtggggatactacgcgctggacatttgggggcagggaacaactgtgactgtatcctca

SEQ ID NO: 900 - DNA, 141 bp, Artificial Sequence
  Synthetic Polynucleotides
atggactggatttggcgcatccttttccttgtcggcgctgctaccggcgcgcattctggccacagaccactggacaagaagcgggaagaggcgccctccctgcgcccagctcctccacccatcagtgggggtggctacaga

SEQ ID NO: 901 - DNA, 558 bp, Artificial Sequence
  Synthetic Polynucleotides
atggccctgcctgtgacagctctgctgctgcctctggcactgctgctgcacgccgccagacctgcactgcctagctgcaaagaggacgagtaccctgtcggcagcgagtgctgtcctaagtgtagccctggctacagagtgaaagaagcctgcggagagctgaccggcaccgtgtgtgaaccttgtcctcctggcacctatatcgcccacctgaacggcctgagcaagtgcctgcagtgccagatgtgcgatcctgctatgggcctgagagccagcagaaactgcagcagaaccgagaatgccgtgtgcggctgttctcccggccacttctgtattgtgcaggacggcgatcactgcgccgcctgtagagcctatgccacatctagccctggacagcgggttcagaaaggcggcacagagtctcaggataccctgtgccagaattgccctccaggcacattcagccccaacggcacactggaagagtgccagcaccagaccaagtgtagctggctggtcacaaaagccggcgctggcacaagcagctctcattgggtg

SEQ ID NO: 902 - DNA, 948 bp, Artificial Sequence
  Synthetic Polynucleotides
atggccctgcctgtgacagctctgctgctgcctctggcactgctgctgcacgccgccagacctgcactgcctagctgcaaagaggacgagtaccctgtcggcagcgagtgctgtcctaagtgtagccctggctacagagtgaaagaagcctgcggagagctgaccggcaccgtgtgtgaaccttgtcctcctggcacctatatcgcccacctgaacggcctgagcaagtgcctgcagtgccagatgtgcgatcctgctatgggcctgagagccagcagaaactgcagcagaaccgagaatgccgtgtgcggctgttctcccggccacttctgtattgtgcaggacggcgatcactgcgccgcctgtagagcctatgccacatctagccctggacagcgggttcagaaaggcggcacagagtctcaggataccctgtgccagaattgccctccaggcacattcagccccaacggcacactggaagagtgccagcaccagaccaagtgtagctggctggtcacaaaagccggcgctggcacaagcagctctcattgggtgggcggaggcggaagtggaggcggaggatctggcggcggaggctctgaggtgcagctcgtggaatcaggcggaggtcttgtacagccaggaaattctcttcggctgtcttgcgccgcgagcgggttcaccttcagcagcttcggaatgagctgggtaagacaggcaccggggaaaggcctggagtgggtgagctcaatcagtgggagcgggtcagataccctgtacgcggattccgtgaagggcagattcacaatctctcgggacaatgctaagacaacactttaccttcagatgaactctctgcgacccgaggataccgctgtctactactgtacaataggaggttctctgtccagaagttctcaagggacactggtgaccgtctccagc

SEQ ID NO: 903 - DNA, 3399 bp, Artificial Sequence
  Synthetic Polynucleotides
atgccgcgcgctccccgctgccgagccgtgcgctccctgctgcgcagccactaccgcgaggtgctgccgctggccacgttcgtgcggcgcctggggccccagggctggcggctggtgcagcgcggggacccggcggctttccgcgcgctggtggcccagtgcctggtgtgcgtgccctgggacgcacggccgccccccgccgccccctccttccgccaggtgtcctgcctgaaggagctggtggcccgagtgctgcagaggctgtgcgagcgcggcgcgaagaacgtgctggccttcggcttcgcgctgctggacggggcccgcgggggcccccccgaggccttcaccaccagcgtgcgcagctacctgcccaacacggtgaccgacgcactgcgggggagcggggcgtgggggctgctgttgcgccgcgtgggcgacgacgtgctggttcacctgctggcacgctgcgcgctctttgtgctggtggctcccagctgcgcctaccaggtgtgcgggccgccgctgtaccagctcggcgctgccactcaggcccggcccccgccacacgctagtggaccccgaaggcgtctgggatgcgaacgggcctggaaccatagcgtcagggaggccggggtccccctgggcctgccagccccgggtgcgaggaggcgcgggggcagtgccagccgaagtctgccgttgcccaagaggcccaggcgtggcgctgcccctgagccggagcggacgcccgttgggcaggggtcctgggcccacccgggcaggacgcgtggaccgagtgaccgtggtttctgtgtggtgtcacctgccagacccgccgaagaagccacctctttggagggtgcgctctctggcacgcgccactcccacccatccgtgggccgccagcaccacgcgggccccccatccacatcgcggccaccacgtccctgggacacgccttgtcccccggtgtacgccgagaccaagcacttcctctactcctcaggcgacaaggagcagctgcggccctccttcctactcagctctctgaggcccagcctgactggcgctcggaggctcgtggagaccatctttctgggttccaggccctggatgccagggactccccgcaggttgccccgcctgccccagcgctactggcaaatgcggcccctgtttctggagctgcttgggaaccacgcgcagtgcccctacggggtgctcctcaagacgcactgcccgctgcgagctgcggtcaccccagcagccggtgtctgtgcccgggagaagccccagggctctgtggcggcccccgaggaggaggacacagacccccgtcgcctggtgcagctgctccgccagcacagcagcccctggcaggtgtacggcttcgtgcgggcctgcctgcgccggctggtgcccccaggcctctggggctccaggcacaacgaacgccgcttcctcaggaacaccaagaagttcatctccctggggaagcatgccaagctctcgctgcaggagctgacgtggaagatgagcgtgcggggctgcgcttggctgcgcaggagcccaggggttggctgtgttccggccgcagagcaccgtctgcgtgaggagatcctggccaagttcctgcactggctgatgagtgtgtacgtcgtcgagctgctcaggtctttcttttatgtcacggagaccacgtttcaaaagaacaggctctttttctaccggaagagtgtctggagcaagttgcaaagcattggaatcagacagcacttgaagagggtgcagctgcgggagctgtcggaagcagaggtcaggcagcatcgggaagccaggcccgccctgctgacgtccagactccgcttcatccccaagcctgacgggctgcggccgattgtgaacatggactacgtcgtgggagccagaacgttccgcagagaaaagagggccgagcgtctcacctcgagggtgaaggcactgttcagcgtgctcaactacgagcgggcgcggcgccccggcctcctgggcgcctctgtgctgggcctggacgatatccacagggcctggcgcaccttcgtgctgcgtgtgcgggcccaggacccgccgcctgagctgtactttgtcaaggtggatgtgacgggcgcgtacgacaccatcccccaggacaggctcacggaggtcatcgccagcatcatcaaaccccagaacacgtactgcgtgcgtcggtatgccgtggtccagaaggccgcccatgggcacgtccgcaaggccttcaagagccacgtctctaccttgacagacctccagccgtacatgcgacagttcgtggctcacctgcaggagaccagcccgctgagggatgccgtcgtcatcgagcagagctcctccctgaatgaggccagcagtggcctcttcgacgtcttcctacgcttcatgtgccaccacgccgtgcgcatcaggggcaagtcctacgtccagtgccaggggatcccgcagggctccatcctctccacgctgctctgcagcctgtgctacggcgacatggagaacaagctgtttgcggggattcggcgggacgggctgctcctgcgtttggtggatgatttcttgttggtgacacctcacctcacccacgcgaaaaccttcctcaggaccctggtccgaggtgtccctgagtatggctgcgtggtgaacttgcggaagacagtggtgaacttccctgtagaagacgaggccctgggtggcacggcttttgttcagatgccggcccacggcctattcccctggtgcggcctgctgctggatacccggaccctggaggtgcagagcgactactccagctatgcccggacctccatcagagccagtctcaccttcaaccgcggcttcaaggctgggaggaacatgcgtcgcaaactctttggggtcttgcggctgaagtgtcacagcctgtttctggatttgcaggtgaacagcctccagacggtgtgcaccaacatctacaagatcctcctgctgcaggcgtacaggtttcacgcatgtgtgctgcagctcccatttcatcagcaagtttggaagaaccccacatttttcctgcgcgtcatctctgacacggcctccctctgctactccatcctgaaagccaagaacgcagggatgtcgctgggggccaagggcgccgccggccctctgccctccgaggccgtgcagtggctgtgccaccaagcattcctgctcaagctgactcgacaccgtgtcacctacgtgccactcctggggtcactcaggacagcccagacgcagctgagtcggaagctcccggggacgacgctgactgccctggaggccgcagccaacccggcactgccctcagacttcaagaccatcctggactga

SEQ ID NO: 904 - DNA, 1632 bp, Artificial Sequence
  Synthetic Polynucleotides
atgctgctgcgctcgaagcctgcgctgccgccgccgctgatgctgctgctcctggggccgctgggtcccctctcccctggcgccctgccccgacctgcgcaagcacaggacgtcgtggacctggacttcttcacccaggagccgctgcacctggtgagcccctcgttcctgtccgtcaccattgacgccaacctggccacggacccgcggttcctcatcctcctgggttctccaaagcttcgtaccttggccagaggcttgtctcctgcgtacctgaggtttggtggcaccaagacagacttcctaattttcgatcccaagaaggaatcaacctttgaagagagaagttactggcaatctcaagtcaaccaggatatttgcaaatatggatccatccctcctgatgtggaggagaagttacggttggaatggccctaccaggagcaattgctactccgagaacactaccagaaaaagttcaagaacagcacctactcaagaagctctgtagatgtgctatacacttttgcaaactgctcaggactggacttgatctttggcctaaatgcgttattaagaacagcagatttgcagtggaacagttctaatgctcagttgctcctggactactgctcttccaaggggtataacatttcttgggaactaggcaatgaacctaacagtttccttaagaaggctgatattttcatcaatgggtcgcagttaggagaagattttattcaattgcataaacttctaagaaagtccaccttcaaaaatgcaaaactctatggtcctgatgttggtcagcctcgaagaaagacggctaagatgctgaagagcttcctgaaggctggtggagaagtgattgattcagttacatggcatcactactatttgaatggacggactgctaccaaggaagattttctaaaccctgatgtattggacatttttatttcatctgtgcaaaaagttttccaggtggttgagagcaccaggcctggcaagaaggtctggttaggagaaacaagctctgcatatggaggcggagcgcccttgctatccgacacctttgcagctggctttatgtggctggataaattgggcctgtcagcccgaatgggaatagaagtggtgatgaggcaagtattctttggagcaggaaactaccatttagtggatgaaaacttcgatcctttacctgattattggctatctcttctgttcaagaaattggtgggcaccaaggtgttaatggcaagcgtgcaaggttcaaagagaaggaagcttcgagtataccttcattgcacaaacactgacaatccaaggtataaagaaggagatttaactctgtatgccataaacctccataatgtcaccaagtacttgcggttaccctatcctttttctaacaagcaagtggataaataccttctaagacctttgggacctcatggattactttccaaatctgtccaactcaatggtctaactctaaagatggtggatgatcaaaccttgccacctttaatggaaaaacctctccggccaggaagttcactgggcttgccagctttctcatatagtttttttgtgataagaaatgccaaagttgctgcttgcatctga

SEQ ID NO: 905 - DNA, 7488 bp, Artificial Sequence
  Synthetic Polynucleotides
  misc_feature (3291)..(3294): n is a, c, g, or t
aatgtagtcttatgcaatactcttgtagtcttgcaacatggtaacgatgagttagcaacatgccttacaaggagagaaaaagcaccgtgcatgccgattggtggaagtaaggtggtacgatcgtgccttattaggaaggcaacagacgggtctgacatggattggacgaaccactgaattgccgcattgcagagatattgtatttaagtgcctagctcgatacataaacgggtctctctggttagaccagatctgagcctgggagctctctggctaactagggaacccactgcttaagcctcaataaagcttgccttgagtgcttcaagtagtgtgtgcccgtctgttgtgtgactctggtaactagagatccctcagacccttttagtcagtgtggaaaatctctagcagtggcgcccgaacagggacttgaaagcgaaagggaaaccagaggagctctctcgacgcaggactcggcttgctgaagcgcgcacggcaagaggcgaggggcggcgactggtgagtacgccaaaaattttgactagcggaggctagaaggagagagatgggtgcgagagcgtcagtattaagcgggggagaattagatcgcgatgggaaaaaattcggttaaggccagggggaaagaaaaaatataaattaaaacatatagtatgggcaagcagggagctagaacgattcgcagttaatcctggcctgttagaaacatcagaaggctgtagacaaatactgggacagctacaaccatcccttcagacaggatcagaagaacttagatcattatataatacagtagcaaccctctattgtgtgcatcaaaggatagagataaaagacaccaaggaagctttagacaagatagaggaagagcaaaacaaaagtaagaccaccgcacagcaagcggccgctgatcttcagacctggaggaggagatatgagggacaattggagaagtgaattatataaatataaagtagtaaaaattgaaccattaggagtagcacccaccaaggcaaagagaagagtggtgcagagagaaaaaagagcagtgggaataggagctttgttccttgggttcttgggagcagcaggaagcactatgggcgcagcgtcaatgacgctgacggtacaggccagacaattattgtctggtatagtgcagcagcagaacaatttgctgagggctattgaggcgcaacagcatctgttgcaactcacagtctggggcatcaagcagctccaggcaagaatcctggctgtggaaagatacctaaaggatcaacagctcctggggatttggggttgctctggaaaactcatttgcaccactgctgtgccttggaatgctagttggagtaataaatctctggaacagatttggaatcacacgacctggatggagtgggacagagaaattaacaattacacaagcttaatacactccttaattgaagaatcgcaaaaccagcaagaaaagaatgaacaagaattattggaattagataaatgggcaagtttgtggaattggtttaacataacaaattggctgtggtatataaaattattcataatgatagtaggaggcttggtaggtttaagaatagtttttgctgtactttctatagtgaatagagttaggcagggatattcaccattatcgtttcagacccacctcccaaccccgaggggacccgacaggcccgaaggaatagaagaagaaggtggagagagagacagagacagatccattcgattagtgaacggatctcgacggtatcggttaacttttaaaagaaaaggggggattggggggtacagtgcaggggaaagaatagtagacataatagcaacagacatacaaactaaagaattacaaaaacaaattacaaaattcaaaattttatcgataagctttgcaaagatggataaagttttaaacagagaggaatctttgcagctaatggaccttctaggtcttgaaaggagtgcctcgtgaggctccggtgcccgtcagtgggcagagcgcacatcgcccacagtccccgagaagttggggggaggggtcggcaattgaaccggtgcctagagaaggtggcgcggggtaaactgggaaagtgatgtcgtgtactggctccgcctttttcccgagggtgggggagaaccgtatataagtgcagtagtcgccgtgaacgttctttttcgcaacgggtttgccgccagaacacaggtaagtgccgtgtgtggttcccgcgggcctggcctctttacgggttatggcccttgcgtgccttgaattacttccacctggctgcagtacgtgattcttgatcccgagcttcgggttggaagtgggtgggagagttcgaggccttgcgcttaaggagccccttcgcctcgtgcttgagttgaggcctggcctgggcgctggggccgccgcgtgcgaatctggtggcaccttcgcgcctgtctcgctgctttcgataagtctctagccatttaaaatttttgatgacctgctgcgacgctttttttctggcaagatagtcttgtaaatgcgggccaagatctgcacactggtatttcggtttttggggccgcgggcggcgacggggcccgtgcgtcccagcgcacatgttcggcgaggcggggcctgcgagcgcggccaccgagaatcggacgggggtagtctcaagctggccggcctgctctggtgcctggcctcgcgccgccgtgtatcgccccgccctgggcggcaaggctggcccggtcggcaccagttgcgtgagcggaaagatggccgcttcccggccctgctgcagggagctcaaaatggaggacgcggcgctcgggagagcgggcgggtgagtcacccacacaaaggaaaagggcctttccgtcctcagccgtcgcttcatgtgactccacggagtaccgggcgccgtccaggcacctcgattagttctcgaccttttggagtacgtcgtctttaggttggggggaggggttttatgcgatggagtttccccacactgagtgggtggagactgaagttaggccagcttggcacttgatgtaattctccttggaatttgccctttttgagtttggatcttggttcattctcaagcctcagacagtggttcaaagtttttttcttccatttcaggtgtcgtgaggaattagcttggtactaatacgactcactatagggagacccaagctggctaggtaagcttgatatcgaattcctgcagcccgggggatctgctagcnnnngtcgactccggatgatcagggccctgtacagatatcgacaatcaacctctggattacaaaatttgtgaaagattgactggtattcttaactatgttgctccttttacgctatgtggatacgctgctttaatgcctttgtatcatgctattgcttcccgtatggctttcattttctcctccttgtataaatcctggttgctgtctctttatgaggagttgtggcccgttgtcaggcaacgtggcgtggtgtgcactgtgtttgctgacgcaacccccactggttggggcattgccaccacctgtcagctcctttccgggactttcgctttccccctccctattgccacggcggaactcatcgccgcctgccttgcccgctgctggacaggggctcggctgttgggcactgacaattccgtggtgttgtcggggaagctgacgtcctttccatggctgctcgcctgtgttgccacctggattctgcgcgggacgtccttctgctacgtcccttcggccctcaatccagcggaccttccttcccgcggcctgctgccggctctgcggcctcttccgcgtcttcgccttcgccctcagacgagtcggatctccctttgggccgcctccccgcctggaattcgagctcggtacctttaagaccaatgacttacaaggcagctgtagatcttagccactttttaaaagaaaaggggggactggaagggctaattcactcccaacgaagacaagatctgctttttgcttgtactgggtctctctggttagaccagatctgagcctgggagctctctggctaactagggaacccactgcttaagcctcaataaagcttgccttgagtgcttcaagtagtgtgtgcccgtctgttgtgtgactctggtaactagagatccctcagacccttttagtcagtgtggaaaatctctagcagtagtagttcatgtcatcttattattcagtatttataacttgcaaagaaatgaatatcagagagtgagaggaacttgtttattgcagcttataatggttacaaataaagcaatagcatcacaaatttcacaaataaagcatttttttcactgcattctagttgtggtttgtccaaactcatcaatgtatcttatcatgtctggctctagctatcccgcccctaactccgcccatcccgcccctaactccgcccagttccgcccattctccgccccatggctgactaattttttttatttatgcagaggccgaggccgcctcggcctctgagctattccagaagtagtgaggaggcttttttggaggcctagggacgtacccaattcgccctatagtgagtcgtattacgcgcgctcactggccgtcgttttacaacgtcgtgactgggaaaaccctggcgttacccaacttaatcgccttgcagcacatccccctttcgccagctggcgtaatagcgaagaggcccgcaccgatcgcccttcccaacagttgcgcagcctgaatggcgaatgggacgcgccctgtagcggcgcattaagcgcggcgggtgtggtggttacgcgcagcgtgaccgctacacttgccagcgccctagcgcccgctcctttcgctttcttcccttcctttctcgccacgttcgccggctttccccgtcaagctctaaatcgggggctccctttagggttccgatttagtgctttacggcacctcgaccccaaaaaacttgattagggtgatggttcacgtagtgggccatcgccctgatagacggtttttcgccctttgacgttggagtccacgttctttaatagtggactcttgttccaaactggaacaacactcaaccctatctcggtctattcttttgatttataagggattttgccgatttcggcctattggttaaaaaatgagctgatttaacaaaaatttaacgcgaattttaacaaaatattaacgcttacaatttaggtggcacttttcggggaaatgtgcgcggaacccctatttgtttatttttctaaatacattcaaatatgtatccgctcatgagacaataaccctgataaatgcttcaataatattgaaaaaggaagagtatgagtattcaacatttccgtgtcgcccttattcccttttttgcggcattttgccttcctgtttttgctcacccagaaacgctggtgaaagtaaaagatgctgaagatcagttgggtgcacgagtgggttacatcgaactggatctcaacagcggtaagatccttgagagttttcgccccgaagaacgttttccaatgatgagcacttttaaagttctgctatgtggcgcggtattatcccgtattgacgccgggcaagagcaactcggtcgccgcatacactattctcagaatgacttggttgagtactcaccagtcacagaaaagcatcttacggatggcatgacagtaagagaattatgcagtgctgccataaccatgagtgataacactgcggccaacttacttctgacaacgatcggaggaccgaaggagctaaccgcttttttgcacaacatgggggatcatgtaactcgccttgatcgttgggaaccggagctgaatgaagccataccaaacgacgagcgtgacaccacgatgcctgtagcaatggcaacaacgttgcgcaaactattaactggcgaactacttactctagcttcccggcaacaattaatagactggatggaggcggataaagttgcaggaccacttctgcgctcggcccttccggctggctggtttattgctgataaatctggagccggtgagcgtgggtctcgcggtatcattgcagcactggggccagatggtaagccctcccgtatcgtagttatctacacgacggggagtcaggcaactatggatgaacgaaatagacagatcgctgagataggtgcctcactgattaagcattggtaactgtcagaccaagtttactcatatatactttagattgatttaaaacttcatttttaatttaaaaggatctaggtgaagatcctttttgataatctcatgaccaaaatcccttaacgtgagttttcgttccactgagcgtcagaccccgtagaaaagatcaaaggatcttcttgagatcctttttttctgcgcgtaatctgctgcttgcaaacaaaaaaaccaccgctaccagcggtggtttgtttgccggatcaagagctaccaactctttttccgaaggtaactggcttcagcagagcgcagataccaaatactgttcttctagtgtagccgtagttaggccaccacttcaagaactctgtagcaccgcctacatacctcgctctgctaatcctgttaccagtggctgctgccagtggcgataagtcgtgtcttaccgggttggactcaagacgatagttaccggataaggcgcagcggtcgggctgaacggggggttcgtgcacacagcccagcttggagcgaacgacctacaccgaactgagatacctacagcgtgagctatgagaaagcgccacgcttcccgaagggagaaaggcggacaggtatccggtaagcggcagggtcggaacaggagagcgcacgagggagcttccagggggaaacgcctggtatctttatagtcctgtcgggtttcgccacctctgacttgagcgtcgatttttgtgatgctcgtcaggggggcggagcctatggaaaaacgccagcaacgcggcctttttacggttcctggccttttgctggccttttgctcacatgttctttcctgcgttatcccctgattctgtggataaccgtattaccgcctttgagtgagctgataccgctcgccgcagccgaacgaccgagcgcagcgagtcagtgagcgaggaagcggaagagcgcccaatacgcaaaccgcctctccccgcgcgttggccgattcattaatgcagctggcacgacaggtttcccgactggaaagcgggcagtgagcgcaacgcaattaatgtgagttagctcactcattaggcaccccaggctttacactttatgcttccggctcgtatgttgtgtggaattgtgagcggataacaatttcacacaggaaacagctatgaccatgattacgccaagcgcgcaattaaccctcactaaagggaacaaaagctggagctgcaagctt

SEQ ID NO: 906 - DNA, 6887 bp, Artificial Sequence
  Synthetic Polynucleotides
  misc_feature (3291)..(3294): n is a, c, g, or t
aatgtagtcttatgcaatactcttgtagtcttgcaacatggtaacgatgagttagcaacatgccttacaaggagagaaaaagcaccgtgcatgccgattggtggaagtaaggtggtacgatcgtgccttattaggaaggcaacagacgggtctgacatggattggacgaaccactgaattgccgcattgcagagatattgtatttaagtgcctagctcgatacataaacgggtctctctggttagaccagatctgagcctgggagctctctggctaactagggaacccactgcttaagcctcaataaagcttgccttgagtgcttcaagtagtgtgtgcccgtctgttgtgtgactctggtaactagagatccctcagacccttttagtcagtgtggaaaatctctagcagtggcgcccgaacagggacttgaaagcgaaagggaaaccagaggagctctctcgacgcaggactcggcttgctgaagcgcgcacggcaagaggcgaggggcggcgactggtgagtacgccaaaaattttgactagcggaggctagaaggagagagatgggtgcgagagcgtcagtattaagcgggggagaattagatcgcgatgggaaaaaattcggttaaggccagggggaaagaaaaaatataaattaaaacatatagtatgggcaagcagggagctagaacgattcgcagttaatcctggcctgttagaaacatcagaaggctgtagacaaatactgggacagctacaaccatcccttcagacaggatcagaagaacttagatcattatataatacagtagcaaccctctattgtgtgcatcaaaggatagagataaaagacaccaaggaagctttagacaagatagaggaagagcaaaacaaaagtaagaccaccgcacagcaagcggccgctgatcttcagacctggaggaggagatatgagggacaattggagaagtgaattatataaatataaagtagtaaaaattgaaccattaggagtagcacccaccaaggcaaagagaagagtggtgcagagagaaaaaagagcagtgggaataggagctttgttccttgggttcttgggagcagcaggaagcactatgggcgcagcgtcaatgacgctgacggtacaggccagacaattattgtctggtatagtgcagcagcagaacaatttgctgagggctattgaggcgcaacagcatctgttgcaactcacagtctggggcatcaagcagctccaggcaagaatcctggctgtggaaagatacctaaaggatcaacagctcctggggatttggggttgctctggaaaactcatttgcaccactgctgtgccttggaatgctagttggagtaataaatctctggaacagatttggaatcacacgacctggatggagtgggacagagaaattaacaattacacaagcttaatacactccttaattgaagaatcgcaaaaccagcaagaaaagaatgaacaagaattattggaattagataaatgggcaagtttgtggaattggtttaacataacaaattggctgtggtatataaaattattcataatgatagtaggaggcttggtaggtttaagaatagtttttgctgtactttctatagtgaatagagttaggcagggatattcaccattatcgtttcagacccacctcccaaccccgaggggacccgacaggcccgaaggaatagaagaagaaggtggagagagagacagagacagatccattcgattagtgaacggatctcgacggtatcggttaacttttaaaagaaaaggggggattggggggtacagtgcaggggaaagaatagtagacataatagcaacagacatacaaactaaagaattacaaaaacaaattacaaaattcaaaattttatcgataagctttgcaaagatggataaagttttaaacagagaggaatctttgcagctaatggaccttctaggtcttgaaaggagtgcctcgtgaggctccggtgcccgtcagtgggcagagcgcacatcgcccacagtccccgagaagttggggggaggggtcggcaattgaaccggtgcctagagaaggtggcgcggggtaaactgggaaagtgatgtcgtgtactggctccgcctttttcccgagggtgggggagaaccgtatataagtgcagtagtcgccgtgaacgttctttttcgcaacgggtttgccgccagaacacaggtaagtgccgtgtgtggttcccgcgggcctggcctctttacgggttatggcccttgcgtgccttgaattacttccacctggctgcagtacgtgattcttgatcccgagcttcgggttggaagtgggtgggagagttcgaggccttgcgcttaaggagccccttcgcctcgtgcttgagttgaggcctggcctgggcgctggggccgccgcgtgcgaatctggtggcaccttcgcgcctgtctcgctgctttcgataagtctctagccatttaaaatttttgatgacctgctgcgacgctttttttctggcaagatagtcttgtaaatgcgggccaagatctgcacactggtatttcggtttttggggccgcgggcggcgacggggcccgtgcgtcccagcgcacatgttcggcgaggcggggcctgcgagcgcggccaccgagaatcggacgggggtagtctcaagctggccggcctgctctggtgcctggcctcgcgccgccgtgtatcgccccgccctgggcggcaaggctggcccggtcggcaccagttgcgtgagcggaaagatggccgcttcccggccctgctgcagggagctcaaaatggaggacgcggcgctcgggagagcgggcgggtgagtcacccacacaaaggaaaagggcctttccgtcctcagccgtcgcttcatgtgactccacggagtaccgggcgccgtccaggcacctcgattagttctcgaccttttggagtacgtcgtctttaggttggggggaggggttttatgcgatggagtttccccacactgagtgggtggagactgaagttaggccagcttggcacttgatgtaattctccttggaatttgccctttttgagtttggatcttggttcattctcaagcctcagacagtggttcaaagtttttttcttccatttcaggtgtcgtgaggaattagcttggtactaatacgactcactatagggagacccaagctggctaggtaagcttgatatcgaattcctgcagcccgggggatctgctagcnnnngtcgacggcgaatccggactatagtgtcacctaaatgctagacgtacctttaagaccaatgacttacaaggcagctgtagatcttagccactttttaaaagaaaaggggggactggaagggctaattcactcccaacgaagacaagatctgctttttgcttgtactgggtctctctggttagaccagatctgagcctgggagctctctggctaactagggaacccactgcttaagcctcaataaagcttgccttgagtgcttcaagtagtgtgtgcccgtctgttgtgtgactctggtaactagagatccctcagacccttttagtcagtgtggaaaatctctagcagtagtagttcatgtcatcttattattcagtatttataacttgcaaagaaatgaatatcagagagtgagaggaacttgtttattgcagcttataatggttacaaataaagcaatagcatcacaaatttcacaaataaagcatttttttcactgcattctagttgtggtttgtccaaactcatcaatgtatcttatcatgtctggctctagctatcccgcccctaactccgcccatcccgcccctaactccgcccagttccgcccattctccgccccatggctgactaattttttttatttatgcagaggccgaggccgcctcggcctctgagctattccagaagtagtgaggaggcttttttggaggcctagggacgtacccaattcgccctatagtgagtcgtattacgcgcgctcactggccgtcgttttacaacgtcgtgactgggaaaaccctggcgttacccaacttaatcgccttgcagcacatccccctttcgccagctggcgtaatagcgaagaggcccgcaccgatcgcccttcccaacagttgcgcagcctgaatggcgaatgggacgcgccctgtagcggcgcattaagcgcggcgggtgtggtggttacgcgcagcgtgaccgctacacttgccagcgccctagcgcccgctcctttcgctttcttcccttcctttctcgccacgttcgccggctttccccgtcaagctctaaatcgggggctccctttagggttccgatttagtgctttacggcacctcgaccccaaaaaacttgattagggtgatggttcacgtagtgggccatcgccctgatagacggtttttcgccctttgacgttggagtccacgttctttaatagtggactcttgttccaaactggaacaacactcaaccctatctcggtctattcttttgatttataagggattttgccgatttcggcctattggttaaaaaatgagctgatttaacaaaaatttaacgcgaattttaacaaaatattaacgcttacaatttaggtggcacttttcggggaaatgtgcgcggaacccctatttgtttatttttctaaatacattcaaatatgtatccgctcatgagacaataaccctgataaatgcttcaataatattgaaaaaggaagagtatgagtattcaacatttccgtgtcgcccttattcccttttttgcggcattttgccttcctgtttttgctcacccagaaacgctggtgaaagtaaaagatgctgaagatcagttgggtgcacgagtgggttacatcgaactggatctcaacagcggtaagatccttgagagttttcgccccgaagaacgttttccaatgatgagcacttttaaagttctgctatgtggcgcggtattatcccgtattgacgccgggcaagagcaactcggtcgccgcatacactattctcagaatgacttggttgagtactcaccagtcacagaaaagcatcttacggatggcatgacagtaagagaattatgcagtgctgccataaccatgagtgataacactgcggccaacttacttctgacaacgatcggaggaccgaaggagctaaccgcttttttgcacaacatgggggatcatgtaactcgccttgatcgttgggaaccggagctgaatgaagccataccaaacgacgagcgtgacaccacgatgcctgtagcaatggcaacaacgttgcgcaaactattaactggcgaactacttactctagcttcccggcaacaattaatagactggatggaggcggataaagttgcaggaccacttctgcgctcggcccttccggctggctggtttattgctgataaatctggagccggtgagcgtgggtctcgcggtatcattgcagcactggggccagatggtaagccctcccgtatcgtagttatctacacgacggggagtcaggcaactatggatgaacgaaatagacagatcgctgagataggtgcctcactgattaagcattggtaactgtcagaccaagtttactcatatatactttagattgatttaaaacttcatttttaatttaaaaggatctaggtgaagatcctttttgataatctcatgaccaaaatcccttaacgtgagttttcgttccactgagcgtcagaccccgtagaaaagatcaaaggatcttcttgagatcctttttttctgcgcgtaatctgctgcttgcaaacaaaaaaaccaccgctaccagcggtggtttgtttgccggatcaagagctaccaactctttttccgaaggtaactggcttcagcagagcgcagataccaaatactgttcttctagtgtagccgtagttaggccaccacttcaagaactctgtagcaccgcctacatacctcgctctgctaatcctgttaccagtggctgctgccagtggcgataagtcgtgtcttaccgggttggactcaagacgatagttaccggataaggcgcagcggtcgggctgaacggggggttcgtgcacacagcccagcttggagcgaacgacctacaccgaactgagatacctacagcgtgagctatgagaaagcgccacgcttcccgaagggagaaaggcggacaggtatccggtaagcggcagggtcggaacaggagagcgcacgagggagcttccagggggaaacgcctggtatctttatagtcctgtcgggtttcgccacctctgacttgagcgtcgatttttgtgatgctcgtcaggggggcggagcctatggaaaaacgccagcaacgcggcctttttacggttcctggccttttgctggccttttgctcacatgttctttcctgcgttatcccctgattctgtggataaccgtattaccgcctttgagtgagctgataccgctcgccgcagccgaacgaccgagcgcagcgagtcagtgagcgaggaagcggaagagcgcccaatacgcaaaccgcctctccccgcgcgttggccgattcattaatgcagctggcacgacaggtttcccgactggaaagcgggcagtgagcgcaacgcaattaatgtgagttagctcactcattaggcaccccaggctttacactttatgcttccggctcgtatgttgtgtggaattgtgagcggataacaatttcacacaggaaacagctatgaccatgattacgccaagcgcgcaattaaccctcactaaagggaacaaaagctggagctgcaagctt

SEQ ID NO: 907 - DNA, 5150 bp, Artificial Sequence
  Synthetic Polynucleotides
tgaaagaccccacctgtaggtttggcaagctagcttaagtaacgccattttgcaaggcatggaaaatacataactgagaatagagaagttcagatcaaggttaggaacagagagacagcagaatatgggccaaacaggatatctgtggtaagcagttcctgccccggctcagggccaagaacagatggtccccagatgcggtcccgccctcagcagtttctagagaaccatcagatgtttccagggtgccccaaggacctgaaatgaccctgtgccttatttgaactaaccaatcagttcgcttctcgcttctgttcgcgcgcttctgctccccgagctcaataaaagagcccacaacccctcactcggcgcgccagtcctccgatagactgcgtcgcccgggtacccgtattcccaataaagcctcttgctgtttgcatccgaatcgtggactcgctgatccttgggagggtctcctcagattgattgactgcccacctcgggggtctttcatttggaggttccaccgagatttggagacccctgcccagggaccaccgacccccccgccgggaggtaagctggccagcggtcgtttcgtgtctgtctctgtctttgtgcgtgtttgtgccggcatctaatgtttgcgcctgcgtctgtactagttagctaactagctctgtatctggcggacccgtggtggaactgacgagttctgaacacccggccgcaaccctgggagacgtcccagggactttgggggccgtttttgtggcccgacctgaggaagggagtcgatgtggaatccgaccccgtcaggatatgtggttctggtaggagacgagaacctaaaacagttcccgcctccgtctgaatttttgctttcggtttggaaccgaagccgcgcgtcttgtctgctgcagcgctgcagcatcgttctgtgttgtctctgtctgactgtgtttctgtatttgtctgaaaattagggccagactgttaccactcccttaagtttgaccttaggtcactggaaagatgtcgagcggatcgctcacaaccagtcggtagatgtcaagaagagacgttgggttaccttctgctctgcagaatggccaacctttaacgtcggatggccgcgagacggcacctttaaccgagacctcatcacccaggttaagatcaaggtcttttcacctggcccgcatggacacccagaccaggtcccctacatcgtgacctgggaagccttggcttttgacccccctccctgggtcaagccctttgtacaccctaagcctccgcctcctcttcctccatccgccccgtctctcccccttgaacctcctcgttcgaccccgcctcgatcctccctttatccagccctcactccttctctaggcgccggaattagatctcctaggatccaagaattcggctcgagttcgaagggacgcgtaatgtcgacatcgataaaataaaagattttatttagtctccagaaaaaggggggaatgaaagaccccacctgtaggtttggcaagctagcttaagtaacgccattttgcaaggcatggaaaatacataactgagaatagagaagttcagatcaaggttaggaacagagagacagcagaatatgggccaaacaggatatctgtggtaagcagttcctgccccggctcagggccaagaacagatggtccccagatgcggtcccgccctcagcagtttctagagaaccatcagatgtttccagggtgccccaaggacctgaaatgaccctgtgccttatttgaactaaccaatcagttcgcttctcgcttctgttcgcgcgcttctgctccccgagctcaataaaagagcccacaacccctcactcggcgcgccagtcctccgatagactgcgtcgcccgggtacccgtgtatccaataaaccctcttgcagttgcatccgacttgtggtctcgctgttccttgggagggtctcctctgagtgattgactacccgtcagcgggggtctttcatgggtaacagtttcttgaagttggagaacaacattctgagggtaggagtcgaatattaagtaatcctgactcaattagccactgttttgaatccacatactccaatactcctgaaatagttcattatggacagcgcagaagagctggggagaattaattcgtaatcatggtcatagctgtttcctgtgtgaaattgttatccgctcacaattccacacaacatacgagccggaagcataaagtgtaaagcctggggtgcctaatgagtgagctaactcacattaattgcgttgcgctcactgcccgctttccagtcgggaaacctgtcgtgccagctgcattaatgaatcggccaacgcgcggggagaggcggtttgcgtattgggcgctcttccgcttcctcgctcactgactcgctgcgctcggtcgttcggctgcggcgagcggtatcagctcactcaaaggcggtaatacggttatccacagaatcaggggataacgcaggaaagaacatgtgagcaaaaggccagcaaaaggccaggaaccgtaaaaaggccgcgttgctggcgtttttccataggctccgcccccctgacgagcatcacaaaaatcgacgctcaagtcagaggtggcgaaacccgacaggactataaagataccaggcgtttccccctggaagctccctcgtgcgctctcctgttccgaccctgccgcttaccggatacctgtccgcctttctcccttcgggaagcgtggcgctttctcatagctcacgctgtaggtatctcagttcggtgtaggtcgttcgctccaagctgggctgtgtgcacgaaccccccgttcagcccgaccgctgcgccttatccggtaactatcgtcttgagtccaacccggtaagacacgacttatcgccactggcagcagccactggtaacaggattagcagagcgaggtatgtaggcggtgctacagagttcttgaagtggtggcctaactacggctacactagaaggacagtatttggtatctgcgctctgctgaagccagttaccttcggaaaaagagttggtagctcttgatccggcaaacaaaccaccgctggtagcggtggtttttttgtttgcaagcagcagattacgcgcagaaaaaaaggatctcaagaagatcctttgatcttttctacggggtctgacgctcagtggaacgaaaactcacgttaagggattttggtcatgagattatcaaaaaggatcttcacctagatccttttaaattaaaaatgaagttttaaatcaatctaaagtatatatgagtaaacttggtctgacagttaccaatgcttaatcagtgaggcacctatctcagcgatctgtctatttcgttcatccatagttgcctgactccccgtcgtgtagataactacgatacgggagggcttaccatctggccccagtgctgcaatgataccgcgagacccacgctcaccggctccagatttatcagcaataaaccagccagccggaagggccgagcgcagaagtggtcctgcaactttatccgcctccatccagtctattaattgttgccgggaagctagagtaagtagttcgccagttaatagtttgcgcaacgttgttgccattgctacaggcatcgtggtgtcacgctcgtcgtttggtatggcttcattcagctccggttcccaacgatcaaggcgagttacatgatcccccatgttgtgcaaaaaagcggttagctccttcggtcctccgatcgttgtcagaagtaagttggccgcagtgttatcactcatggttatggcagcactgcataattctcttactgtcatgccatccgtaagatgcttttctgtgactggtgagtactcaaccaagtcattctgagaatagtgtatgcggcgaccgagttgctcttgcccggcgtcaatacgggataataccgcgccacatagcagaactttaaaagtgctcatcattggaaaacgttcttcggggcgaaaactctcaaggatcttaccgctgttgagatccagttcgatgtaacccactcgtgcacccaactgatcttcagcatcttttactttcaccagcgtttctgggtgagcaaaaacaggaaggcaaaatgccgcaaaaaagggaataagggcgacacggaaatgttgaatactcatactcttcctttttcaatattattgaagcatttatcagggttattgtctcatgagcggatacatatttgaatgtatttagaaaaataaacaaataggggttccgcgcacatttccccgaaaagtgccacctgacgtctaagaaaccattattatcatgacattaacctataaaaataggcgtatcacgaggccctttcgtctcgcgcgtttcggtgatgacggtgaaaacctctgacacatgcagctcccggagacggtcacagcttgtctgtaagcggatgccgggagcagacaagcccgtcagggcgcgtcagcgggtgttggcgggtgtcggggctggcttaactatgcggcatcagagcagattgtactgagagtgcaccatatgcggtgtgaaataccgcacagatgcgtaaggagaaaataccgcatcaggcgccattcgccattcaggctgcgcaactgttgggaagggcgatcggtgcgggcctcttcgctattacgccagctggcgaaagggggatgtgctgcaaggcgattaagttgggtaacgccagggttttcccagtcacgacgttgtaaaacgacggcgcaaggaatggtgcatgcaaggagatggcgcccaacagtcccccggccacggggcctgccaccatacccacgccgaaacaagcgctcatgagcccgaagtggcgagcccgatcttccccatcggtgatgtcggcgatataggcgccagcaaccgcacctgtggcgccggtgatgccggccacgatgcgtccggcgtagaggcgattagtccaatttgttaaagacaggatatcagtggtccaggctctagttttgactcaacaatatcaccagctgaagcctatagagtacgagccatagataaaataaaagattttatttagtctccagaaaaaggggggaa

SEQ ID NO: 908 - DNA, 5857 bp, Artificial Sequence
  Synthetic Polynucleotides
aattttaacaaaatattaacgcttacaatttcctgatgcggtattttctccttacgcatctgtgcggtatttcacaccgcatcaggtggcacttttcggggaaatgtgcgcggaacccctatttgtttatttttctaaatacattcaaatatgtatccgctcatgagacaataaccctgataaatgcttcaataatattgaaaaaggaagagtatgagtattcaacatttccgtgtcgcccttattcccttttttgcggcattttgccttcctgtttttgctcacccagaaacgctggtgaaagtaaaagatgctgaagatcagttgggtgcacgagtgggttacatcgaactggatctcaacagcggtaagatccttgagagttttcgccccgaagaacgttttccaatgatgagcacttttaaagttctgctatgtggcgcggtattatcccgtattgacgccgggcaagagcaactcggtcgccgcatacactattctcagaatgacttggttgagtactcaccagtcacagaaaagcatcttacggatggcatgacagtaagagaattatgcagtgctgccataaccatgagtgataacactgcggccaacttacttctgacaacgatcggaggaccgaaggagctaaccgcttttttgcacaacatgggggatcatgtaactcgccttgatcgttgggaaccggagctgaatgaagccataccaaacgacgagcgtgacaccacgatgcctgtagcaatggcaacaacgttgcgcaaactattaactggcgaactacttactctagcttcccggcaacaattaatagactggatggaggcggataaagttgcaggaccacttctgcgctcggcccttccggctggctggtttattgctgataaatctggagccggtgagcgtgggtctcgcggtatcattgcagcactggggccagatggtaagccctcccgtatcgtagttatctacacgacggggagtcaggcaactatggatgaacgaaatagacagatcgctgagataggtgcctcactgattaagcattggtaactgtcagaccaagtttactcatatatactttagattgatttaaaacttcatttttaatttaaaaggatctaggtgaagatcctttttgataatctcatgaccaaaatcccttaacgtgagttttcgttccactgagcgtcagaccccgtagaaaagatcaaaggatcttcttgagatcctttttttctgcgcgtaatctgctgcttgcaaacaaaaaaaccaccgctaccagcggtggtttgtttgccggatcaagagctaccaactctttttccgaaggtaactggcttcagcagagcgcagataccaaatactgttcttctagtgtagccgtagttaggccaccacttcaagaactctgtagcaccgcctacatacctcgctctgctaatcctgttaccagtggctgctgccagtggcgataagtcgtgtcttaccgggttggactcaagacgatagttaccggataaggcgcagcggtcgggctgaacggggggttcgtgcacacagcccagcttggagcgaacgacctacaccgaactgagatacctacagcgtgagctatgagaaagcgccacgcttcccgaagggagaaaggcggacaggtatccggtaagcggcagggtcggaacaggagagcgcacgagggagcttccagggggaaacgcctggtatctttatagtcctgtcgggtttcgccacctctgacttgagcgtcgatttttgtgatgctcgtcaggggggcggagcctatggaaaaacgccagcaacgcggcctttttacggttcctggccttttgctggccttttgctcacatgttctttcctgcgttatcccctgattctgtggataaccgtattaccgcctttgagtgagctgataccgctcgccgcagccgaacgaccgagcgcagcgagtcagtgagcgaggaagcggatccctatacagttgaagtcggaagtttacatacaccttagccaaatacatttaaactcactttttcacaattcctgacatttaatcctagtaaaaattccctgtcttaggtcagttaggatcaccactttattttaagaatgtgaaatatcagaataatagtagagagaatgattcatttcagcttttatttctttcatcacattcccagtgggtcagaagtttacatacactcgactcctctgcagaatgcggcgatgtttcggtaaggggtcccgagtagctagttcatggcagccagcatatggcatatgttgccaaactctaaaccaaatactcattctgatgttttaaatgatttgccctcccatatgtccttccgagtgagagacacaaaaaattccaacacactattgcaatgaaaataaatttcctttattagccagaagtcagatgctcaaggggcttcatgatgtccccataatttttggcagagggaaaaagatctcagtggtatttgtgagccagggcattggccacaccagccaccaccttctgataggcagcctgcacctgaggagtgaattcacgacaggccttcgaatcaggcaccgggcttgcgggtcatgcaccaggtgcgcggtccttcgggcacctcgacgtcggcggtgacggtgaagccgagccgctcgtagaaggggaggttgcggggcgcggaggtctccaggaaggcgggcaccccggcgcgctcggccgcctccactccggggagcacgacggcgctgcccagacccttgccctggtggtcgggcgagacgccgacggtggccaggaaccacgcgggctccttgggccggtgcggcgccaggaggccttccatctgttgctgcgcggccagccgggaaccgctcaactcggccatgcgcgggccgatctcggcgaacaccgcccccgcttcgacgctctccggcgtggtccagaccgccaccgcggcgccgtcgtccgcgacccacaccttgccgatgtcgagcccgacgcgcgtgaggaagagttcttgcagctcggtgacccgctcgatgtggcggtccggatcgacggtgtggcgcgtggcggggtagtcggcgaacgcggcggcgagggtgcgtacggccctggggacgtcgtcgcgggtggcgaggcgcaccgtgggcttgtactcggtcatggtggcctcaggtgcagaggtttctacagggaaagagagaaaggctacagttagtttgctgtgatgatgctaagtgccgaggtcagatgtctatggattgtacacggaatcccaacgcaggaaccaaaaaacactcacccaaaaaaatggcgctaaggccgagagaaaggcgaagttccgtctacggctatataccttgaaacaggggcggcagaagtgacgcaacgcggttgcgcggacggcttcctgtgttttcattggtcgaagcgttctgcgcgtgcgcagagattccccagggaaggcgggccctcttccgaatgtccaatccggacattcttccggttggacctccgcggtcagcgctgtgcccggcgagagatcacgtggggcgcggaggcggtgctgctggggcacggccgtccagcctcggcggccatatttttgaggggctgttcatctcgttcacacgctctgtccgccatgtttgtgagtggaagcgccattaccccttcaagcgactgaaggctgcagggcctctggtggcccgcatggggagaccagacccgccaggcccgcctttccgcactcagtccgggcttactttattttgtgagacagggtctcgcctagaggctccggtgcccgtcagtgggcagagcgcacatcgcccacagtccccgagaagttggggggaggggtcggcaattgaaccggtgcctagagaaggtggcgcggggtaaactgggaaagtgatgtcgtgtactggctccgcctttttcccgagggtgggggagaaccgtatataagtgcagtagtcgccgtgaacgttctttttcgcaacgggtttgccgccagaacacaggtaagtgccgtgtgtggttcccgcgggcctggcctctttacgggttatggcccttgcgtgccttgaattacttccacgcccctggctgcagtacgtgattcttgatcccgagcttcgggttggaagtgggtgggagagttcgaggccttgcgcttaaggagccccttcgcctcgtgcttgagttgaggcttggcctgggcgctggggccgccgcgtgcgaatctggtggcaccttcgcgcctgtctcgctgctttcgataagtctctagccatttaaaatttttgatgacctgctgcgacgctttttttctggcaagatagtcttgtaaatgcgggccaagatctgcacactggtatttcggtttttggggccgcgggcggcgacggggcccgtgcgtcccagcgcacatgttcggcgaggcggggcctgcgagcgcggccaccgagaatcggacgggggtagtctcaagctggccggcctgctctggtgcctggcctcgcgccgccgtgtatcgccccgccctgggcggcaaggctggcccggtcggcaccagttgcgtgagcggaaagatggccgcttcccggccctgctgcagggagctcaaaatggaggacgcggcgctcgggagagcgggcgggtgagtcacccacacaaaggaaaagggcctttccgtcctcagccgtcgcttcatgtgactccacggagtaccgggcgccgtccaggcacctcgattagttctcgagcttttggagtacgtcgtctttaggttggggggaggggttttatgcgatggagtttccccatactgagtgggtggagactgaagttaggccagcttggcacttgatgtaattctccttggaatttgccctttttgagtttggatcttggttcattctcaagcctcagacagtggttcaaagtttttttcttccatttaaggtgtcgtgaaaactaccccaagctggcctctgaggccaccatggctcgagtttcgaactcaattatactgaattgtttcatcatagggttcaacattgtgataaatcaggacttcaatgtctagtgttcagtaaataccttgtagggctctccaaaaaggggaatcttttcaggaaatgcctctttctcttggtgggcttcctggttgcgtctttccttctctctaattcgaaggcctgtcaggccaagcttggggatcaattctctagagctcgctgatcagcctcgactgtgccttctagttgccagccatctgttgtttgcccctcccccgtgccttccttgaccctggaaggtgccactcccactgtcctttcctaataaaatgaggaaattgcatcgcattgtctgagtaggtgtcattctattctggggggtggggtggggcaggacagcaagggggaggattgggaagacaatagcaggcatgctggggatgcggtgggctctatggcttctgaggcggaaagaaccagctgggcctactagatagcggaccccttaccgaaacatcgccgcattctgcagaggagtcgaacttagtgtatgtaaacttctgacccactggaattgtgatacagtgaattataagtgaaataatctgtctgtaaacaattgttggaaaaatgacttgtgtcatgcacaaagtagatgtcctaactgacttgccaaaactattgtttgttaacaagaaatttgtggagtagttgaaaaacgagttttaatgactccaacttaagtgtatgtaaacttccgacttcaactgtatagggatcc

SEQ ID NO: 909 - DNA, 1183 bp, Artificial Sequence
  Synthetic Polynucleotides
gtgaggctccggtgcccgtcagtgggcagagcgcacatcgcccacagtccccgagaagttggggggaggggtcggcaattgaaccggtgcctagagaaggtggcgcggggtaaactgggaaagtgatgtcgtgtactggctccgcctttttcccgagggtgggggagaaccgtatataagtgcagtagtcgccgtgaacgttctttttcgcaacgggtttgccgccagaacacaggtaagtgccgtgtgtggttcccgcgggcctggcctctttacgggttatggcccttgcgtgccttgaattacttccacctggctgcagtacgtgattcttgatcccgagcttcgggttggaagtgggtgggagagttcgaggccttgcgcttaaggagccccttcgcctcgtgcttgagttgaggcctggcctgggcgctggggccgccgcgtgcgaatctggtggcaccttcgcgcctgtctcgctgctttcgataagtctctagccatttaaaatttttgatgacctgctgcgacgctttttttctggcaagatagtcttgtaaatgcgggccaagatctgcacactggtatttcggtttttggggccgcgggcggcgacggggcccgtgcgtcccagcgcacatgttcggcgaggcggggcctgcgagcgcggccaccgagaatcggacgggggtagtctcaagctggccggcctgctctggtgcctggcctcgcgccgccgtgtatcgccccgccctgggcggcaaggctggcccggtcggcaccagttgcgtgagcggaaagatggccgcttcccggccctgctgcagggagctcaaaatggaggacgcggcgctcgggagagcgggcgggtgagtcacccacacaaaggaaaagggcctttccgtcctcagccgtcgcttcatgtgactccacggagtaccgggcgccgtccaggcacctcgattagttctcgaccttttggagtacgtcgtctttaggttggggggaggggttttatgcgatggagtttccccacactgagtgggtggagactgaagttaggccagcttggcacttgatgtaattctccttggaatttgccctttttgagtttggatcttggttcattctcaagcctcagacagtggttcaaagtttttttcttccatttcaggtgtcgtga

SEQ ID NO: 910 - DNA, 20 bp, Artificial Sequence
  Synthetic Polynucleotides
taatacgactcactataggg

SEQ ID NO: 911 - DNA, 20 bp, Artificial Sequence
  Synthetic Polynucleotides
attaaccctcactaaaggga

SEQ ID NO: 912 - DNA, 7566 bp, Artificial Sequence
  Synthetic Polynucleotides
tgaaagaccccacctgtaggtttggcaagctagcttaagtaacgccattttgcaaggcatggaaaatacataactgagaatagagaagttcagatcaaggttaggaacagagagacagcagaatatgggccaaacaggatatctgtggtaagcagttcctgccccggctcagggccaagaacagatggtccccagatgcggtcccgccctcagcagtttctagagaaccatcagatgtttccagggtgccccaaggacctgaaatgaccctgtgccttatttgaactaaccaatcagttcgcttctcgcttctgttcgcgcgcttctgctccccgagctcaataaaagagcccacaacccctcactcggcgcgccagtcctccgatagactgcgtcgcccgggtacccgtattcccaataaagcctcttgctgtttgcatccgaatcgtggactcgctgatccttgggagggtctcctcagattgattgactgcccacctcgggggtctttcatttggaggttccaccgagatttggagacccctgcccagggaccaccgacccccccgccgggaggtaagctggccagcggtcgtttcgtgtctgtctctgtctttgtgcgtgtttgtgccggcatctaatgtttgcgcctgcgtctgtactagttagctaactagctctgtatctggcggacccgtggtggaactgacgagttctgaacacccggccgcaaccctgggagacgtcccagggactttgggggccgtttttgtggcccgacctgaggaagggagtcgatgtggaatccgaccccgtcaggatatgtggttctggtaggagacgagaacctaaaacagttcccgcctccgtctgaatttttgctttcggtttggaaccgaagccgcgcgtcttgtctgctgcagcgctgcagcatcgttctgtgttgtctctgtctgactgtgtttctgtatttgtctgaaaattagggccagactgttaccactcccttaagtttgaccttaggtcactggaaagatgtcgagcggatcgctcacaaccagtcggtagatgtcaagaagagacgttgggttaccttctgctctgcagaatggccaacctttaacgtcggatggccgcgagacggcacctttaaccgagacctcatcacccaggttaagatcaaggtcttttcacctggcccgcatggacacccagaccaggtcccctacatcgtgacctgggaagccttggcttttgacccccctccctgggtcaagccctttgtacaccctaagcctccgcctcctcttcctccatccgccccgtctctcccccttgaacctcctcgttcgaccccgcctcgatcctccctttatccagccctcactccttctctaggcgccggaattagatccccaccatgaagcccaccgagaacaacgaagacttcaacatcgtggccgtggccagcaacttcgcgaccacggatctcgatgctgaccgcgggaagttgcccggcaagaagctgccgctggaggtgctcaaagagatggaagccaatgcccggaaagctggctgcaccaggggctgtctgatctgcctgtcccacatcaagtgcacgcccaagatgaagaagttcatcccaggacgctgccacacctacgaaggcgacaaagagtccgcacagggcggcataggcgaggcgatcgtcgacattcctgagattcctgggttcaaggacttggagcccatggagcagttcatcgcacaggtcgatctgtgtgtggactgcacaactggctgcctcaaagggcttgccaacgtgcagtgttctgacctgctcaagaagtggctgccgcaacgctgtgcgacctttgccagcaagatccagggccaggtggacaagatcaagggggccggtggtgacctcgagaccgatttctacccctacgatgtgcccgattacgcttagtctagagggccctattctatagtgtcacctaagtcgaggttaacgaattctaccgggtaggggaggcgcttttcccaaggcagtctggagcatgcgctttagcagccccgctgggcacttggcgctacacaagtggcctctggcctcgcacacattccacatccaccggtaggcgccaaccggctccgttctttggtggccccttcgcgccaccttctactcctcccctagtcaggaagttcccccccgccccgcagctcgcgtcgtgcaggacgtgacaaatggaagtagcacgtctcactagtctcgtgcagatggacagcaccgctgagcaatggaagcgggtaggcctttggggcagcggccaatagcagctttgctccttcgctttctgggctcagaggctgggaaggggtgggtccgggggcgggctcaggggcgggctcaggggcggggcgggcgcccgaaggtcctccggaggcccggcattctgcacgcttcaaaagcgcacgtctgccgcgctgttctcctcttcctcatctccgggcctttcgacctgcatcccgccaccatgaaaaagcctgaactcaccgcgacgtctgtcgagaagtttctgatcgaaaagttcgacagcgtctccgacctgatgcagctctcggagggcgaagaatctcgtgctttcagcttcgatgtaggagggcgtggatatgtcctgcgggtaaatagctgcgccgatggtttctacaaagatcgttatgtttatcggcactttgcatcggccgcgctcccgattccggaagtgcttgacattggggaattcagcgagagcctgacctattgcatctcccgccgtgcacagggtgtcacgttgcaagacctgcctgaaaccgaactgcccgctgttctgcagccggtcgcggaggccatggatgcgatcgctgcggccgatcttagccagacgagcgggttcggcccattcggaccgcaaggaatcggtcaatacactacatggcgtgatttcatatgcgcgattgctgatccccatgtgtatcactggcaaactgtgatggacgacaccgtcagtgcgtccgtcgcgcaggctctcgatgagctgatgctttgggccgaggactgccccgaagtccggcacctcgtgcacgcggatttcggctccaacaatgtcctgacggacaatggccgcataacagcggtcattgactggagcgaggcgatgttcggggattcccaatacgaggtcgccaacatcttcttctggaggccgtggttggcttgtatggagcagcagacgcgctacttcgagcggaggcatccggagcttgcaggatcgccgcggctccggggcgtatatgctccgcattggtcttgaccaactctatcagagcttggttgacggcaatttcgatgatgcagcttgggcgcagggtcgatgcgacgcaatcgtccgatccggagccgggactgtcgggcgtacacaaatcgcccgcagaagcgcggccgtctggaccgatggctgtgtagaagtactcgccgatagtggaaaccgacgccccagcactcgtccgagggcaaaggaatagagtagatgccgaccgaacaagagctgatttcgagaacgcctcagccagcaactcgcgcgagcctagcaaggcaaatgcgagagaacggccttacgcttggtggcacagttctcgtccacagttcgctaagctcgctcggctgggtcgcgggagggccggtcgcagtgattcaggcccttctggattgtgttggtccccagggcacgattgtcatgcccacgcactcgggtgatctgactgatcccgcagattggagatcgccgcccgtgcctgccgattgggtgcagatccgtcgacctgcagccaagcttatcgataaaataaaagattttatttagtctccagaaaaaggggggaatgaaagaccccacctgtaggtttggcaagctagcttaagtaacgccattttgcaaggcatggaaaatacataactgagaatagagaagttcagatcaaggttaggaacagagagacagcagaatatgggccaaacaggatatctgtggtaagcagttcctgccccggctcagggccaagaacagatggtccccagatgcggtcccgccctcagcagtttctagagaaccatcagatgtttccagggtgccccaaggacctgaaatgaccctgtgccttatttgaactaaccaatcagttcgcttctcgcttctgttcgcgcgcttctgctccccgagctcaataaaagagcccacaacccctcactcggcgcgccagtcctccgatagactgcgtcgcccgggtacccgtgtatccaataaaccctcttgcagttgcatccgacttgtggtctcgctgttccttgggagggtctcctctgagtgattgactacccgtcagcgggggtctttcatgggtaacagtttcttgaagttggagaacaacattctgagggtaggagtcgaatattaagtaatcctgactcaattagccactgttttgaatccacatactccaatactcctgaaatagttcattatggacagcgcagaagagctggggagaattaattcgtaatcatggtcatagctgtttcctgtgtgaaattgttatccgctcacaattccacacaacatacgagccggaagcataaagtgtaaagcctggggtgcctaatgagtgagctaactcacattaattgcgttgcgctcactgcccgctttccagtcgggaaacctgtcgtgccagctgcattaatgaatcggccaacgcgcggggagaggcggtttgcgtattgggcgctcttccgcttcctcgctcactgactcgctgcgctcggtcgttcggctgcggcgagcggtatcagctcactcaaaggcggtaatacggttatccacagaatcaggggataacgcaggaaagaacatgtgagcaaaaggccagcaaaaggccaggaaccgtaaaaaggccgcgttgctggcgtttttccataggctccgcccccctgacgagcatcacaaaaatcgacgctcaagtcagaggtggcgaaacccgacaggactataaagataccaggcgtttccccctggaagctccctcgtgcgctctcctgttccgaccctgccgcttaccggatacctgtccgcctttctcccttcgggaagcgtggcgctttctcatagctcacgctgtaggtatctcagttcggtgtaggtcgttcgctccaagctgggctgtgtgcacgaaccccccgttcagcccgaccgctgcgccttatccggtaactatcgtcttgagtccaacccggtaagacacgacttatcgccactggcagcagccactggtaacaggattagcagagcgaggtatgtaggcggtgctacagagttcttgaagtggtggcctaactacggctacactagaaggacagtatttggtatctgcgctctgctgaagccagttaccttcggaaaaagagttggtagctcttgatccggcaaacaaaccaccgctggtagcggtggtttttttgtttgcaagcagcagattacgcgcagaaaaaaaggatctcaagaagatcctttgatcttttctacggggtctgacgctcagtggaacgaaaactcacgttaagggattttggtcatgagattatcaaaaaggatcttcacctagatccttttaaattaaaaatgaagttttaaatcaatctaaagtatatatgagtaaacttggtctgacagttaccaatgcttaatcagtgaggcacctatctcagcgatctgtctatttcgttcatccatagttgcctgactccccgtcgtgtagataactacgatacgggagggcttaccatctggccccagtgctgcaatgataccgcgagacccacgctcaccggctccagatttatcagcaataaaccagccagccggaagggccgagcgcagaagtggtcctgcaactttatccgcctccatccagtctattaattgttgccgggaagctagagtaagtagttcgccagttaatagtttgcgcaacgttgttgccattgctacaggcatcgtggtgtcacgctcgtcgtttggtatggcttcattcagctccggttcccaacgatcaaggcgagttacatgatcccccatgttgtgcaaaaaagcggttagctccttcggtcctccgatcgttgtcagaagtaagttggccgcagtgttatcactcatggttatggcagcactgcataattctcttactgtcatgccatccgtaagatgcttttctgtgactggtgagtactcaaccaagtcattctgagaatagtgtatgcggcgaccgagttgctcttgcccggcgtcaatacgggataataccgcgccacatagcagaactttaaaagtgctcatcattggaaaacgttcttcggggcgaaaactctcaaggatcttaccgctgttgagatccagttcgatgtaacccactcgtgcacccaactgatcttcagcatcttttactttcaccagcgtttctgggtgagcaaaaacaggaaggcaaaatgccgcaaaaaagggaataagggcgacacggaaatgttgaatactcatactcttcctttttcaatattattgaagcatttatcagggttattgtctcatgagcggatacatatttgaatgtatttagaaaaataaacaaataggggttccgcgcacatttccccgaaaagtgccacctgacgtctaagaaaccattattatcatgacattaacctataaaaataggcgtatcacgaggccctttcgtctcgcgcgtttcggtgatgacggtgaaaacctctgacacatgcagctcccggagacggtcacagcttgtctgtaagcggatgccgggagcagacaagcccgtcagggcgcgtcagcgggtgttggcgggtgtcggggctggcttaactatgcggcatcagagcagattgtactgagagtgcaccatatgcggtgtgaaataccgcacagatgcgtaaggagaaaataccgcatcaggcgccattcgccattcaggctgcgcaactgttgggaagggcgatcggtgcgggcctcttcgctattacgccagctggcgaaagggggatgtgctgcaaggcgattaagttgggtaacgccagggttttcccagtcacgacgttgtaaaacgacggcgcaaggaatggtgcatgcaaggagatggcgcccaacagtcccccggccacggggcctgccaccatacccacgccgaaacaagcgctcatgagcccgaagtggcgagcccgatcttccccatcggtgatgtcggcgatataggcgccagcaaccgcacctgtggcgccggtgatgccggccacgatgcgtccggcgtagaggcgattagtccaatttgttaaagacaggatatcagtggtccaggctctagttttgactcaacaatatcaccagctgaagcctatagagtacgagccatagataaaataaaagattttatttagtctccagaaaaaggggggaa

SEQ ID NO: 913 - DNA, 6884 bp, Artificial Sequence
  Synthetic Polynucleotides
tgaaagaccccacctgtaggtttggcaagctagcttaagtaacgccattttgcaaggcatggaaaatacataactgagaatagagaagttcagatcaaggttaggaacagagagacagcagaatatgggccaaacaggatatctgtggtaagcagttcctgccccggctcagggccaagaacagatggtccccagatgcggtcccgccctcagcagtttctagagaaccatcagatgtttccagggtgccccaaggacctgaaatgaccctgtgccttatttgaactaaccaatcagttcgcttctcgcttctgttcgcgcgcttctgctccccgagctcaataaaagagcccacaacccctcactcggcgcgccagtcctccgatagactgcgtcgcccgggtacccgtattcccaataaagcctcttgctgtttgcatccgaatcgtggactcgctgatccttgggagggtctcctcagattgattgactgcccacctcgggggtctttcatttggaggttccaccgagatttggagacccctgcccagggaccaccgacccccccgccgggaggtaagctggccagcggtcgtttcgtgtctgtctctgtctttgtgcgtgtttgtgccggcatctaatgtttgcgcctgcgtctgtactagttagctaactagctctgtatctggcggacccgtggtggaactgacgagttctgaacacccggccgcaaccctgggagacgtcccagggactttgggggccgtttttgtggcccgacctgaggaagggagtcgatgtggaatccgaccccgtcaggatatgtggttctggtaggagacgagaacctaaaacagttcccgcctccgtctgaatttttgctttcggtttggaaccgaagccgcgcgtcttgtctgctgcagcgctgcagcatcgttctgtgttgtctctgtctgactgtgtttctgtatttgtctgaaaattagggccagactgttaccactcccttaagtttgaccttaggtcactggaaagatgtcgagcggatcgctcacaaccagtcggtagatgtcaagaagagacgttgggttaccttctgctctgcagaatggccaacctttaacgtcggatggccgcgagacggcacctttaaccgagacctcatcacccaggttaagatcaaggtcttttcacctggcccgcatggacacccagaccaggtcccctacatcgtgacctgggaagccttggcttttgacccccctccctgggtcaagccctttgtacaccctaagcctccgcctcctcttcctccatccgccccgtctctcccccttgaacctcctcgttcgaccccgcctcgatcctccctttatccagccctcactccttctctaggcgccggaattagatccccaccatgaagcccaccgagaacaacgaagacttcaacatcgtggccgtggccagcaacttcgcgaccacggatctcgatgctgaccgcgggaagttgcccggcaagaagctgccgctggaggtgctcaaagagatggaagccaatgcccggaaagctggctgcaccaggggctgtctgatctgcctgtcccacatcaagtgcacgcccaagatgaagaagttcatcccaggacgctgccacacctacgaaggcgacaaagagtccgcacagggcggcataggcgaggcgatcgtcgacattcctgagattcctgggttcaaggacttggagcccatggagcagttcatcgcacaggtcgatctgtgtgtggactgcacaactggctgcctcaaagggcttgccaacgtgcagtgttctgacctgctcaagaagtggctgccgcaacgctgtgcgacctttgccagcaagatccagggccaggtggacaagatcaagggggccggtggtgacctcgagaccgatttctacccctacgatgtgcccgattacgcttagtctagagggccctattctatagtgtcacctaagtcgaggttaacgaattctaccgggtaggggaggcgcttttcccaaggcagtctggagcatgcgctttagcagccccgctgggcacttggcgctacacaagtggcctctggcctcgcacacattccacatccaccggtaggcgccaaccggctccgttctttggtggccccttcgcgccaccttctactcctcccctagtcaggaagttcccccccgccccgcagctcgcgtcgtgcaggacgtgacaaatggaagtagcacgtctcactagtctcgtgcagatggacagcaccgctgagcaatggaagcgggtaggcctttggggcagcggccaatagcagctttgctccttcgctttctgggctcagaggctgggaaggggtgggtccgggggcgggctcaggggcgggctcaggggcggggcgggcgcccgaaggtcctccggaggcccggcattctgcacgcttcaaaagcgcacgtctgccgcgctgttctcctcttcctcatctccgggcctttcgacctgcagcccaagcttaccatgaccgagtacaagcccacggtgcgcctcgccacccgcgacgacgtccccagggccgtacgcaccctcgccgccgcgttcgccgactaccccgccacgcgccacaccgtcgatccggaccgccacatcgagcgggtcaccgagctgcaagaactcttcctcacgcgcgtcgggctcgacatcggcaaggtgtgggtcgcggacgacggcgccgcggtggcggtctggaccacgccggagagcgtcgaagcgggggcggtgttcgccgagatcggcccgcgcatggccgagttgagcggttcccggctggccgcgcagcaacagatggaaggcctcctggcgccgcaccggcccaaggagcccgcgtggttcctggccaccgtcggcgtctcgcccgaccaccagggcaagggtctgggcagcgccgtcgtgctccccggagtggaggcggccgagcgcgccggggtgcccgccttcctggagacctccgcgccccgcaacctccccttctacgagcggctcggcttcaccgtcaccgccgacgtcgaggtgcccgaaggaccgcgcacctggtgcatgacccgcaagcccggtgcctgacgcccgccccacgacccgcagcgcccgaccgaaaggagcgcacgaccccatgcatcgataaaataaaagattttatttagtctccagaaaaaggggggaatgaaagaccccacctgtaggtttggcaagctagcttaagtaacgccattttgcaaggcatggaaaatacataactgagaatagagaagttcagatcaaggttaggaacagagagacagcagaatatgggccaaacaggatatctgtggtaagcagttcctgccccggctcagggccaagaacagatggtccccagatgcggtcccgccctcagcagtttctagagaaccatcagatgtttccagggtgccccaaggacctgaaatgaccctgtgccttatttgaactaaccaatcagttcgcttctcgcttctgttcgcgcgcttctgctccccgagctcaataaaagagcccacaacccctcactcggcgcgccagtcctccgatagactgcgtcgcccgggtacccgtgtatccaataaaccctcttgcagttgcatccgacttgtggtctcgctgttccttgggagggtctcctctgagtgattgactacccgtcagcgggggtctttcatgggtaacagtttcttgaagttggagaacaacattctgagggtaggagtcgaatattaagtaatcctgactcaattagccactgttttgaatccacatactccaatactcctgaaatagttcattatggacagcgcagaagagctggggagaattaattcgtaatcatggtcatagctgtttcctgtgtgaaattgttatccgctcacaattccacacaacatacgagccggaagcataaagtgtaaagcctggggtgcctaatgagtgagctaactcacattaattgcgttgcgctcactgcccgctttccagtcgggaaacctgtcgtgccagctgcattaatgaatcggccaacgcgcggggagaggcggtttgcgtattgggcgctcttccgcttcctcgctcactgactcgctgcgctcggtcgttcggctgcggcgagcggtatcagctcactcaaaggcggtaatacggttatccacagaatcaggggataacgcaggaaagaacatgtgagcaaaaggccagcaaaaggccaggaaccgtaaaaaggccgcgttgctggcgtttttccataggctccgcccccctgacgagcatcacaaaaatcgacgctcaagtcagaggtggcgaaacccgacaggactataaagataccaggcgtttccccctggaagctccctcgtgcgctctcctgttccgaccctgccgcttaccggatacctgtccgcctttctcccttcgggaagcgtggcgctttctcatagctcacgctgtaggtatctcagttcggtgtaggtcgttcgctccaagctgggctgtgtgcacgaaccccccgttcagcccgaccgctgcgccttatccggtaactatcgtcttgagtccaacccggtaagacacgacttatcgccactggcagcagccactggtaacaggattagcagagcgaggtatgtaggcggtgctacagagttcttgaagtggtggcctaactacggctacactagaaggacagtatttggtatctgcgctctgctgaagccagttaccttcggaaaaagagttggtagctcttgatccggcaaacaaaccaccgctggtagcggtggtttttttgtttgcaagcagcagattacgcgcagaaaaaaaggatctcaagaagatcctttgatcttttctacggggtctgacgctcagtggaacgaaaactcacgttaagggattttggtcatgagattatcaaaaaggatcttcacctagatccttttaaattaaaaatgaagttttaaatcaatctaaagtatatatgagtaaacttggtctgacagttaccaatgcttaatcagtgaggcacctatctcagcgatctgtctatttcgttcatccatagttgcctgactccccgtcgtgtagataactacgatacgggagggcttaccatctggccccagtgctgcaatgataccgcgagacccacgctcaccggctccagatttatcagcaataaaccagccagccggaagggccgagcgcagaagtggtcctgcaactttatccgcctccatccagtctattaattgttgccgggaagctagagtaagtagttcgccagttaatagtttgcgcaacgttgttgccattgctacaggcatcgtggtgtcacgctcgtcgtttggtatggcttcattcagctccggttcccaacgatcaaggcgagttacatgatcccccatgttgtgcaaaaaagcggttagctccttcggtcctccgatcgttgtcagaagtaagttggccgcagtgttatcactcatggttatggcagcactgcataattctcttactgtcatgccatccgtaagatgcttttctgtgactggtgagtactcaaccaagtcattctgagaatagtgtatgcggcgaccgagttgctcttgcccggcgtcaatacgggataataccgcgccacatagcagaactttaaaagtgctcatcattggaaaacgttcttcggggcgaaaactctcaaggatcttaccgctgttgagatccagttcgatgtaacccactcgtgcacccaactgatcttcagcatcttttactttcaccagcgtttctgggtgagcaaaaacaggaaggcaaaatgccgcaaaaaagggaataagggcgacacggaaatgttgaatactcatactcttcctttttcaatattattgaagcatttatcagggttattgtctcatgagcggatacatatttgaatgtatttagaaaaataaacaaataggggttccgcgcacatttccccgaaaagtgccacctgacgtctaagaaaccattattatcatgacattaacctataaaaataggcgtatcacgaggccctttcgtctcgcgcgtttcggtgatgacggtgaaaacctctgacacatgcagctcccggagacggtcacagcttgtctgtaagcggatgccgggagcagacaagcccgtcagggcgcgtcagcgggtgttggcgggtgtcggggctggcttaactatgcggcatcagagcagattgtactgagagtgcaccatatgcggtgtgaaataccgcacagatgcgtaaggagaaaataccgcatcaggcgccattcgccattcaggctgcgcaactgttgggaagggcgatcggtgcgggcctcttcgctattacgccagctggcgaaagggggatgtgctgcaaggcgattaagttgggtaacgccagggttttcccagtcacgacgttgtaaaacgacggcgcaaggaatggtgcatgcaaggagatggcgcccaacagtcccccggccacggggcctgccaccatacccacgccgaaacaagcgctcatgagcccgaagtggcgagcccgatcttccccatcggtgatgtcggcgatataggcgccagcaaccgcacctgtggcgccggtgatgccggccacgatgcgtccggcgtagaggcgattagtccaatttgttaaagacaggatatcagtggtccaggctctagttttgactcaacaatatcaccagctgaagcctatagagtacgagccatagataaaataaaagattttatttagtctccagaaaaaggggggaa

SEQ ID NO: 914 - DNA, 7512 bp, Artificial Sequence
  Synthetic Polynucleotides
aatgtagtcttatgcaatactcttgtagtcttgcaacatggtaacgatgagttagcaacatgccttacaaggagagaaaaagcaccgtgcatgccgattggtggaagtaaggtggtacgatcgtgccttattaggaaggcaacagacgggtctgacatggattggacgaaccactgaattgccgcattgcagagatattgtatttaagtgcctagctcgatacataaacgggtctctctggttagaccagatctgagcctgggagctctctggctaactagggaacccactgcttaagcctcaataaagcttgccttgagtgcttcaagtagtgtgtgcccgtctgttgtgtgactctggtaactagagatccctcagacccttttagtcagtgtggaaaatctctagcagtggcgcccgaacagggacttgaaagcgaaagggaaaccagaggagctctctcgacgcaggactcggcttgctgaagcgcgcacggcaagaggcgaggggcggcgactggtgagtacgccaaaaattttgactagcggaggctagaaggagagagatgggtgcgagagcgtcagtattaagcgggggagaattagatcgcgatgggaaaaaattcggttaaggccagggggaaagaaaaaatataaattaaaacatatagtatgggcaagcagggagctagaacgattcgcagttaatcctggcctgttagaaacatcagaaggctgtagacaaatactgggacagctacaaccatcccttcagacaggatcagaagaacttagatcattatataatacagtagcaaccctctattgtgtgcatcaaaggatagagataaaagacaccaaggaagctttagacaagatagaggaagagcaaaacaaaagtaagaccaccgcacagcaagcggccgctgatcttcagacctggaggaggagatatgagggacaattggagaagtgaattatataaatataaagtagtaaaaattgaaccattaggagtagcacccaccaaggcaaagagaagagtggtgcagagagaaaaaagagcagtgggaataggagctttgttccttgggttcttgggagcagcaggaagcactatgggcgcagcgtcaatgacgctgacggtacaggccagacaattattgtctggtatagtgcagcagcagaacaatttgctgagggctattgaggcgcaacagcatctgttgcaactcacagtctggggcatcaagcagctccaggcaagaatcctggctgtggaaagatacctaaaggatcaacagctcctggggatttggggttgctctggaaaactcatttgcaccactgctgtgccttggaatgctagttggagtaataaatctctggaacagatttggaatcacacgacctggatggagtgggacagagaaattaacaattacacaagcttaatacactccttaattgaagaatcgcaaaaccagcaagaaaagaatgaacaagaattattggaattagataaatgggcaagtttgtggaattggtttaacataacaaattggctgtggtatataaaattattcataatgatagtaggaggcttggtaggtttaagaatagtttttgctgtactttctatagtgaatagagttaggcagggatattcaccattatcgtttcagacccacctcccaaccccgaggggacccgacaggcccgaaggaatagaagaagaaggtggagagagagacagagacagatccattcgattagtgaacggatctcgacggtatcgataagcttgggagttccgcgttacataacttacggtaaatggcccgcctggctgaccgcccaacgacccccgcccattgacgtcaataatgacgtatgttcccatagtaacgccaatagggactttccattgacgtcaatgggtggagtatttacggtaaactgcccacttggcagtacatcaagtgtatcatatgccaagtacgccccctattgacgtcaatgacggtaaatggcccgcctggcattatgcccagtacatgaccttatgggactttcctacttggcagtacatctacgtattagtcatcgctattaccatggtgatgcggttttggcagtacatcaatgggcgtggatagcggtttgactcacggggatttccaagtctccaccccattgacgtcaatgggagtttgttttggcaccaaaatcaacgggactttccaaaatgtcgtaacaactccgccccattgacgcaaatgggcggtaggcgtgtacggtgggaggtctatataagcagagctcgtttagtgaaccgtcagatcgcctggagacgccatccacgctgttttgacctccatagaagacaccgactctagaggatccccaccatggtcttcacactcgaagatttcgttggggactggcgacagacagccggctacaacctggaccaagtccttgaacagggaggtgtgtccagtttgtttcagaatctcggggtgtccgtaactccgatccaaaggattgtcctgagcggtgaaaatgggctgaagatcgacatccatgtcatcatcccgtatgaaggtctgagcggcgaccaaatgggccagatcgaaaaaatttttaaggtggtgtaccctgtggatgatcatcactttaaggtgatcctgcactatggcacactggtaatcgacggggttacgccgaacatgatcgactatttcggacggccctatgaaggcatcgccgtgttcgacggcaaaaagatcactgtaacagggaccctgtggaacggcaacaaaattatcgacgagcgcctgatcaaccccgacggctccctgctgttccgagtaaccatcaacggagtgaccggctggcggctgtgcgaacgcattctggcgagttggaaggatgcctctggatggtcttaagtcgagaccgatttctacccctacgatgtgcccgattacgcttagtctagagggcccgcggttcgaaggtaagcctatccctaaccctctcctcggtctcgattctacgcgtaccggttagtaatgagtttggaattaattctgtggaatgtgtgtcagttagggtgtggaaagtccccaggctccccaggcaggcagaagtatgcaaagcatgcatctcaattagtcagcaaccaggtgtggaaagtccccaggctccccagcaggcagaagtatgcaaagcatgcatctcaattagtcagcaaccatagtcccgcccctaactccgcccatcccgcccctaactccgcccagttccgcccattctccgccccatggctgactaattttttttatttatgcagaggccgaggccgcctctgcctctgagctattccagaagtagtgaggaggcttttttggaggcctaggcttttgcaaaaagctcccgggagcttgtatatccattttcggatctgatcagcacgtgttgacaattaatcatcggcatagtatatcggcatagtataatacgacaaggtgaggaactaaaccatggccaagcctttgtctcaagaagaatccaccctcattgaaagagcaacggctacaatcaacagcatccccatctctgaagactacagcgtcgccagcgcagctctctctagcgacggccgcatcttcactggtgtcaatgtatatcattttactgggggaccttgtgcagaactcgtggtgctgggcactgctgctgctgcggcagctggcaacctgacttgtatcgtcgcgatcggaaatgagaacaggggcatcttgagcccctgcggacggtgccgacaggtgcttctcgatctgcatcctgggatcaaagccatagtgaaggacagtgatggacagccgacggcagttgggattcgtgaattgctgccctctggttatgtgtgggagggctaagcacaattcgagctcggtacctttaagaccaatgacttacaaggcagctgtagatcttagccactttttaaaagaaaaggggggactggaagggctaattcactcccaacgaagacaagatctgctttttgcttgtactgggtctctctggttagaccagatctgagcctgggagctctctggctaactagggaacccactgcttaagcctcaataaagcttgccttgagtgcttcaagtagtgtgtgcccgtctgttgtgtgactctggtaactagagatccctcagacccttttagtcagtgtggaaaatctctagcagtagtagttcatgtcatcttattattcagtatttataacttgcaaagaaatgaatatcagagagtgagaggaacttgtttattgcagcttataatggttacaaataaagcaatagcatcacaaatttcacaaataaagcatttttttcactgcattctagttgtggtttgtccaaactcatcaatgtatcttatcatgtctggctctagctatcccgcccctaactccgcccatcccgcccctaactccgcccagttccgcccattctccgccccatggctgactaattttttttatttatgcagaggccgaggccgcctcggcctctgagctattccagaagtagtgaggaggcttttttggaggcctagggacgtacccaattcgccctatagtgagtcgtattacgcgcgctcactggccgtcgttttacaacgtcgtgactgggaaaaccctggcgttacccaacttaatcgccttgcagcacatccccctttcgccagctggcgtaatagcgaagaggcccgcaccgatcgcccttcccaacagttgcgcagcctgaatggcgaatgggacgcgccctgtagcggcgcattaagcgcggcgggtgtggtggttacgcgcagcgtgaccgctacacttgccagcgccctagcgcccgctcctttcgctttcttcccttcctttctcgccacgttcgccggctttccccgtcaagctctaaatcgggggctccctttagggttccgatttagtgctttacggcacctcgaccccaaaaaacttgattagggtgatggttcacgtagtgggccatcgccctgatagacggtttttcgccctttgacgttggagtccacgttctttaatagtggactcttgttccaaactggaacaacactcaaccctatctcggtctattcttttgatttataagggattttgccgatttcggcctattggttaaaaaatgagctgatttaacaaaaatttaacgcgaattttaacaaaatattaacgcttacaatttaggtggcacttttcggggaaatgtgcgcggaacccctatttgtttatttttctaaatacattcaaatatgtatccgctcatgagacaataaccctgataaatgcttcaataatattgaaaaaggaagagtatgagtattcaacatttccgtgtcgcccttattcccttttttgcggcattttgccttcctgtttttgctcacccagaaacgctggtgaaagtaaaagatgctgaagatcagttgggtgcacgagtgggttacatcgaactggatctcaacagcggtaagatccttgagagttttcgccccgaagaacgttttccaatgatgagcacttttaaagttctgctatgtggcgcggtattatcccgtattgacgccgggcaagagcaactcggtcgccgcatacactattctcagaatgacttggttgagtactcaccagtcacagaaaagcatcttacggatggcatgacagtaagagaattatgcagtgctgccataaccatgagtgataacactgcggccaacttacttctgacaacgatcggaggaccgaaggagctaaccgcttttttgcacaacatgggggatcatgtaactcgccttgatcgttgggaaccggagctgaatgaagccataccaaacgacgagcgtgacaccacgatgcctgtagcaatggcaacaacgttgcgcaaactattaactggcgaactacttactctagcttcccggcaacaattaatagactggatggaggcggataaagttgcaggaccacttctgcgctcggcccttccggctggctggtttattgctgataaatctggagccggtgagcgtgggtctcgcggtatcattgcagcactggggccagatggtaagccctcccgtatcgtagttatctacacgacggggagtcaggcaactatggatgaacgaaatagacagatcgctgagataggtgcctcactgattaagcattggtaactgtcagaccaagtttactcatatatactttagattgatttaaaacttcatttttaatttaaaaggatctaggtgaagatcctttttgataatctcatgaccaaaatcccttaacgtgagttttcgttccactgagcgtcagaccccgtagaaaagatcaaaggatcttcttgagatcctttttttctgcgcgtaatctgctgcttgcaaacaaaaaaaccaccgctaccagcggtggtttgtttgccggatcaagagctaccaactctttttccgaaggtaactggcttcagcagagcgcagataccaaatactgttcttctagtgtagccgtagttaggccaccacttcaagaactctgtagcaccgcctacatacctcgctctgctaatcctgttaccagtggctgctgccagtggcgataagtcgtgtcttaccgggttggactcaagacgatagttaccggataaggcgcagcggtcgggctgaacggggggttcgtgcacacagcccagcttggagcgaacgacctacaccgaactgagatacctacagcgtgagctatgagaaagcgccacgcttcccgaagggagaaaggcggacaggtatccggtaagcggcagggtcggaacaggagagcgcacgagggagcttccagggggaaacgcctggtatctttatagtcctgtcgggtttcgccacctctgacttgagcgtcgatttttgtgatgctcgtcaggggggcggagcctatggaaaaacgccagcaacgcggcctttttacggttcctggccttttgctggccttttgctcacatgttctttcctgcgttatcccctgattctgtggataaccgtattaccgcctttgagtgagctgataccgctcgccgcagccgaacgaccgagcgcagcgagtcagtgagcgaggaagcggaagagcgcccaatacgcaaaccgcctctccccgcgcgttggccgattcattaatgcagctggcacgacaggtttcccgactggaaagcgggcagtgagcgcaacgcaattaatgtgagttagctcactcattaggcaccccaggctttacactttatgcttccggctcgtatgttgtgtggaattgtgagcggataacaatttcacacaggaaacagctatgaccatgattacgccaagcgcgcaattaaccctcactaaagggaacaaaagctggagctgcaagctt

SEQ ID NO: 915 - DNA, 7476 bp, Artificial Sequence
  Synthetic Polynucleotides
aatgtagtcttatgcaatactcttgtagtcttgcaacatggtaacgatgagttagcaacatgccttacaaggagagaaaaagcaccgtgcatgccgattggtggaagtaaggtggtacgatcgtgccttattaggaaggcaacagacgggtctgacatggattggacgaaccactgaattgccgcattgcagagatattgtatttaagtgcctagctcgatacataaacgggtctctctggttagaccagatctgagcctgggagctctctggctaactagggaacccactgcttaagcctcaataaagcttgccttgagtgcttcaagtagtgtgtgcccgtctgttgtgtgactctggtaactagagatccctcagacccttttagtcagtgtggaaaatctctagcagtggcgcccgaacagggacttgaaagcgaaagggaaaccagaggagctctctcgacgcaggactcggcttgctgaagcgcgcacggcaagaggcgaggggcggcgactggtgagtacgccaaaaattttgactagcggaggctagaaggagagagatgggtgcgagagcgtcagtattaagcgggggagaattagatcgcgatgggaaaaaattcggttaaggccagggggaaagaaaaaatataaattaaaacatatagtatgggcaagcagggagctagaacgattcgcagttaatcctggcctgttagaaacatcagaaggctgtagacaaatactgggacagctacaaccatcccttcagacaggatcagaagaacttagatcattatataatacagtagcaaccctctattgtgtgcatcaaaggatagagataaaagacaccaaggaagctttagacaagatagaggaagagcaaaacaaaagtaagaccaccgcacagcaagcggccgctgatcttcagacctggaggaggagatatgagggacaattggagaagtgaattatataaatataaagtagtaaaaattgaaccattaggagtagcacccaccaaggcaaagagaagagtggtgcagagagaaaaaagagcagtgggaataggagctttgttccttgggttcttgggagcagcaggaagcactatgggcgcagcgtcaatgacgctgacggtacaggccagacaattattgtctggtatagtgcagcagcagaacaatttgctgagggctattgaggcgcaacagcatctgttgcaactcacagtctggggcatcaagcagctccaggcaagaatcctggctgtggaaagatacctaaaggatcaacagctcctggggatttggggttgctctggaaaactcatttgcaccactgctgtgccttggaatgctagttggagtaataaatctctggaacagatttggaatcacacgacctggatggagtgggacagagaaattaacaattacacaagcttaatacactccttaattgaagaatcgcaaaaccagcaagaaaagaatgaacaagaattattggaattagataaatgggcaagtttgtggaattggtttaacataacaaattggctgtggtatataaaattattcataatgatagtaggaggcttggtaggtttaagaatagtttttgctgtactttctatagtgaatagagttaggcagggatattcaccattatcgtttcagacccacctcccaaccccgaggggacccgacaggcccgaaggaatagaagaagaaggtggagagagagacagagacagatccattcgattagtgaacggatctcgacggtatcgataagcttgggagttccgcgttacataacttacggtaaatggcccgcctggctgaccgcccaacgacccccgcccattgacgtcaataatgacgtatgttcccatagtaacgccaatagggactttccattgacgtcaatgggtggagtatttacggtaaactgcccacttggcagtacatcaagtgtatcatatgccaagtacgccccctattgacgtcaatgacggtaaatggcccgcctggcattatgcccagtacatgaccttatgggactttcctacttggcagtacatctacgtattagtcatcgctattaccatggtgatgcggttttggcagtacatcaatgggcgtggatagcggtttgactcacggggatttccaagtctccaccccattgacgtcaatgggagtttgttttggcaccaaaatcaacgggactttccaaaatgtcgtaacaactccgccccattgacgcaaatgggcggtaggcgtgtacggtgggaggtctatataagcagagctcgtttagtgaaccgtcagatcgcctggagacgccatccacgctgttttgacctccatagaagacaccgactctagaggatccccatggaagccgaggccgagagaggcaagctgcccggcaaaaagctgcccctggaagtgctgatcgagctggaagccaacgccagaaaggccggctgcaccagaggctgcctgatctgcctgagcaagatcaagtgcaccgccaagatgaagaagtacatccccggcagatgcgccgactacggcggcgataagaaaacaggccaggccggcatcgtgggagccatcgtggatatccctgagatcagcggcttcaaagaaatggaacccatggaacagtttatcgcccaggtggaccgctgcgccgattgcacaacaggctgtctgaagggcctggctaacgtgaagtgcagcgacctgctgaagaagtggctgcctggcagatgtgccaccttcgccgacaagatccagagcgaggtggacaacatcaagggactggccggcgacctcgagaccgatttctacgactacaaggacgacgatgacaaggattataaagatgatgacgataaagtcgagaccgatttctacgactacaaggacgacgatgacaagtagtctagagggcccgcggttcgaaggtaagcctatccctaaccctctcctcggtctcgattctacgcgtaccggttagtaatgagtttggaattaattctgtggaatgtgtgtcagttagggtgtggaaagtccccaggctccccaggcaggcagaagtatgcaaagcatgcatctcaattagtcagcaaccaggtgtggaaagtccccaggctccccagcaggcagaagtatgcaaagcatgcatctcaattagtcagcaaccatagtcccgcccctaactccgcccatcccgcccctaactccgcccagttccgcccattctccgccccatggctgactaattttttttatttatgcagaggccgaggccgcctctgcctctgagctattccagaagtagtgaggaggcttttttggaggcctaggcttttgcaaaaagctcccgggagcttgtatatccattttcggatctgatcagcacgtgttgacaattaatcatcggcatagtatatcggcatagtataatacgacaaggtgaggaactaaaccatggccaagcctttgtctcaagaagaatccaccctcattgaaagagcaacggctacaatcaacagcatccccatctctgaagactacagcgtcgccagcgcagctctctctagcgacggccgcatcttcactggtgtcaatgtatatcattttactgggggaccttgtgcagaactcgtggtgctgggcactgctgctgctgcggcagctggcaacctgacttgtatcgtcgcgatcggaaatgagaacaggggcatcttgagcccctgcggacggtgccgacaggtgcttctcgatctgcatcctgggatcaaagccatagtgaaggacagtgatggacagccgacggcagttgggattcgtgaattgctgccctctggttatgtgtgggagggctaagcacaattcgagctcggtacctttaagaccaatgacttacaaggcagctgtagatcttagccactttttaaaagaaaaggggggactggaagggctaattcactcccaacgaagacaagatctgctttttgcttgtactgggtctctctggttagaccagatctgagcctgggagctctctggctaactagggaacccactgcttaagcctcaataaagcttgccttgagtgcttcaagtagtgtgtgcccgtctgttgtgtgactctggtaactagagatccctcagacccttttagtcagtgtggaaaatctctagcagtagtagttcatgtcatcttattattcagtatttataacttgcaaagaaatgaatatcagagagtgagaggaacttgtttattgcagcttataatggttacaaataaagcaatagcatcacaaatttcacaaataaagcatttttttcactgcattctagttgtggtttgtccaaactcatcaatgtatcttatcatgtctggctctagctatcccgcccctaactccgcccatcccgcccctaactccgcccagttccgcccattctccgccccatggctgactaattttttttatttatgcagaggccgaggccgcctcggcctctgagctattccagaagtagtgaggaggcttttttggaggcctagggacgtacccaattcgccctatagtgagtcgtattacgcgcgctcactggccgtcgttttacaacgtcgtgactgggaaaaccctggcgttacccaacttaatcgccttgcagcacatccccctttcgccagctggcgtaatagcgaagaggcccgcaccgatcgcccttcccaacagttgcgcagcctgaatggcgaatgggacgcgccctgtagcggcgcattaagcgcggcgggtgtggtggttacgcgcagcgtgaccgctacacttgccagcgccctagcgcccgctcctttcgctttcttcccttcctttctcgccacgttcgccggctttccccgtcaagctctaaatcgggggctccctttagggttccgatttagtgctttacggcacctcgaccccaaaaaacttgattagggtgatggttcacgtagtgggccatcgccctgatagacggtttttcgccctttgacgttggagtccacgttctttaatagtggactcttgttccaaactggaacaacactcaaccctatctcggtctattcttttgatttataagggattttgccgatttcggcctattggttaaaaaatgagctgatttaacaaaaatttaacgcgaattttaacaaaatattaacgcttacaatttaggtggcacttttcggggaaatgtgcgcggaacccctatttgtttatttttctaaatacattcaaatatgtatccgctcatgagacaataaccctgataaatgcttcaataatattgaaaaaggaagagtatgagtattcaacatttccgtgtcgcccttattcccttttttgcggcattttgccttcctgtttttgctcacccagaaacgctggtgaaagtaaaagatgctgaagatcagttgggtgcacgagtgggttacatcgaactggatctcaacagcggtaagatccttgagagttttcgccccgaagaacgttttccaatgatgagcacttttaaagttctgctatgtggcgcggtattatcccgtattgacgccgggcaagagcaactcggtcgccgcatacactattctcagaatgacttggttgagtactcaccagtcacagaaaagcatcttacggatggcatgacagtaagagaattatgcagtgctgccataaccatgagtgataacactgcggccaacttacttctgacaacgatcggaggaccgaaggagctaaccgcttttttgcacaacatgggggatcatgtaactcgccttgatcgttgggaaccggagctgaatgaagccataccaaacgacgagcgtgacaccacgatgcctgtagcaatggcaacaacgttgcgcaaactattaactggcgaactacttactctagcttcccggcaacaattaatagactggatggaggcggataaagttgcaggaccacttctgcgctcggcccttccggctggctggtttattgctgataaatctggagccggtgagcgtgggtctcgcggtatcattgcagcactggggccagatggtaagccctcccgtatcgtagttatctacacgacggggagtcaggcaactatggatgaacgaaatagacagatcgctgagataggtgcctcactgattaagcattggtaactgtcagaccaagtttactcatatatactttagattgatttaaaacttcatttttaatttaaaaggatctaggtgaagatcctttttgataatctcatgaccaaaatcccttaacgtgagttttcgttccactgagcgtcagaccccgtagaaaagatcaaaggatcttcttgagatcctttttttctgcgcgtaatctgctgcttgcaaacaaaaaaaccaccgctaccagcggtggtttgtttgccggatcaagagctaccaactctttttccgaaggtaactggcttcagcagagcgcagataccaaatactgttcttctagtgtagccgtagttaggccaccacttcaagaactctgtagcaccgcctacatacctcgctctgctaatcctgttaccagtggctgctgccagtggcgataagtcgtgtcttaccgggttggactcaagacgatagttaccggataaggcgcagcggtcgggctgaacggggggttcgtgcacacagcccagcttggagcgaacgacctacaccgaactgagatacctacagcgtgagctatgagaaagcgccacgcttcccgaagggagaaaggcggacaggtatccggtaagcggcagggtcggaacaggagagcgcacgagggagcttccagggggaaacgcctggtatctttatagtcctgtcgggtttcgccacctctgacttgagcgtcgatttttgtgatgctcgtcaggggggcggagcctatggaaaaacgccagcaacgcggcctttttacggttcctggccttttgctggccttttgctcacatgttctttcctgcgttatcccctgattctgtggataaccgtattaccgcctttgagtgagctgataccgctcgccgcagccgaacgaccgagcgcagcgagtcagtgagcgaggaagcggaagagcgcccaatacgcaaaccgcctctccccgcgcgttggccgattcattaatgcagctggcacgacaggtttcccgactggaaagcgggcagtgagcgcaacgcaattaatgtgagttagctcactcattaggcaccccaggctttacactttatgcttccggctcgtatgttgtgtggaattgtgagcggataacaatttcacacaggaaacagctatgaccatgattacgccaagcgcgcaattaaccctcactaaagggaacaaaagctggagctgcaagctt

SEQ ID NO: 916 - DNA, 8663 bp, Artificial Sequence
  Synthetic Polynucleotides
aatgtagtcttatgcaatactcttgtagtcttgcaacatggtaacgatgagttagcaacatgccttacaaggagagaaaaagcaccgtgcatgccgattggtggaagtaaggtggtacgatcgtgccttattaggaaggcaacagacgggtctgacatggattggacgaaccactgaattgccgcattgcagagatattgtatttaagtgcctagctcgatacataaacgggtctctctggttagaccagatctgagcctgggagctctctggctaactagggaacccactgcttaagcctcaataaagcttgccttgagtgcttcaagtagtgtgtgcccgtctgttgtgtgactctggtaactagagatccctcagacccttttagtcagtgtggaaaatctctagcagtggcgcccgaacagggacttgaaagcgaaagggaaaccagaggagctctctcgacgcaggactcggcttgctgaagcgcgcacggcaagaggcgaggggcggcgactggtgagtacgccaaaaattttgactagcggaggctagaaggagagagatgggtgcgagagcgtcagtattaagcgggggagaattagatcgcgatgggaaaaaattcggttaaggccagggggaaagaaaaaatataaattaaaacatatagtatgggcaagcagggagctagaacgattcgcagttaatcctggcctgttagaaacatcagaaggctgtagacaaatactgggacagctacaaccatcccttcagacaggatcagaagaacttagatcattatataatacagtagcaaccctctattgtgtgcatcaaaggatagagataaaagacaccaaggaagctttagacaagatagaggaagagcaaaacaaaagtaagaccaccgcacagcaagcggccgctgatcttcagacctggaggaggagatatgagggacaattggagaagtgaattatataaatataaagtagtaaaaattgaaccattaggagtagcacccaccaaggcaaagagaagagtggtgcagagagaaaaaagagcagtgggaataggagctttgttccttgggttcttgggagcagcaggaagcactatgggcgcagcgtcaatgacgctgacggtacaggccagacaattattgtctggtatagtgcagcagcagaacaatttgctgagggctattgaggcgcaacagcatctgttgcaactcacagtctggggcatcaagcagctccaggcaagaatcctggctgtggaaagatacctaaaggatcaacagctcctggggatttggggttgctctggaaaactcatttgcaccactgctgtgccttggaatgctagttggagtaataaatctctggaacagatttggaatcacacgacctggatggagtgggacagagaaattaacaattacacaagcttaatacactccttaattgaagaatcgcaaaaccagcaagaaaagaatgaacaagaattattggaattagataaatgggcaagtttgtggaattggtttaacataacaaattggctgtggtatataaaattattcataatgatagtaggaggcttggtaggtttaagaatagtttttgctgtactttctatagtgaatagagttaggcagggatattcaccattatcgtttcagacccacctcccaaccccgaggggacccgacaggcccgaaggaatagaagaagaaggtggagagagagacagagacagatccattcgattagtgaacggatctcgacggtatcggttaacttttaaaagaaaaggggggattggggggtacagtgcaggggaaagaatagtagacataatagcaacagacatacaaactaaagaattacaaaaacaaattacaaaattcaaaattttatcgataagctttgcaaagatggataaagttttaaacagagaggaatctttgcagctaatggaccttctaggtcttgaaaggagtgcctcgtgaggctccggtgcccgtcagtgggcagagcgcacatcgcccacagtccccgagaagttggggggaggggtcggcaattgaaccggtgcctagagaaggtggcgcggggtaaactgggaaagtgatgtcgtgtactggctccgcctttttcccgagggtgggggagaaccgtatataagtgcagtagtcgccgtgaacgttctttttcgcaacgggtttgccgccagaacacaggtaagtgccgtgtgtggttcccgcgggcctggcctctttacgggttatggcccttgcgtgccttgaattacttccacctggctgcagtacgtgattcttgatcccgagcttcgggttggaagtgggtgggagagttcgaggccttgcgcttaaggagccccttcgcctcgtgcttgagttgaggcctggcctgggcgctggggccgccgcgtgcgaatctggtggcaccttcgcgcctgtctcgctgctttcgataagtctctagccatttaaaatttttgatgacctgctgcgacgctttttttctggcaagatagtcttgtaaatgcgggccaagatctgcacactggtatttcggtttttggggccgcgggcggcgacggggcccgtgcgtcccagcgcacatgttcggcgaggcggggcctgcgagcgcggccaccgagaatcggacgggggtagtctcaagctggccggcctgctctggtgcctggcctcgcgccgccgtgtatcgccccgccctgggcggcaaggctggcccggtcggcaccagttgcgtgagcggaaagatggccgcttcccggccctgctgcagggagctcaaaatggaggacgcggcgctcgggagagcgggcgggtgagtcacccacacaaaggaaaagggcctttccgtcctcagccgtcgcttcatgtgactccacggagtaccgggcgccgtccaggcacctcgattagttctcgaccttttggagtacgtcgtctttaggttggggggaggggttttatgcgatggagtttccccacactgagtgggtggagactgaagttaggccagcttggcacttgatgtaattctccttggaatttgccctttttgagtttggatcttggttcattctcaagcctcagacagtggttcaaagtttttttcttccatttcaggtgtcgtgaggaattagcttggtactaatacgactcactatagggagacccaagctggctagttaagcttgatatcgaattcctgcagcccgggggatctgctagcatgaccgagtacaagcccacggtgcgcctcgccacccgcgacgacgtccccagggccgtacgcaccctcgccgccgcgttcgccgactaccccgccacgcgccacaccgtcgatccggaccgccacatcgagcgggtcaccgagctgcaagaactcttcctcacgcgcgtcgggctcgacatcggcaaggtgtgggtcgcggacgacggcgccgcggtggcggtctggaccacgccggagagcgtcgaagcgggggcggtgttcgccgagatcggcccgcgcatggccgagttgagcggttcccggctggccgcgcagcaacagatggaaggcctcctggcgccgcaccggcccaaggagcccgcgtggttcctggccaccgtcggcgtctcgcccgaccaccagggcaagggtctgggcagcgccgtcgtgctccccggagtggaggcggccgagcgcgccggggtgcccgccttcctggagacctccgcgccccgcaacctccccttctacgagcggctcggcttcaccgtcaccgccgacgtcgaggtgcccgaaggaccgcgcacctggtgcatgacccgcaagcccggtgccactagtggctccggcgagggcagaggaagtctactaacctgcggagatgtggaagaaaatcctggcccacatatgaagcccaccgagaacaacgaagacttcaacatcgtggccgtggccagcaacttcgcgaccacggatctcgatgctgaccgcgggaagttgcccggcaagaagctgccgctggaggtgctcaaagagatggaagccaatgcccggaaagctggctgcaccaggggctgtctgatctgcctgtcccacatcaagtgcacgcccaagatgaagaagttcatcccaggacgctgccacacctacgaaggcgacaaagagtccgcacagggcggcataggcgaggcgatcgtcgacattcctgagattcctgggttcaaggacttggagcccatggagcagttcatcgcacaggtcgatctgtgtgtggactgcacaactggctgcctcaaagggcttgccaacgtgcagtgttctgacctgctcaagaagtggctgccgcaacgctgtgcgacctttgccagcaagatccagggccaggtggacaagatcaagggggccggtggtgactaactcgactccggatgatcagggccctgtacagatatcgacaatcaacctctggattacaaaatttgtgaaagattgactggtattcttaactatgttgctccttttacgctatgtggatacgctgctttaatgcctttgtatcatgctattgcttcccgtatggctttcattttctcctccttgtataaatcctggttgctgtctctttatgaggagttgtggcccgttgtcaggcaacgtggcgtggtgtgcactgtgtttgctgacgcaacccccactggttggggcattgccaccacctgtcagctcctttccgggactttcgctttccccctccctattgccacggcggaactcatcgccgcctgccttgcccgctgctggacaggggctcggctgttgggcactgacaattccgtggtgttgtcggggaagctgacgtcctttccatggctgctcgcctgtgttgccacctggattctgcgcgggacgtccttctgctacgtcccttcggccctcaatccagcggaccttccttcccgcggcctgctgccggctctgcggcctcttccgcgtcttcgccttcgccctcagacgagtcggatctccctttgggccgcctccccgcctggaattcgagctcggtacctttaagaccaatgacttacaaggcagctgtagatcttagccactttttaaaagaaaaggggggactggaagggctaattcactcccaacgaagacaagatctgctttttgcttgtactgggtctctctggttagaccagatctgagcctgggagctctctggctaactagggaacccactgcttaagcctcaataaagcttgccttgagtgcttcaagtagtgtgtgcccgtctgttgtgtgactctggtaactagagatccctcagacccttttagtcagtgtggaaaatctctagcagtagtagttcatgtcatcttattattcagtatttataacttgcaaagaaatgaatatcagagagtgagaggaacttgtttattgcagcttataatggttacaaataaagcaatagcatcacaaatttcacaaataaagcatttttttcactgcattctagttgtggtttgtccaaactcatcaatgtatcttatcatgtctggctctagctatcccgcccctaactccgcccatcccgcccctaactccgcccagttccgcccattctccgccccatggctgactaattttttttatttatgcagaggccgaggccgcctcggcctctgagctattccagaagtagtgaggaggcttttttggaggcctagggacgtacccaattcgccctatagtgagtcgtattacgcgcgctcactggccgtcgttttacaacgtcgtgactgggaaaaccctggcgttacccaacttaatcgccttgcagcacatccccctttcgccagctggcgtaatagcgaagaggcccgcaccgatcgcccttcccaacagttgcgcagcctgaatggcgaatgggacgcgccctgtagcggcgcattaagcgcggcgggtgtggtggttacgcgcagcgtgaccgctacacttgccagcgccctagcgcccgctcctttcgctttcttcccttcctttctcgccacgttcgccggctttccccgtcaagctctaaatcgggggctccctttagggttccgatttagtgctttacggcacctcgaccccaaaaaacttgattagggtgatggttcacgtagtgggccatcgccctgatagacggtttttcgccctttgacgttggagtccacgttctttaatagtggactcttgttccaaactggaacaacactcaaccctatctcggtctattcttttgatttataagggattttgccgatttcggcctattggttaaaaaatgagctgatttaacaaaaatttaacgcgaattttaacaaaatattaacgcttacaatttaggtggcacttttcggggaaatgtgcgcggaacccctatttgtttatttttctaaatacattcaaatatgtatccgctcatgagacaataaccctgataaatgcttcaataatattgaaaaaggaagagtatgagtattcaacatttccgtgtcgcccttattcccttttttgcggcattttgccttcctgtttttgctcacccagaaacgctggtgaaagtaaaagatgctgaagatcagttgggtgcacgagtgggttacatcgaactggatctcaacagcggtaagatccttgagagttttcgccccgaagaacgttttccaatgatgagcacttttaaagttctgctatgtggcgcggtattatcccgtattgacgccgggcaagagcaactcggtcgccgcatacactattctcagaatgacttggttgagtactcaccagtcacagaaaagcatcttacggatggcatgacagtaagagaattatgcagtgctgccataaccatgagtgataacactgcggccaacttacttctgacaacgatcggaggaccgaaggagctaaccgcttttttgcacaacatgggggatcatgtaactcgccttgatcgttgggaaccggagctgaatgaagccataccaaacgacgagcgtgacaccacgatgcctgtagcaatggcaacaacgttgcgcaaactattaactggcgaactacttactctagcttcccggcaacaattaatagactggatggaggcggataaagttgcaggaccacttctgcgctcggcccttccggctggctggtttattgctgataaatctggagccggtgagcgtgggtctcgcggtatcattgcagcactggggccagatggtaagccctcccgtatcgtagttatctacacgacggggagtcaggcaactatggatgaacgaaatagacagatcgctgagataggtgcctcactgattaagcattggtaactgtcagaccaagtttactcatatatactttagattgatttaaaacttcatttttaatttaaaaggatctaggtgaagatcctttttgataatctcatgaccaaaatcccttaacgtgagttttcgttccactgagcgtcagaccccgtagaaaagatcaaaggatcttcttgagatcctttttttctgcgcgtaatctgctgcttgcaaacaaaaaaaccaccgctaccagcggtggtttgtttgccggatcaagagctaccaactctttttccgaaggtaactggcttcagcagagcgcagataccaaatactgttcttctagtgtagccgtagttaggccaccacttcaagaactctgtagcaccgcctacatacctcgctctgctaatcctgttaccagtggctgctgccagtggcgataagtcgtgtcttaccgggttggactcaagacgatagttaccggataaggcgcagcggtcgggctgaacggggggttcgtgcacacagcccagcttggagcgaacgacctacaccgaactgagatacctacagcgtgagctatgagaaagcgccacgcttcccgaagggagaaaggcggacaggtatccggtaagcggcagggtcggaacaggagagcgcacgagggagcttccagggggaaacgcctggtatctttatagtcctgtcgggtttcgccacctctgacttgagcgtcgatttttgtgatgctcgtcaggggggcggagcctatggaaaaacgccagcaacgcggcctttttacggttcctggccttttgctggccttttgctcacatgttctttcctgcgttatcccctgattctgtggataaccgtattaccgcctttgagtgagctgataccgctcgccgcagccgaacgaccgagcgcagcgagtcagtgagcgaggaagcggaagagcgcccaatacgcaaaccgcctctccccgcgcgttggccgattcattaatgcagctggcacgacaggtttcccgactggaaagcgggcagtgagcgcaacgcaattaatgtgagttagctcactcattaggcaccccaggctttacactttatgcttccggctcgtatgttgtgtggaattgtgagcggataacaatttcacacaggaaacagctatgaccatgattacgccaagcgcgcaattaaccctcactaaagggaacaaaagctggagctgcaagctt

SEQ ID NO: 917 - DNA, 7524 bp, Artificial Sequence
  Synthetic Polynucleotides
tgaaagaccccacctgtaggtttggcaagctagcttaagtaacgccattttgcaaggcatggaaaatacataactgagaatagagaagttcagatcaaggttaggaacagagagacagcagaatatgggccaaacaggatatctgtggtaagcagttcctgccccggctcagggccaagaacagatggtccccagatgcggtcccgccctcagcagtttctagagaaccatcagatgtttccagggtgccccaaggacctgaaatgaccctgtgccttatttgaactaaccaatcagttcgcttctcgcttctgttcgcgcgcttctgctccccgagctcaataaaagagcccacaacccctcactcggcgcgccagtcctccgatagactgcgtcgcccgggtacccgtattcccaataaagcctcttgctgtttgcatccgaatcgtggactcgctgatccttgggagggtctcctcagattgattgactgcccacctcgggggtctttcatttggaggttccaccgagatttggagacccctgcccagggaccaccgacccccccgccgggaggtaagctggccagcggtcgtttcgtgtctgtctctgtctttgtgcgtgtttgtgccggcatctaatgtttgcgcctgcgtctgtactagttagctaactagctctgtatctggcggacccgtggtggaactgacgagttctgaacacccggccgcaaccctgggagacgtcccagggactttgggggccgtttttgtggcccgacctgaggaagggagtcgatgtggaatccgaccccgtcaggatatgtggttctggtaggagacgagaacctaaaacagttcccgcctccgtctgaatttttgctttcggtttggaaccgaagccgcgcgtcttgtctgctgcagcgctgcagcatcgttctgtgttgtctctgtctgactgtgtttctgtatttgtctgaaaattagggccagactgttaccactcccttaagtttgaccttaggtcactggaaagatgtcgagcggatcgctcacaaccagtcggtagatgtcaagaagagacgttgggttaccttctgctctgcagaatggccaacctttaacgtcggatggccgcgagacggcacctttaaccgagacctcatcacccaggttaagatcaaggtcttttcacctggcccgcatggacacccagaccaggtcccctacatcgtgacctgggaagccttggcttttgacccccctccctgggtcaagccctttgtacaccctaagcctccgcctcctcttcctccatccgccccgtctctcccccttgaacctcctcgttcgaccccgcctcgtatcctccctttatccagccctcactccttctctaggcgccggaattagatccccaccatggtcttcacactcgaagatttcgttggggactggcgacagacagccggctacaacctggaccaagtccttgaacagggaggtgtgtccagtttgtttcagaatctcggggtgtccgtaactccgatccaaaggattgtcctgagcggtgaaaatgggctgaagatcgacatccatgtcatcatcccgtatgaaggtctgagcggcgaccaaatgggccagatcgaaaaaatttttaaggtggtgtaccctgtggatgatcatcactttaaggtgatcctgcactatggcacactggtaatcgacggggttacgccgaacatgatcgactatttcggacggccctatgaaggcatcgccgtgttcgacggcaaaaagatcactgtaacagggaccctgtggaacggcaacaaaattatcgacgagcgcctgatcaaccccgacggctccctgctgttccgagtaaccatcaacggagtgaccggctggcggctgtgcgaacgcattctggcgagttggaaggatgcctctggatggtcttaagtcgaggttaacgaattctaccgggtaggggaggcgcttttcccaaggcagtctggagcatgcgctttagcagccccgctgggcacttggcgctacacaagtggcctctggcctcgcacacattccacatccaccggtaggcgccaaccggctccgttctttggtggccccttcgcgccaccttctactcctcccctagtcaggaagttcccccccgccccgcagctcgcgtcgtgcaggacgtgacaaatggaagtagcacgtctcactagtctcgtgcagatggacagcaccgctgagcaatggaagcgggtaggcctttggggcagcggccaatagcagctttgctccttcgctttctgggctcagaggctgggaaggggtgggtccgggggcgggctcaggggcgggctcaggggcggggcgggcgcccgaaggtcctccggaggcccggcattctgcacgcttcaaaagcgcacgtctgccgcgctgttctcctcttcctcatctccgggcctttcgacctgcatcccgccaccatgaaaaagcctgaactcaccgcgacgtctgtcgagaagtttctgatcgaaaagttcgacagcgtctccgacctgatgcagctctcggagggcgaagaatctcgtgctttcagcttcgatgtaggagggcgtggatatgtcctgcgggtaaatagctgcgccgatggtttctacaaagatcgttatgtttatcggcactttgcatcggccgcgctcccgattccggaagtgcttgacattggggaattcagcgagagcctgacctattgcatctcccgccgtgcacagggtgtcacgttgcaagacctgcctgaaaccgaactgcccgctgttctgcagccggtcgcggaggccatggatgcgatcgctgcggccgatcttagccagacgagcgggttcggcccattcggaccgcaaggaatcggtcaatacactacatggcgtgatttcatatgcgcgattgctgatccccatgtgtatcactggcaaactgtgatggacgacaccgtcagtgcgtccgtcgcgcaggctctcgatgagctgatgctttgggccgaggactgccccgaagtccggcacctcgtgcacgcggatttcggctccaacaatgtcctgacggacaatggccgcataacagcggtcattgactggagcgaggcgatgttcggggattcccaatacgaggtcgccaacatcttcttctggaggccgtggttggcttgtatggagcagcagacgcgctacttcgagcggaggcatccggagcttgcaggatcgccgcggctccgggcgtatatgctccgcattggtcttgaccaactctatcagagcttggttgacggcaatttcgatgatgcagcttgggcgcagggtcgatgcgacgcaatcgtccgatccggagccgggactgtcgggcgtacacaaatcgcccgcagaagcgcggccgtctggaccgatggctgtgtagaagtactcgccgatagtggaaaccgacgccccagcactcgtccgagggcaaaggaatagagtagatgccgaccgaacaagagctgatttcgagaacgcctcagccagcaactcgcgcgagcctagcaaggcaaatgcgagagaacggccttacgcttggtggcacagttctcgtccacagttcgctaagctcgctcggctgggtcgcgggagggccggtcgcagtgattcaggcccttctggattgtgttggtccccagggcacgattgtcatgcccacgcactcgggtgatctgactgatcccgcagattggagatcgccgcccgtgcctgccgattgggtgcagatccgtcgacctgcagccaagcttatcgataaaataaaagattttatttagtctccagaaaaaggggggaatgaaagaccccacctgtaggtttggcaagctagcttaagtaacgccattttgcaaggcatggaaaatacataactgagaatagagaagttcagatcaaggttaggaacagagagacagcagaatatgggccaaacaggatatctgtggtaagcagttcctgccccggctcagggccaagaacagatggtccccagatgcggtcccgccctcagcagtttctagagaaccatcagatgtttccagggtgccccaaggacctgaaatgaccctgtgccttatttgaactaaccaatcagttcgcttctcgcttctgttcgcgcgcttctgctccccgagctcaataaaagagcccacaacccctcactcggcgcgccagtcctccgatagactgcgtcgcccgggtacccgtgtatccaataaaccctcttgcagttgcatccgacttgtggtctcgctgttccttgggagggtctcctctgagtgattgactacccgtcagcgggggtctttcatgggtaacagtttcttgaagttggagaacaacattctgagggtaggagtcgaatattaagtaatcctgactcaattagccactgttttgaatccacatactccaatactcctgaaatagttcattatggacagcgcagaagagctggggagaattaattcgtaatcatggtcatagctgtttcctgtgtgaaattgttatccgctcacaattccacacaacatacgagccggaagcataaagtgtaaagcctggggtgcctaatgagtgagctaactcacattaattgcgttgcgctcactgcccgctttccagtcgggaaacctgtcgtgccagctgcattaatgaatcggccaacgcgcggggagaggcggtttgcgtattgggcgctcttccgcttcctcgctcactgactcgctgcgctcggtcgttcggctgcggcgagcggtatcagctcactcaaaggcggtaatacggttatccacagaatcaggggataacgcaggaaagaacatgtgagcaaaaggccagcaaaaggccaggaaccgtaaaaaggccgcgttgctggcgtttttccataggctccgcccccctgacgagcatcacaaaaatcgacgctcaagtcagaggtggcgaaacccgacaggactataaagataccaggcgtttccccctggaagctccctcgtgcgctctcctgttccgaccctgccgcttaccggatacctgtccgcctttctcccttcgggaagcgtggcgctttctcatagctcacgctgtaggtatctcagttcggtgtaggtcgttcgctccaagctgggctgtgtgcacgaaccccccgttcagcccgaccgctgcgccttatccggtaactatcgtcttgagtccaacccggtaagacacgacttatcgccactggcagcagccactggtaacaggattagcagagcgaggtatgtaggcggtgctacagagttcttgaagtggtggcctaactacggctacactagaaggacagtatttggtatctgcgctctgctgaagccagttaccttcggaaaaagagttggtagctcttgatccggcaaacaaaccaccgctggtagcggtggtttttttgtttgcaagcagcagattacgcgcagaaaaaaaggatctcaagaagatcctttgatcttttctacggggtctgacgctcagtggaacgaaaactcacgttaagggattttggtcatgagattatcaaaaaggatcttcacctagatccttttaaattaaaaatgaagttttaaatcaatctaaagtatatatgagtaaacttggtctgacagttaccaatgcttaatcagtgaggcacctatctcagcgatctgtctatttcgttcatccatagttgcctgactccccgtcgtgtagataactacgatacgggagggcttaccatctggccccagtgctgcaatgataccgcgagacccacgctcaccggctccagatttatcagcaataaaccagccagccggaagggccgagcgcagaagtggtcctgcaactttatccgcctccatccagtctattaattgttgccgggaagctagagtaagtagttcgccagttaatagtttgcgcaacgttgttgccattgctacaggcatcgtggtgtcacgctcgtcgtttggtatggcttcattcagctccggttcccaacgatcaaggcgagttacatgatcccccatgttgtgcaaaaaagcggttagctccttcggtcctccgatcgttgtcagaagtaagttggccgcagtgttatcactcatggttatggcagcactgcataattctcttactgtcatgccatccgtaagatgcttttctgtgactggtgagtactcaaccaagtcattctgagaatagtgtatgcggcgaccgagttgctcttgcccggcgtcaatacgggataataccgcgccacatagcagaactttaaaagtgctcatcattggaaaacgttcttcggggcgaaaactctcaaggatcttaccgctgttgagatccagttcgatgtaacccactcgtgcacccaactgatcttcagcatcttttactttcaccagcgtttctgggtgagcaaaaacaggaaggcaaaatgccgcaaaaaagggaataagggcgacacggaaatgttgaatactcatactcttcctttttcaatattattgaagcatttatcagggttattgtctcatgagcggatacatatttgaatgtatttagaaaaataaacaaataggggttccgcgcacatttccccgaaaagtgccacctgacgtctaagaaaccattattatcatgacattaacctataaaaataggcgtatcacgaggccctttcgtctcgcgcgtttcggtgatgacggtgaaaacctctgacacatgcagctcccggagacggtcacagcttgtctgtaagcggatgccgggagcagacaagcccgtcagggcgcgtcagcgggtgttggcgggtgtcggggctggcttaactatgcggcatcagagcagattgtactgagagtgcaccatatgcggtgtgaaataccgcacagatgcgtaaggagaaaataccgcatcaggcgccattcgccattcaggctgcgcaactgttgggaagggcgatcggtgcgggcctcttcgctattacgccagctggcgaaagggggatgtgctgcaaggcgattaagttgggtaacgccagggttttcccagtcacgacgttgtaaaacgacggcgcaaggaatggtgcatgcaaggagatggcgcccaacagtcccccggccacggggcctgccaccatacccacgccgaaacaagcgctcatgagcccgaagtggcgagcccgatcttccccatcggtgatgtcggcgatataggcgccagcaaccgcacctgtggcgccggtgatgccggccacgatgcgtccggcgtagaggcgattagtccaatttgttaaagacaggatatcagtggtccaggctctagttttgactcaacaatatcaccagctgaagcctatagagtacgagccatagataaaataaaagattttatttagtctccagaaaaagggggga

SEQ ID NO: 918 - DNA, 7476 bp, Artificial Sequence
  Synthetic Polynucleotides
aatgtagtcttatgcaatactcttgtagtcttgcaacatggtaacgatgagttagcaacatgccttacaaggagagaaaaagcaccgtgcatgccgattggtggaagtaaggtggtacgatcgtgccttattaggaaggcaacagacgggtctgacatggattggacgaaccactgaattgccgcattgcagagatattgtatttaagtgcctagctcgatacataaacgggtctctctggttagaccagatctgagcctgggagctctctggctaactagggaacccactgcttaagcctcaataaagcttgccttgagtgcttcaagtagtgtgtgcccgtctgttgtgtgactctggtaactagagatccctcagacccttttagtcagtgtggaaaatctctagcagtggcgcccgaacagggacttgaaagcgaaagggaaaccagaggagctctctcgacgcaggactcggcttgctgaagcgcgcacggcaagaggcgaggggcggcgactggtgagtacgccaaaaattttgactagcggaggctagaaggagagagatgggtgcgagagcgtcagtattaagcgggggagaattagatcgcgatgggaaaaaattcggttaaggccagggggaaagaaaaaatataaattaaaacatatagtatgggcaagcagggagctagaacgattcgcagttaatcctggcctgttagaaacatcagaaggctgtagacaaatactgggacagctacaaccatcccttcagacaggatcagaagaacttagatcattatataatacagtagcaaccctctattgtgtgcatcaaaggatagagataaaagacaccaaggaagctttagacaagatagaggaagagcaaaacaaaagtaagaccaccgcacagcaagcggccgctgatcttcagacctggaggaggagatatgagggacaattggagaagtgaattatataaatataaagtagtaaaaattgaaccattaggagtagcacccaccaaggcaaagagaagagtggtgcagagagaaaaaagagcagtgggaataggagctttgttccttgggttcttgggagcagcaggaagcactatgggcgcagcgtcaatgacgctgacggtacaggccagacaattattgtctggtatagtgcagcagcagaacaatttgctgagggctattgaggcgcaacagcatctgttgcaactcacagtctggggcatcaagcagctccaggcaagaatcctggctgtggaaagatacctaaaggatcaacagctcctggggatttggggttgctctggaaaactcatttgcaccactgctgtgccttggaatgctagttggagtaataaatctctggaacagatttggaatcacacgacctggatggagtgggacagagaaattaacaattacacaagcttaatacactccttaattgaagaatcgcaaaaccagcaagaaaagaatgaacaagaattattggaattagataaatgggcaagtttgtggaattggtttaacataacaaattggctgtggtatataaaattattcataatgatagtaggaggcttggtaggtttaagaatagtttttgctgtactttctatagtgaatagagttaggcagggatattcaccattatcgtttcagacccacctcccaaccccgaggggacccgacaggcccgaaggaatagaagaagaaggtggagagagagacagagacagatccattcgattagtgaacggatctcgacggtatcgataagcttgggagttccgcgttacataacttacggtaaatggcccgcctggctgaccgcccaacgacccccgcccattgacgtcaataatgacgtatgttcccatagtaacgccaatagggactttccattgacgtcaatgggtggagtatttacggtaaactgcccacttggcagtacatcaagtgtatcatatgccaagtacgccccctattgacgtcaatgacggtaaatggcccgcctggcattatgcccagtacatgaccttatgggactttcctacttggcagtacatctacgtattagtcatcgctattaccatggtgatgcggttttggcagtacatcaatgggcgtggatagcggtttgactcacggggatttccaagtctccaccccattgacgtcaatgggagtttgttttggcaccaaaatcaacgggactttccaaaatgtcgtaacaactccgccccattgacgcaaatgggcggtaggcgtgtacggtgggaggtctatataagcagagctcgtttagtgaaccgtcagatcgcctggagacgccatccacgctgttttgacctccatagaagacaccgactctagaggatccccaccatgaagcccaccgagaacaacgaagacttcaacatcgtggccgtggccagcaacttcgcgaccacggatctcgatgctgaccgcgggaagttgcccggcaagaagctgccgctggaggtgctcaaagagatggaagccaatgcccggaaagctggctgcaccaggggctgtctgatctgcctgtcccacatcaagtgcacgcccaagatgaagaagttcatcccaggacgctgccacacctacgaaggcgacaaagagtccgcacagggcggcataggcgaggcgatcgtcgacattcctgagattcctgggttcaaggacttggagcccatggagcagttcatcgcacaggtcgatctgtgtgtggactgcacaactggctgcctcaaagggcttgccaacgtgcagtgttctgacctgctcaagaagtggctgccgcaacgctgtgcgacctttgccagcaagatccagggccaggtggacaagatcaagggggccggtggtgacctcgagaccgatttctacgactacaaggacgacgatgacaagtagtctagagggcccgcggttcgaaggtaagcctatccctaaccctctcctcggtctcgattctacgcgtaccggttagtaatgagtttggaattaattctgtggaatgtgtgtcagttagggtgtggaaagtccccaggctccccaggcaggcagaagtatgcaaagcatgcatctcaattagtcagcaaccaggtgtggaaagtccccaggctccccagcaggcagaagtatgcaaagcatgcatctcaattagtcagcaaccatagtcccgcccctaactccgcccatcccgcccctaactccgcccagttccgcccattctccgccccatggctgactaattttttttatttatgcagaggccgaggccgcctctgcctctgagctattccagaagtagtgaggaggcttttttggaggcctaggcttttgcaaaaagctcccgggagcttgtatatccattttcggatctgatcagcacgtgttgacaattaatcatcggcatagtatatcggcatagtataatacgacaaggtgaggaactaaaccatggccaagcctttgtctcaagaagaatccaccctcattgaaagagcaacggctacaatcaacagcatccccatctctgaagactacagcgtcgccagcgcagctctctctagcgacggccgcatcttcactggtgtcaatgtatatcattttactgggggaccttgtgcagaactcgtggtgctgggcactgctgctgctgcggcagctggcaacctgacttgtatcgtcgcgatcggaaatgagaacaggggcatcttgagcccctgcggacggtgccgacaggtgcttctcgatctgcatcctgggatcaaagccatagtgaaggacagtgatggacagccgacggcagttgggattcgtgaattgctgccctctggttatgtgtgggagggctaagcacaattcgagctcggtacctttaagaccaatgacttacaaggcagctgtagatcttagccactttttaaaagaaaaggggggactggaagggctaattcactcccaacgaagacaagatctgctttttgcttgtactgggtctctctggttagaccagatctgagcctgggagctctctggctaactagggaacccactgcttaagcctcaataaagcttgccttgagtgcttcaagtagtgtgtgcccgtctgttgtgtgactctggtaactagagatccctcagacccttttagtcagtgtggaaaatctctagcagtagtagttcatgtcatcttattattcagtatttataacttgcaaagaaatgaatatcagagagtgagaggaacttgtttattgcagcttataatggttacaaataaagcaatagcatcacaaatttcacaaataaagcatttttttcactgcattctagttgtggtttgtccaaactcatcaatgtatcttatcatgtctggctctagctatcccgcccctaactccgcccatcccgcccctaactccgcccagttccgcccattctccgccccatggctgactaattttttttatttatgcagaggccgaggccgcctcggcctctgagctattccagaagtagtgaggaggcttttttggaggcctagggacgtacccaattcgccctatagtgagtcgtattacgcgcgctcactggccgtcgttttacaacgtcgtgactgggaaaaccctggcgttacccaacttaatcgccttgcagcacatccccctttcgccagctggcgtaatagcgaagaggcccgcaccgatcgcccttcccaacagttgcgcagcctgaatggcgaatgggacgcgccctgtagcggcgcattaagcgcggcgggtgtggtggttacgcgcagcgtgaccgctacacttgccagcgccctagcgcccgctcctttcgctttcttcccttcctttctcgccacgttcgccggctttccccgtcaagctctaaatcgggggctccctttagggttccgatttagtgctttacggcacctcgaccccaaaaaacttgattagggtgatggttcacgtagtgggccatcgccctgatagacggtttttcgccctttgacgttggagtccacgttctttaatagtggactcttgttccaaactggaacaacactcaaccctatctcggtctattcttttgatttataagggattttgccgatttcggcctattggttaaaaaatgagctgatttaacaaaaatttaacgcgaattttaacaaaatattaacgcttacaatttaggtggcacttttcggggaaatgtgcgcggaacccctatttgtttatttttctaaatacattcaaatatgtatccgctcatgagacaataaccctgataaatgcttcaataatattgaaaaaggaagagtatgagtattcaacatttccgtgtcgcccttattcccttttttgcggcattttgccttcctgtttttgctcacccagaaacgctggtgaaagtaaaagatgctgaagatcagttgggtgcacgagtgggttacatcgaactggatctcaacagcggtaagatccttgagagttttcgccccgaagaacgttttccaatgatgagcacttttaaagttctgctatgtggcgcggtattatcccgtattgacgccgggcaagagcaactcggtcgccgcatacactattctcagaatgacttggttgagtactcaccagtcacagaaaagcatcttacggatggcatgacagtaagagaattatgcagtgctgccataaccatgagtgataacactgcggccaacttacttctgacaacgatcggaggaccgaaggagctaaccgcttttttgcacaacatgggggatcatgtaactcgccttgatcgttgggaaccggagctgaatgaagccataccaaacgacgagcgtgacaccacgatgcctgtagcaatggcaacaacgttgcgcaaactattaactggcgaactacttactctagcttcccggcaacaattaatagactggatggaggcggataaagttgcaggaccacttctgcgctcggcccttccggctggctggtttattgctgataaatctggagccggtgagcgtgggtctcgcggtatcattgcagcactggggccagatggtaagccctcccgtatcgtagttatctacacgacggggagtcaggcaactatggatgaacgaaatagacagatcgctgagataggtgcctcactgattaagcattggtaactgtcagaccaagtttactcatatatactttagattgatttaaaacttcatttttaatttaaaaggatctaggtgaagatcctttttgataatctcatgaccaaaatcccttaacgtgagttttcgttccactgagcgtcagaccccgtagaaaagatcaaaggatcttcttgagatcctttttttctgcgcgtaatctgctgcttgcaaacaaaaaaaccaccgctaccagcggtggtttgtttgccggatcaagagctaccaactctttttccgaaggtaactggcttcagcagagcgcagataccaaatactgttcttctagtgtagccgtagttaggccaccacttcaagaactctgtagcaccgcctacatacctcgctctgctaatcctgttaccagtggctgctgccagtggcgataagtcgtgtcttaccgggttggactcaagacgatagttaccggataaggcgcagcggtcgggctgaacggggggttcgtgcacacagcccagcttggagcgaacgacctacaccgaactgagatacctacagcgtgagctatgagaaagcgccacgcttcccgaagggagaaaggcggacaggtatccggtaagcggcagggtcggaacaggagagcgcacgagggagcttccagggggaaacgcctggtatctttatagtcctgtcgggtttcgccacctctgacttgagcgtcgatttttgtgatgctcgtcaggggggcggagcctatggaaaaacgccagcaacgcggcctttttacggttcctggccttttgctggccttttgctcacatgttctttcctgcgttatcccctgattctgtggataaccgtattaccgcctttgagtgagctgataccgctcgccgcagccgaacgaccgagcgcagcgagtcagtgagcgaggaagcggaagagcgcccaatacgcaaaccgcctctccccgcgcgttggccgattcattaatgcagctggcacgacaggtttcccgactggaaagcgggcagtgagcgcaacgcaattaatgtgagttagctcactcattaggcaccccaggctttacactttatgcttccggctcgtatgttgtgtggaattgtgagcggataacaatttcacacaggaaacagctatgaccatgattacgccaagcgcgcaattaaccctcactaaagggaacaaaagctggagctgcaagctt

SEQ ID NO: 919 - DNA, 278 bp, Artificial Sequence
  Synthetic Polynucleotides
gaacgctgacgtcatcaacccgctccaaggaatcgcgggcccagtgtcactaggcgggaacacccagcgcgcgtgcgccctggcaggaagatggctgtgagggacaggggagtggcgccctgcaatatttgcatgtcgctatgtgttctgggaaatcaccataaacgtgaaatgtctttggatttgggaatcttataagttctgtatgagaccactctttccctgaacctccctgattactatatcaagagtatagtaatcagggaggttcatttttt

SEQ ID NO: 920 - DNA, 7158 bp, Artificial Sequence
  Synthetic Polynucleotides
  misc_feature (3291)..(3294): n is a, c, g, or t
aatgtagtcttatgcaatactcttgtagtcttgcaacatggtaacgatgagttagcaacatgccttacaaggagagaaaaagcaccgtgcatgccgattggtggaagtaaggtggtacgatcgtgccttattaggaaggcaacagacgggtctgacatggattggacgaaccactgaattgccgcattgcagagatattgtatttaagtgcctagctcgatacataaacgggtctctctggttagaccagatctgagcctgggagctctctggctaactagggaacccactgcttaagcctcaataaagcttgccttgagtgcttcaagtagtgtgtgcccgtctgttgtgtgactctggtaactagagatccctcagacccttttagtcagtgtggaaaatctctagcagtggcgcccgaacagggacttgaaagcgaaagggaaaccagaggagctctctcgacgcaggactcggcttgctgaagcgcgcacggcaagaggcgaggggcggcgactggtgagtacgccaaaaattttgactagcggaggctagaaggagagagatgggtgcgagagcgtcagtattaagcgggggagaattagatcgcgatgggaaaaaattcggttaaggccagggggaaagaaaaaatataaattaaaacatatagtatgggcaagcagggagctagaacgattcgcagttaatcctggcctgttagaaacatcagaaggctgtagacaaatactgggacagctacaaccatcccttcagacaggatcagaagaacttagatcattatataatacagtagcaaccctctattgtgtgcatcaaaggatagagataaaagacaccaaggaagctttagacaagatagaggaagagcaaaacaaaagtaagaccaccgcacagcaagcggccgctgatcttcagacctggaggaggagatatgagggacaattggagaagtgaattatataaatataaagtagtaaaaattgaaccattaggagtagcacccaccaaggcaaagagaagagtggtgcagagagaaaaaagagcagtgggaataggagctttgttccttgggttcttgggagcagcaggaagcactatgggcgcagcgtcaatgacgctgacggtacaggccagacaattattgtctggtatagtgcagcagcagaacaatttgctgagggctattgaggcgcaacagcatctgttgcaactcacagtctggggcatcaagcagctccaggcaagaatcctggctgtggaaagatacctaaaggatcaacagctcctggggatttggggttgctctggaaaactcatttgcaccactgctgtgccttggaatgctagttggagtaataaatctctggaacagatttggaatcacacgacctggatggagtgggacagagaaattaacaattacacaagcttaatacactccttaattgaagaatcgcaaaaccagcaagaaaagaatgaacaagaattattggaattagataaatgggcaagtttgtggaattggtttaacataacaaattggctgtggtatataaaattattcataatgatagtaggaggcttggtaggtttaagaatagtttttgctgtactttctatagtgaatagagttaggcagggatattcaccattatcgtttcagacccacctcccaaccccgaggggacccgacaggcccgaaggaatagaagaagaaggtggagagagagacagagacagatccattcgattagtgaacggatctcgacggtatcggttaacttttaaaagaaaaggggggattggggggtacagtgcaggggaaagaatagtagacataatagcaacagacatacaaactaaagaattacaaaaacaaattacaaaattcaaaattttatcgataagctttgcaaagatggataaagttttaaacagagaggaatctttgcagctaatggaccttctaggtcttgaaaggagtgcctcgtgaggctccggtgcccgtcagtgggcagagcgcacatcgcccacagtccccgagaagttggggggaggggtcggcaattgaaccggtgcctagagaaggtggcgcggggtaaactgggaaagtgatgtcgtgtactggctccgcctttttcccgagggtgggggagaaccgtatataagtgcagtagtcgccgtgaacgttctttttcgcaacgggtttgccgccagaacacaggtaagtgccgtgtgtggttcccgcgggcctggcctctttacgggttatggcccttgcgtgccttgaattacttccacctggctgcagtacgtgattcttgatcccgagcttcgggttggaagtgggtgggagagttcgaggccttgcgcttaaggagccccttcgcctcgtgcttgagttgaggcctggcctgggcgctggggccgccgcgtgcgaatctggtggcaccttcgcgcctgtctcgctgctttcgataagtctctagccatttaaaatttttgatgacctgctgcgacgctttttttctggcaagatagtcttgtaaatgcgggccaagatctgcacactggtatttcggtttttggggccgcgggcggcgacggggcccgtgcgtcccagcgcacatgttcggcgaggcggggcctgcgagcgcggccaccgagaatcggacgggggtagtctcaagctggccggcctgctctggtgcctggcctcgcgccgccgtgtatcgccccgccctgggcggcaaggctggcccggtcggcaccagttgcgtgagcggaaagatggccgcttcccggccctgctgcagggagctcaaaatggaggacgcggcgctcgggagagcgggcgggtgagtcacccacacaaaggaaaagggcctttccgtcctcagccgtcgcttcatgtgactccacggagtaccgggcgccgtccaggcacctcgattagttctcgaccttttggagtacgtcgtctttaggttggggggaggggttttatgcgatggagtttccccacactgagtgggtggagactgaagttaggccagcttggcacttgatgtaattctccttggaatttgccctttttgagtttggatcttggttcattctcaagcctcagacagtggttcaaagtttttttcttccatttcaggtgtcgtgaggaattagcttggtactaatacgactcactatagggagacccaagctggctaggtaagcttgatatcgaattcctgcagcccgggggatctgctagcnnnngtcgacgaacgctgacgtcatcaacccgctccaaggaatcgcgggcccagtgtcactaggcgggaacacccagcgcgcgtgcgccctggcaggaagatggctgtgagggacaggggagtggcgccctgcaatatttgcatgtcgctatgtgttctgggaaatcaccataaacgtgaaatgtctttggatttgggaatcttataagttctgtatgagaccactctttccctgaacctccctgattactatatcaagagtatagtaatcagggaggttcattttttccggactatagtgtcacctaaatgctagacgtacctttaagaccaatgacttacaaggcagctgtagatcttagccactttttaaaagaaaaggggggactggaagggctaattcactcccaacgaagacaagatctgctttttgcttgtactgggtctctctggttagaccagatctgagcctgggagctctctggctaactagggaacccactgcttaagcctcaataaagcttgccttgagtgcttcaagtagtgtgtgcccgtctgttgtgtgactctggtaactagagatccctcagacccttttagtcagtgtggaaaatctctagcagtagtagttcatgtcatcttattattcagtatttataacttgcaaagaaatgaatatcagagagtgagaggaacttgtttattgcagcttataatggttacaaataaagcaatagcatcacaaatttcacaaataaagcatttttttcactgcattctagttgtggtttgtccaaactcatcaatgtatcttatcatgtctggctctagctatcccgcccctaactccgcccatcccgcccctaactccgcccagttccgcccattctccgccccatggctgactaattttttttatttatgcagaggccgaggccgcctcggcctctgagctattccagaagtagtgaggaggcttttttggaggcctagggacgtacccaattcgccctatagtgagtcgtattacgcgcgctcactggccgtcgttttacaacgtcgtgactgggaaaaccctggcgttacccaacttaatcgccttgcagcacatccccctttcgccagctggcgtaatagcgaagaggcccgcaccgatcgcccttcccaacagttgcgcagcctgaatggcgaatgggacgcgccctgtagcggcgcattaagcgcggcgggtgtggtggttacgcgcagcgtgaccgctacacttgccagcgccctagcgcccgctcctttcgctttcttcccttcctttctcgccacgttcgccggctttccccgtcaagctctaaatcgggggctccctttagggttccgatttagtgctttacggcacctcgaccccaaaaaacttgattagggtgatggttcacgtagtgggccatcgccctgatagacggtttttcgccctttgacgttggagtccacgttctttaatagtggactcttgttccaaactggaacaacactcaaccctatctcggtctattcttttgatttataagggattttgccgatttcggcctattggttaaaaaatgagctgatttaacaaaaatttaacgcgaattttaacaaaatattaacgcttacaatttaggtggcacttttcggggaaatgtgcgcggaacccctatttgtttatttttctaaatacattcaaatatgtatccgctcatgagacaataaccctgataaatgcttcaataatattgaaaaaggaagagtatgagtattcaacatttccgtgtcgcccttattcccttttttgcggcattttgccttcctgtttttgctcacccagaaacgctggtgaaagtaaaagatgctgaagatcagttgggtgcacgagtgggttacatcgaactggatctcaacagcggtaagatccttgagagttttcgccccgaagaacgttttccaatgatgagcacttttaaagttctgctatgtggcgcggtattatcccgtattgacgccgggcaagagcaactcggtcgccgcatacactattctcagaatgacttggttgagtactcaccagtcacagaaaagcatcttacggatggcatgacagtaagagaattatgcagtgctgccataaccatgagtgataacactgcggccaacttacttctgacaacgatcggaggaccgaaggagctaaccgcttttttgcacaacatgggggatcatgtaactcgccttgatcgttgggaaccggagctgaatgaagccataccaaacgacgagcgtgacaccacgatgcctgtagcaatggcaacaacgttgcgcaaactattaactggcgaactacttactctagcttcccggcaacaattaatagactggatggaggcggataaagttgcaggaccacttctgcgctcggcccttccggctggctggtttattgctgataaatctggagccggtgagcgtgggtctcgcggtatcattgcagcactggggccagatggtaagccctcccgtatcgtagttatctacacgacggggagtcaggcaactatggatgaacgaaatagacagatcgctgagataggtgcctcactgattaagcattggtaactgtcagaccaagtttactcatatatactttagattgatttaaaacttcatttttaatttaaaaggatctaggtgaagatcctttttgataatctcatgaccaaaatcccttaacgtgagttttcgttccactgagcgtcagaccccgtagaaaagatcaaaggatcttcttgagatcctttttttctgcgcgtaatctgctgcttgcaaacaaaaaaaccaccgctaccagcggtggtttgtttgccggatcaagagctaccaactctttttccgaaggtaactggcttcagcagagcgcagataccaaatactgttcttctagtgtagccgtagttaggccaccacttcaagaactctgtagcaccgcctacatacctcgctctgctaatcctgttaccagtggctgctgccagtggcgataagtcgtgtcttaccgggttggactcaagacgatagttaccggataaggcgcagcggtcgggctgaacggggggttcgtgcacacagcccagcttggagcgaacgacctacaccgaactgagatacctacagcgtgagctatgagaaagcgccacgcttcccgaagggagaaaggcggacaggtatccggtaagcggcagggtcggaacaggagagcgcacgagggagcttccagggggaaacgcctggtatctttatagtcctgtcgggtttcgccacctctgacttgagcgtcgatttttgtgatgctcgtcaggggggcggagcctatggaaaaacgccagcaacgcggcctttttacggttcctggccttttgctggccttttgctcacatgttctttcctgcgttatcccctgattctgtggataaccgtattaccgcctttgagtgagctgataccgctcgccgcagccgaacgaccgagcgcagcgagtcagtgagcgaggaagcggaagagcgcccaatacgcaaaccgcctctccccgcgcgttggccgattcattaatgcagctggcacgacaggtttcccgactggaaagcgggcagtgagcgcaacgcaattaatgtgagttagctcactcattaggcaccccaggctttacactttatgcttccggctcgtatgttgtgtggaattgtgagcggataacaatttcacacaggaaacagctatgaccatgattacgccaagcgcgcaattaaccctcactaaagggaacaaaagctggagctgcaagctt

SEQ ID NO: 921 - DNA, 9899 bp, Artificial Sequence
  Synthetic Polynucleotides
aatgtagtcttatgcaatactcttgtagtcttgcaacatggtaacgatgagttagcaacatgccttacaaggagagaaaaagcaccgtgcatgccgattggtggaagtaaggtggtacgatcgtgccttattaggaaggcaacagacgggtctgacatggattggacgaaccactgaattgccgcattgcagagatattgtatttaagtgcctagctcgatacataaacgggtctctctggttagaccagatctgagcctgggagctctctggctaactagggaacccactgcttaagcctcaataaagcttgccttgagtgcttcaagtagtgtgtgcccgtctgttgtgtgactctggtaactagagatccctcagacccttttagtcagtgtggaaaatctctagcagtggcgcccgaacagggacttgaaagcgaaagggaaaccagaggagctctctcgacgcaggactcggcttgctgaagcgcgcacggcaagaggcgaggggcggcgactggtgagtacgccaaaaattttgactagcggaggctagaaggagagagatgggtgcgagagcgtcagtattaagcgggggagaattagatcgcgatgggaaaaaattcggttaaggccagggggaaagaaaaaatataaattaaaacatatagtatgggcaagcagggagctagaacgattcgcagttaatcctggcctgttagaaacatcagaaggctgtagacaaatactgggacagctacaaccatcccttcagacaggatcagaagaacttagatcattatataatacagtagcaaccctctattgtgtgcatcaaaggatagagataaaagacaccaaggaagctttagacaagatagaggaagagcaaaacaaaagtaagaccaccgcacagcaagcggccgctgatcttcagacctggaggaggagatatgagggacaattggagaagtgaattatataaatataaagtagtaaaaattgaaccattaggagtagcacccaccaaggcaaagagaagagtggtgcagagagaaaaaagagcagtgggaataggagctttgttccttgggttcttgggagcagcaggaagcactatgggcgcagcgtcaatgacgctgacggtacaggccagacaattattgtctggtatagtgcagcagcagaacaatttgctgagggctattgaggcgcaacagcatctgttgcaactcacagtctggggcatcaagcagctccaggcaagaatcctggctgtggaaagatacctaaaggatcaacagctcctggggatttggggttgctctggaaaactcatttgcaccactgctgtgccttggaatgctagttggagtaataaatctctggaacagatttggaatcacacgacctggatggagtgggacagagaaattaacaattacacaagcttaatacactccttaattgaagaatcgcaaaaccagcaagaaaagaatgaacaagaattattggaattagataaatgggcaagtttgtggaattggtttaacataacaaattggctgtggtatataaaattattcataatgatagtaggaggcttggtaggtttaagaatagtttttgctgtactttctatagtgaatagagttaggcagggatattcaccattatcgtttcagacccacctcccaaccccgaggggacccgacaggcccgaaggaatagaagaagaaggtggagagagagacagagacagatccattcgattagtgaacggatctcgacggtatcggttaacttttaaaagaaaaggggggattggggggtacagtgcaggggaaagaatagtagacataatagcaacagacatacaaactaaagaattacaaaaacaaattacaaaattcaaaattttatcgataagctttgcaaagatggataaagttttaaacagagaggaatctttgcagctaatggaccttctaggtcttgaaaggagtgcctcgtgaggctccggtgcccgtcagtgggcagagcgcacatcgcccacagtccccgagaagttggggggaggggtcggcaattgaaccggtgcctagagaaggtggcgcggggtaaactgggaaagtgatgtcgtgtactggctccgcctttttcccgagggtgggggagaaccgtatataagtgcagtagtcgccgtgaacgttctttttcgcaacgggtttgccgccagaacacaggtaagtgccgtgtgtggttcccgcgggcctggcctctttacgggttatggcccttgcgtgccttgaattacttccacctggctgcagtacgtgattcttgatcccgagcttcgggttggaagtgggtgggagagttcgaggccttgcgcttaaggagccccttcgcctcgtgcttgagttgaggcctggcctgggcgctggggccgccgcgtgcgaatctggtggcaccttcgcgcctgtctcgctgctttcgataagtctctagccatttaaaatttttgatgacctgctgcgacgctttttttctggcaagatagtcttgtaaatgcgggccaagatctgcacactggtatttcggtttttggggccgcgggcggcgacggggcccgtgcgtcccagcgcacatgttcggcgaggcggggcctgcgagcgcggccaccgagaatcggacgggggtagtctcaagctggccggcctgctctggtgcctggcctcgcgccgccgtgtatcgccccgccctgggcggcaaggctggcccggtcggcaccagttgcgtgagcggaaagatggccgcttcccggccctgctgcagggagctcaaaatggaggacgcggcgctcgggagagcgggcgggtgagtcacccacacaaaggaaaagggcctttccgtcctcagccgtcgcttcatgtgactccacggagtaccgggcgccgtccaggcacctcgattagttctcgaccttttggagtacgtcgtctttaggttggggggaggggttttatgcgatggagtttccccacactgagtgggtggagactgaagttaggccagcttggcacttgatgtaattctccttggaatttgccctttttgagtttggatcttggttcattctcaagcctcagacagtggttcaaagtttttttcttccatttcaggtgtcgtgaggaattagcttggtactaatacgactcactatagggagacccaagctggctaggtaagcttgatatcgaattcctgcagcccgggggatctgctagcatggccttaccagtgaccgccttgctcctgccgctggccttgctgctccacgccgccaggccggacatccagatgacacagactacatcctccctgtctgcctctctgggagacagagtcaccatcagttgcagggcaagtcaggacattagtaaatatttaaattggtatcagcagaaaccagatggaactgttaaactcctgatctaccatacatcaagattacactcaggagtcccatcaaggttcagtggcagtgggtctggaacagattattctctcaccattagcaacctggagcaagaagatattgccacttacttttgccaacagggtaatacgcttccgtacacgttcggaggggggaccaagctggagatcacaggtggcggtggctcgggcggtggtgggtcgggtggcggcggatctgaggtgaaactgcaggagtcaggacctggcctggtggcgccctcacagagcctgtccgtcacatgcactgtctcaggggtctcattacccgactatggtgtaagctggattcgccagcctccacgaaagggtctggagtggctgggagtaatatggggtagtgaaaccacatactataattcagctctcaaatccagactgaccatcatcaaggacaactccaagagccaagttttcttaaaaatgaacagtctgcaaactgatgacacagccatttactactgtgccaaacattattactacggtggtagctatgctatggactactggggtcaaggaacctcagtcaccgtctcctcacgcgtagagcagaaactgatctcggaagaggatctggcgaagcccaccacgacgccagcgccgcgaccaccaacaccggcgcccaccatcgcgtcgcagcccctgtccctgcgcccagaggcgtgccggccagcggcggggggcgcagtgcacacgagggggctggacttcgcctgtgacatctacatctgggcgcccttggccgggacttgtggggtccttctcctgtcactggttatcaccctttactgcgggcgcgccagagtgaagttcagcaggagcgcagacgcccccgcgtaccagcagggccagaaccagctctataacgagctgaatctaggacgaagagaggagtacgatgttttggacaagagacgtggccgggaccctgagatggggggaaagccgagaaggaagaaccctcaggaaggcctgtacaatgaactgcagaaagataagatggcggaggcctacagtgagattgggatgaaaggcgagcgccggaggggcaaggggcacgatggcctttaccagggtctcagtacagccaccaaggacacctacgacgcccttcacatgcaggccctgccccctcgctctagaggatctggagcaacaaacttctcactactcaaacaagcaggtgacgtggaggagaatcccgggcctgggatccacatggccacttacgaggttctctgtgaggtggcgcggaaactgggcacggatgacagggaagtggtattgttcctcctaaacgtgttcatacctcaacccacactggcccaattaattggagctcttagagctttaaaggaggagggcaggttaacgtttcccctgttagcggaatgtctgtttcgtgcaggtcgcagagacctcttgcgcgacctgcttcacttagacccgcgttttttagagcgccacctagcgggcacaatgagttatttcagcccttatcagctcactgttctccacgtagacggggagctgtgtgcgagggatattaggtctttgatatttttaagcaaggacactatagggtctcgcagcacaccacagacattcttacactgggtgtactgtatggaaaacttagacctactgggtcccactgacgtggatgccctaatgtcaatgcttagatctttgtcaagagtagacctacagcgccaagtgcaaaccctaatgggccttcacctttccggcccatcacactcccaacactatcgccatacaccactcgagaccgatttctacgactacaaggacgacgatgacaagactagtggctccggcgagggcagaggaagtctactaacctgcggagatgtggaagaaaatcctggcccacatatgaccgagtacaagcccacggtgcgcctcgccacccgcgacgacgtccccagggccgtacgcaccctcgccgccgcgttcgccgactaccccgccacgcgccacaccgtcgatccggaccgccacatcgagcgggtcaccgagctgcaagaactcttcctcacgcgcgtcgggctcgacatcggcaaggtgtgggtcgcggacgacggcgccgcggtggcggtctggaccacgccggagagcgtcgaagcgggggcggtgttcgccgagatcggcccgcgcatggccgagttgagcggttcccggctggccgcgcagcaacagatggaaggcctcctggcgccgcaccggcccaaggagcccgcgtggttcctggccaccgtcggcgtctcgcccgaccaccagggcaagggtctgggcagcgccgtcgtgctccccggagtggaggcggccgagcgcgccggggtgcccgccttcctggagacctccgcgccccgcaacctccccttctacgagcggctcggcttcaccgtcaccgccgacgtcgaggtgcccgaaggaccgcgcacctggtgcatgacccgcaagcccggtgcctgagtcgacgaacgctgacgtcatcaacccgctccaaggaatcgcgggcccagtgtcactaggcgggaacacccagcgcgcgtgcgccctggcaggaagatggctgtgagggacaggggagtggcgccctgcaatatttgcatgtcgctatgtgttctgggaaatcaccataaacgtgaaatgtctttggatttgggaatcttataagttctgtatgagaccactctttccctgaacctccctgattactatatcaagagtatagtaatcagggaggttcattttttccggactatagtgtcacctaaatgctagacgtacctttaagaccaatgacttacaaggcagctgtagatcttagccactttttaaaagaaaaggggggactggaagggctaattcactcccaacgaagacaagatctgctttttgcttgtactgggtctctctggttagaccagatctgagcctgggagctctctggctaactagggaacccactgcttaagcctcaataaagcttgccttgagtgcttcaagtagtgtgtgcccgtctgttgtgtgactctggtaactagagatccctcagacccttttagtcagtgtggaaaatctctagcagtagtagttcatgtcatcttattattcagtatttataacttgcaaagaaatgaatatcagagagtgagaggaacttgtttattgcagcttataatggttacaaataaagcaatagcatcacaaatttcacaaataaagcatttttttcactgcattctagttgtggtttgtccaaactcatcaatgtatcttatcatgtctggctctagctatcccgcccctaactccgcccatcccgcccctaactccgcccagttccgcccattctccgccccatggctgactaattttttttatttatgcagaggccgaggccgcctcggcctctgagctattccagaagtagtgaggaggcttttttggaggcctagggacgtacccaattcgccctatagtgagtcgtattacgcgcgctcactggccgtcgttttacaacgtcgtgactgggaaaaccctggcgttacccaacttaatcgccttgcagcacatccccctttcgccagctggcgtaatagcgaagaggcccgcaccgatcgcccttcccaacagttgcgcagcctgaatggcgaatgggacgcgccctgtagcggcgcattaagcgcggcgggtgtggtggttacgcgcagcgtgaccgctacacttgccagcgccctagcgcccgctcctttcgctttcttcccttcctttctcgccacgttcgccggctttccccgtcaagctctaaatcgggggctccctttagggttccgatttagtgctttacggcacctcgaccccaaaaaacttgattagggtgatggttcacgtagtgggccatcgccctgatagacggtttttcgccctttgacgttggagtccacgttctttaatagtggactcttgttccaaactggaacaacactcaaccctatctcggtctattcttttgatttataagggattttgccgatttcggcctattggttaaaaaatgagctgatttaacaaaaatttaacgcgaattttaacaaaatattaacgcttacaatttaggtggcacttttcggggaaatgtgcgcggaacccctatttgtttatttttctaaatacattcaaatatgtatccgctcatgagacaataaccctgataaatgcttcaataatattgaaaaaggaagagtatgagtattcaacatttccgtgtcgcccttattcccttttttgcggcattttgccttcctgtttttgctcacccagaaacgctggtgaaagtaaaagatgctgaagatcagttgggtgcacgagtgggttacatcgaactggatctcaacagcggtaagatccttgagagttttcgccccgaagaacgttttccaatgatgagcacttttaaagttctgctatgtggcgcggtattatcccgtattgacgccgggcaagagcaactcggtcgccgcatacactattctcagaatgacttggttgagtactcaccagtcacagaaaagcatcttacggatggcatgacagtaagagaattatgcagtgctgccataaccatgagtgataacactgcggccaacttacttctgacaacgatcggaggaccgaaggagctaaccgcttttttgcacaacatgggggatcatgtaactcgccttgatcgttgggaaccggagctgaatgaagccataccaaacgacgagcgtgacaccacgatgcctgtagcaatggcaacaacgttgcgcaaactattaactggcgaactacttactctagcttcccggcaacaattaatagactggatggaggcggataaagttgcaggaccacttctgcgctcggcccttccggctggctggtttattgctgataaatctggagccggtgagcgtgggtctcgcggtatcattgcagcactggggccagatggtaagccctcccgtatcgtagttatctacacgacggggagtcaggcaactatggatgaacgaaatagacagatcgctgagataggtgcctcactgattaagcattggtaactgtcagaccaagtttactcatatatactttagattgatttaaaacttcatttttaatttaaaaggatctaggtgaagatcctttttgataatctcatgaccaaaatcccttaacgtgagttttcgttccactgagcgtcagaccccgtagaaaagatcaaaggatcttcttgagatcctttttttctgcgcgtaatctgctgcttgcaaacaaaaaaaccaccgctaccagcggtggtttgtttgccggatcaagagctaccaactctttttccgaaggtaactggcttcagcagagcgcagataccaaatactgttcttctagtgtagccgtagttaggccaccacttcaagaactctgtagcaccgcctacatacctcgctctgctaatcctgttaccagtggctgctgccagtggcgataagtcgtgtcttaccgggttggactcaagacgatagttaccggataaggcgcagcggtcgggctgaacggggggttcgtgcacacagcccagcttggagcgaacgacctacaccgaactgagatacctacagcgtgagctatgagaaagcgccacgcttcccgaagggagaaaggcggacaggtatccggtaagcggcagggtcggaacaggagagcgcacgagggagcttccagggggaaacgcctggtatctttatagtcctgtcgggtttcgccacctctgacttgagcgtcgatttttgtgatgctcgtcaggggggcggagcctatggaaaaacgccagcaacgcggcctttttacggttcctggccttttgctggccttttgctcacatgttctttcctgcgttatcccctgattctgtggataaccgtattaccgcctttgagtgagctgataccgctcgccgcagccgaacgaccgagcgcagcgagtcagtgagcgaggaagcggaagagcgcccaatacgcaaaccgcctctccccgcgcgttggccgattcattaatgcagctggcacgacaggtttcccgactggaaagcgggcagtgagcgcaacgcaattaatgtgagttagctcactcattaggcaccccaggctttacactttatgcttccggctcgtatgttgtgtggaattgtgagcggataacaatttcacacaggaaacagctatgaccatgattacgccaagcgcgcaattaaccctcactaaagggaacaaaagctggagctgcaagctt

SEQ ID NO: 922 - DNA, 5489 bp, Artificial Sequence
  Synthetic Polynucleotides
aaaaaaaaaaaaaaaaaaaaaaaaaaaaaaaaaaaaaaaaaaaaaaaaaaaaaaaaaaaaaaaaaaaaaaaaaaaaaaaaaaaaaaaaaaaaaaaaaaaaaaaaaaaaaaaaaaaaaaaaaaaaaaaaaaaaaaaaaaaaaaaaaaaaaaaaaaaaaaaaaaaaaaaaaaaaaaaaaaaaaaaaaaaaaaaaaaaaaaaaaaaaaaaaaaaaaaaaaaaaaaaaaaaaaaaaaaaaaaaaaaaaaaaaaaaaaaaaaaaaaaaaaaaaaaaaaaaaaaaaaaaaaaaaaaaaaaaaaaaaaaaaaaaaaaaaaaaaaaaaaaaaaaaaaaaaaaaaaaaaaaaaaaaaaaaaaaaaaaaaaaaaaaaaaaaaaaaaaaaaaaaaaaaaaaaaaaaaaaaaaaaaaaaaaaaaaaaaaaaaaaaaaaaaaaaaaaaaaaaaaaaaaaaaaaaaaaaaaaaaaaaaaaaaaaaaaaaaaaaaaaaaaaaaaaaaaaaaaaaaaaaaaaaaaaaaaaaaaaaaaaaaaaaaaaaaaaaaaaaaaaaaaaaaaaaaaaaaaaaaaaaaaaaaaaaaaaaaaaaaaaaaaaaaaaaaaaaaaaaaaaaaaaaaaaaaaaaaaaaaaaaaaaaaaaaaaaaaaaaaaaaaaaaaaaaaaaaaaaaaaaaaaaaaaaaaaaaaaaaaaaaaaaaaaaaaaaaaaaaaaaaaaaaaaaaaaaaaaaaaaaaaaaaaaaaaaaaaaaaaaaaaaaaaaaaaaaaaaaaaaaaaaaaaaaaaaaaaaaaaaaaaaaaaaaaaaaaaaaaaaaaaaaaaaaaaaaaaaaaaaaaaaaaaaaaaaaaaaaaaaaaaaaaaaaaaaaaaaaaaaaaaaaaaaaaaaaaaaaaaaaaaaaaaaaaaaaaaaaaaaaaaaaaaaaaaaaaaaaaaaaaaaaaaaaaaaaaaaaaaaaaaaaaaaaaaaaaaaaaaaaaaaaaaaaaaaaaaaaaaaaaaaaaaaaaaaaaaaaaaaaaaaaaaaaaaaaaaaaaaaaaaaaaaaaaaaaaaaaaaaaaaaaaaaaaaaaaaaaaaaaaaaaaaaaaaaaaaaaaaaaaaaaaaaaaaaaaaaaaaaaaaaaaaaaaaaaaaaaaaaaaaaaaaaaaaaaaaaaaaaaaaaaaaaaaaaaaaaaaaaaaaaaaaaaaaaaaaaaaaaaaaaaaaaaaaaaaaaaaaaaaaaaaaaaaaaaaaaaaaaaaaaaaaaaaaaaaaaaaaaaaaaaaaaaaaaaaaaaaaaaaaaaaaaaaaaaaaaaaaaaaaaaaaaaaaaaaaaaaaaaaaaaaaaaaaaaaaaaaaaaaaaaaaaaaaaaaaaaaaaaaaaaaaaaaaaaaaaaaaaaaaaaaaaaaaaaaaaaaaaaaaaaaaaaaaaaaaaaaaaaaaaaaaaaaaaaaaaaaaaaaaaaaaaaaaaaaaaaaaaaaaaaaaaaaaaaaaaaaaaaaaaaaaaaaaaaaaaaaaaaaaaaaaaaaaaaaaaaaaaaaaaaaaaaaaaaaaaaaaaaaaaaaaaaaaaaaaaaaaaaaaaaaaaaaaaaaaaaaaaaaaaaaaaaaaaaaaaaaaaaaaaaaaaaaaaaaaaaaaaaaaaaaaaaaaaaaaaaaaaaaaaaaaaaaaaaaaaaaaaaaaaaaaaaaaaaaaaaaaaaaaaaaaaaaaaaaaaaaaaaaaaaaaaaaaaaaaaaaaaaaaaaaaaaaaaaaaaaaaaaaaaaaaaaaaaaaaaaaaaaaaaaaaaaaaaaaaaaaaaaaaaaaaaaaaaaaaaaaaaaaaaaaaaaaaaaaaaaaaaaaaaaaaaaaaaaaaaaaaaaaaaaaaaaaaaaaaaaaaaaaaaaaaaaaaaaaaaaaaaaaaaaaaaaaaaaaaaaaaaaaaaaaaaaaaaaaaaaaaaaaaaaaaaaaaaaaaaaaaaaaaaaaaaaaaaaaaaaaaaaaaaaaaaaaaaaaaaaaaaaaaaaaaaaaaaaaaaaaaaaaaaaaaaaaaaaaaaaaaaaaaaaaaaaaaaaaaaaaaaaaaaaaaaaaaaaaaaaaaaaaaaaaaaaaaaaaaaaaaaaaaaaaaaaaaaaaaaaaaaaaaaaaaaaaaaaaaaaaaaaaaaaaaaaaaaaaaaaaaaaaaaaaaaaaaaaaaaaaaaaaaaaaaaaaaaaaaaaaaaaaaaaaaaaaaaaaaaaaaaaaaaaaaaaaaaaaaaaaaaaaaaaaaaaaaaaaaaaaaaaaaaaaaaaaaaaaaaaaaaaaaaaaaaaaaaaaaaaaaaaaaaaaaaaaaaaaaaaaaaaaaaaaaaaaaaaaaaaaaaaaaaaaaaaaaaaaaaaaaaaaaaaaaaaaaaaaaaaaaaaaaaaaaaaaaaaaaaaaaaaaaaaaaaaaaaaaaaaaaaaaaaaaaaaaaaaaaaaaaaaaaaaaaaaaaaaaaaaaaaaaaaaaaaaaaaaaaaaaaaaaaaaaaaaaaaaaaaaaaaaaaaaaaaaaaaaaaaaaaaaaaaaaaaaaaaaaaaaaaaaaaaaaaaaaaaaaaaaaaaaaaaaaaaaaaaaaaaaaaaaaaaaaaaaaaaaaaaaaaaaaaaaaaaaaaaaaaaaaaaaaaaaaaaaaaaaaaaaaaaaaaaaaaaaaaaaaaaaaaaaaaaaaaaaaaaaaaaaaaaaaaaaaaaaaaaaaaaaaaaaaaaaaaaaaaaaaaaaaaaaaaaaaaaaaaaaaaaaaaaaaaaaaaaaaaaaaaaaaaaaaaaaaaaaaaaaaaaaaaaaaaaaaaaaaaaaaaaaaaaaaaaaaaaaaaaaaaaaaaaaaaaaaaaaaaaaaaaaaaaaaaaaaaaaaaaaaaaaaaaaaaaaaaaaaaaaaaaaaaaaaaaaaaaaaaaaaaaaaaaaaaaaaaaaaaaaaaaaaaaaaaaaaaaaaaaaaaaaaaaaaaaaaaaaaaaaaaaaaaaaaaaaaaaaaaaaaaaaaaaaaaaaaaaaaaaaaaaaaaaaaaaaaaaaaaaaaaaaaaaaaaaaaaaaaaaaaaaaaaaaaaaaaaaaaaaaaaaaaaaaaaaaaaaaaaaaaaaaaaaaaaaaaaaaaaaaaaaaaaaaaaaaaaaaaaaaaaaaaaaaaaaaaaaaaaaaaaaaaaaaaaaaaaaaaaaaaaaaaaaaaaaaaaaaaaaaaaaaaaaaaaaaaaaaaaaaaaaaaaaaaaaaaaaaaaaaaaaaaaaaaaaaaaaaaaaaaaaaaaaaaaaaaaaaaaaaaaaaaaaaaaaaaaaaaaaaaaaaaaaaaaaaaaaaaaaaaaaaaaaaaaaaaaaaaaaaaaaaaaaaaaaaaaaaaaaaaaaaaaaaaaaaaaaaaaaaaaaaaaaaaaaaaaaaaaaaaaaaaaaaaaaaaaaaaaaaaaaaaaaaaaaaaaaaaaaaaaaaaaaaaaaaaaaaaaaaaaaaaaaaaaaaaaaaaaaaaaaaaaaaaaaaaaaaaaaaaaaaaaaaaaaaaaaaaaaaaaaaaaaaaaaaaaaaaaaaaaaaaaaaaaaaaaaaaaaaaaaaaaaaaaaaaaaaaaaaaaaaaaaaaaaaaaaaaaaaaaaaaaaaaaaaaaaaaaaaaaaaaaaaaaaaaaaaaaaaaaaaaaaaaaaaaaaaaaaaaaaaaaaaaaaaaaaaaaaaaaaaaaaaaaaaaaaaaaaaaaaaaaaaaaaaaaaaaaaaaaaaaaaaaaaaaaaaaaaaaaaaaaaaaaaaaaaaaaaaaaaaaaaaaaaaaaaaaaaaaaaaaaaaaaaaaaaaaaaaaaaaaaaaaaaaaaaaaaaaaaaaaaaaaaaaaaaaaaaaaaaaaaaaaaaaaaaaaaaaaaaaaaaaaaaaaaaaaaaaaaaaaaaaaaaaaaaaaaaaaaaaaaaaaaaaaaaaaaaaaaaaaaaaaaaaaaaaaaaaaaaaaaaaaaaaaaaaaaaaaaaaaaaaaaaaaaaaaaaaaaaaaaaaaaaaaaaaaaaaaaaaaaaaaaaaaaaaaaaaaaaaaaaaaaaaaaaaaaaaaaaaaaaaaaaaaaaaaaaaaaaaaaaaaaaaaaaaaaaaaaaaaaaaaaaaaaaaaaaaaaaaaaaaaaaaaaaaaaaaaaaaaaaaaaaaaaaaaaaaaaaaaaaaaaaaaaaaaaaaaaaaaaaaaaaaaaaaaaaaaaaaaaaaaaaaaaaaaaaaaaaaaaaaaaaaaaaaaaaaaaaaaaaaaaaaaaaaaaaaaaaaaaaaaaaaaaaaaaaaaaaaaaaaaaaaaaaaaaaaaaaaaaaaaaaaaaaaaaaaaaaaaaaaaaaaaaaaaaaaaaaaaaaaaaaaaaaaaaaaaaaaaaaaaaaaaaaaaaaaaaaaaaaaaaaaaaaaaaaaaaaaaaaaaaaaaaaaaaaaaaaaaaaaaaaaaaaaaaaaaaaaaaaaaaaaaaaaaaaaaaaaaaaaaaaaaaaaaaaaaaaaaaaaaaaaaaaaaaaaaaaaaaaaaaaaaaaaaaaaaaaaaaaaaaaaaaaaaaaaaaaaaaaaaaaaaaaaaaaaaaaaaaaaaaaaaaaaaaaaaaaaaaaaaaaaaaaaaaaaaaaaaaaaaaaaaaaaaaaaaaaaaaaaaaaaaaaaaaaaaaaaaaaaaaaaaaaaaaaaaaaaaaaaaaaaaaaaaaaaaaaaaaaaaaaaaaaaaaaaaaaaaaaaaaaaaaaaaaaaaaaaaaaaaaaaaaaaaaaaaaaaaaaaaaaaaaaaaaaaaaaaaaaaaaaaaaaaaaaaaaaaaaaaaaaaaaaaaaaaaaaaaaaaaaaaaaaaaaaaaaaaaaaaaaaaaaaaaaaaaaaaaaaaaaaaaaaaaaaaaaaaaaaaaaaaaaaaaaaaaaaaaaaaaaaaaaaaaaaaaaaaaaaaaaaaaaaaaaaaaaaaaaaaaaaaaaaaaaaaaaaaaaaaaaaaaaaaaaaaaaaaaaaaaaaaaaaaaaaaaaaaaaaaaaaaaaaaaaaaaaaaaaaaaaaaaaaaaaaaaaaaaaaaaaaaaaaaaaaaaaaaaaaaaaaaaaaaaaaaaaaaaaaaaaaaaaaaaaaaaaaaaaaaaaaaaaaaaaaaaaaaaaaaaaaaaaaaaaaaaaaaaaaaaaaaaaaaaaaaaaaaaaaaaaaaaaaaaaaaaaaaaaaaaaaaaaaaaaaaaaaaaaaaaaaaaaaaaaaaaaaaaaaaaaaaaaaaaaaaaaaaaaaaaaaaaaaaaaaaaaaaaaaaaaaaaaaaaaaaaaaaaaaaaaaaaaaaaaaaaaaaaaaaaaaaaaaaaaaaaaaaaaaaaaaaaaaaaaaaaaaaaaaaaaaaaaaaaaaaaaaaaaaaaaaaaaaaaaaaaaaaaaaaaaaaaaaaaaaaaaaaaaaaaaaaaaaaaaaaaaaaaaaaaaaaaaaaaaaaaaaaaaaaaaaaaaaaaaaaaaaaaaaaaaaaaaaaaaaaaaaaaaaaaaaaaaaaaaaaaaaaaaaaaaaaaaaaaaaaaaaaaaaaaaaaaaaaaaaaaaaaaaaaaaaaaaaaaaaaaaaaaaaaaaaaaaaaaaaaaaaaaaaaaaaaaaa

SEQ ID NO: 923 - DNA, 1344 bp, Artificial Sequence
  Synthetic Polynucleotides
atggccttaccagtgaccgccttgctcctgccgctggccttgctgctccacgccgccaggccggacatccagatgacacagactacatcctccctgtctgcctctctgggagacagagtcaccatcagttgcagggcaagtcaggacattagtaaatatttaaattggtatcagcagaaaccagatggaactgttaaactcctgatctaccatacatcaagattacactcaggagtcccatcaaggttcagtggcagtgggtctggaacagattattctctcaccattagcaacctggagcaagaagatattgccacttacttttgccaacagggtaatacgcttccgtacacgttcggaggggggaccaagctggagatcacaggtggcggtggctcgggcggtggtgggtcgggtggcggcggatctgaggtgaaactgcaggagtcaggacctggcctggtggcgccctcacagagcctgtccgtcacatgcactgtctcaggggtctcattacccgactatggtgtaagctggattcgccagcctccacgaaagggtctggagtggctgggagtaatatggggtagtgaaaccacatactataattcagctctcaaatccagactgaccatcatcaaggacaactccaagagccaagttttcttaaaaatgaacagtctgcaaactgatgacacagccatttactactgtgccaaacattattactacggtggtagctatgctatggactactggggtcaaggaacctcagtcaccgtctcctcacgcgtaggaggcagtggtgtcttcacactcgaagatttcgttggggactggcgacagacagccggctacaacctggaccaagtccttgaacagggaggtgtgtccagtttgtttcagaatctcggggtgtccgtaactccgatccaaaggattgtcctgagcggtgaaaatgggctgaagatcgacatccatgtcatcatcccgtatgaaggtctgagcggcgaccaaatgggccagatcgaaaaaatttttaaggtggtgtaccctgtggatgatcatcactttaaggtgatcctgcactatggcacactggtaatcgacggggttacgccgaacatgatcgactatttcggacggccgtatgaaggcatcgccgtgttcgacggcaaaaagatcactgtaacagggaccctgtggaacggcaacaaaattatcgacgagcgcctgatcaaccccgacggctccctgctgttccgagtaaccatcaacggagtgaccggctggcggctgtgcgaacgcattctggcgagttggaaggatgcctctggatggtcc

SEQ ID NO: 924 - DNA, 1341 bp, Artificial Sequence
  Synthetic Polynucleotides
atggccttaccagtgaccgccttgctcctgccgctggccttgctgctccacgccgccaggccggacgacatccagatgacccagagcagcagcagcttcagcgtgagcctgggcgacagagtgaccatcacctgcatggccagcgaggacatctacatcagactggcctggtaccagcagaagcccggcaacgcccccagactgctgatcagcgccgccaccagcctggagaccggcgtgcccagcagattcagcggcagcggcagcggcaaggactacaccctgagcatcaccagcctgcagaccgaggacgtgggcacctactactgccagcagtactggagcagcccctggaccttcggcggcggcaccaagctggagatcaacggcggaggcggaagtggaggcggaggatctggcggcggaggctctgacgtgcagctgcaggagagcggccccggcctggtgaagcccagccagagcctgagcctgacctgcaccgtgaccggctacagcatcaccagcgactacacctggaactggatcagacagttccccggcaacaagctggagtggatgggctacatcacctacagcggcagcaccagctacaaccccagcctgaagagcagaaacagcatcaccagagacaccagcaagaaccagttcttcctgcagctgaacagcgtgaccaccgaggacaccgccacctactactgcgccagactgggcagaagatacacaatggactactggggccagggcaccagcgtgaccgtgagcagcacgcgtggaggcagtggtgtcttcacactcgaagatttcgttggggactggcgacagacagccggctacaacctggaccaagtccttgaacagggaggtgtgtccagtttgtttcagaatctcggggtgtccgtaactccgatccaaaggattgtcctgagcggtgaaaatgggctgaagatcgacatccatgtcatcatcccgtatgaaggtctgagcggcgaccaaatgggccagatcgaaaaaatttttaaggtggtgtaccctgtggatgatcatcactttaaggtgatcctgcactatggcacactggtaatcgacggggttacgccgaacatgatcgactatttcggacggccgtatgaaggcatcgccgtgttcgacggcaaaaagatcactgtaacagggaccctgtggaacggcaacaaaattatcgacgagcgcctgatcaaccccgacggctccctgctgttccgagtaaccatcaacggagtgaccggctggcggctgtgcgaacgcattctggcgagttggaaggatgcctctggatggtcc

SEQ ID NO: 925 - DNA, 1449 bp, Artificial Sequence
  Synthetic Polynucleotides
atgccacctcctcgcctcctcttcttcctcctcttcctcacccccatggaagtcaggcccgactacaaggacgacgatgacaaggaggaacctctagtggtgaaggtggaagagggagataacgctgtgctgcagtgcctcaaggggacctcagatggccccactcagcagctgacctggtctcgggagtccccgcttaaacccttcttaaaactcagcctggggctgccaggcctgggaatccacatgaggcccctggccatctggcttttcatcttcaacgtctctcaacagatggggggcttctacctgtgccagccggggcccccctctgagaaggcctggcagcctggctggacagtcaatgtggagggcagcggggagctgttccggtggaatgtttcggacctaggtggcctgggctgtggcctgaagaacaggtcctcagagggccccagctccccttccgggaagctcatgagccccaagctgtatgtgtgggccaaagaccgccctgaaatctgggagggagagcctccgtgtctcccaccgagggacagcctgaaccagagcctcagccaggacctcaccatggcccctggctccacactctggctgtcctgtggggtaccccctgactctgtgtccaggggccccctctcctggacccatgtgcaccccaaggggcctaagtcattgctgagcctagagctgaaggacgatcgcccggccagagatatgtgggtaatggagacgggtctgttgttgccccgggccacagctcaagacgctggaaagtattattgtcaccgtggcaacctgaccatgtcattccacctcgagatcactgctcggccagtactatggcactggctgctgaggactggtggctggacgcgtggaggcagtggtgtcttcacactcgaagatttcgttggggactggcgacagacagccggctacaacctggaccaagtccttgaacagggaggtgtgtccagtttgtttcagaatctcggggtgtccgtaactccgatccaaaggattgtcctgagcggtgaaaatgggctgaagatcgacatccatgtcatcatcccgtatgaaggtctgagcggcgaccaaatgggccagatcgaaaaaatttttaaggtggtgtaccctgtggatgatcatcactttaaggtgatcctgcactatggcacactggtaatcgacggggttacgccgaacatgatcgactatttcggacggccgtatgaaggcatcgccgtgttcgacggcaaaaagatcactgtaacagggaccctgtggaacggcaacaaaattatcgacgagcgcctgatcaaccccgacggctccctgctgttccgagtaaccatcaacggagtgaccggctggcggctgtgcgaacgcattctggcgagttggaaggatgcctctggatggtcc

SEQ ID NO: 926 - DNA, 2025 bp, Artificial Sequence
  Synthetic Polynucleotides
atgccctcctgggccctcttcatggtcacctcctgcctcctcctggcccctcaaaacctggcccaagtcagcagccaagatgtctccttgctggcatcagactcagagcccctgaagtgtttctcccgaacatttgaggacctcacttgcttctgggatgaggaagaggcagcgcccagtgggacataccagctgctgtatgcctacccgcgggagaagccccgtgcttgccccctgagttcccagagcatgccccactttggaacccgatacgtgtgccagtttccagaccaggaggaagtgcgtctcttctttccgctgcacctctgggtgaagaatgtgttcctaaaccagactcggactcagcgagtcctctttgtggacagtgtaggcctgccggctccccccagtatcatcaaggccatgggtgggagccagccaggggaacttcagatcagctgggaggagccagctccagaaatcagtgatttcctgaggtacgaactccgctatggccccagagatcccaagaactccactggtcccacggtcatacagctgattgccacagaaacctgctgccctgctctgcagaggcctcactcagcctctgctctggaccagtctccatgtgctcagcccacaatgccctggcaagatggaccaaagcagacctccccaagtagagaagcttcagctctgacagcagagggtggaagctgcctcatctcaggactccagcctggcaactcctactggctgcagctgcgcagcgaacctgatgggatctccctcggtggctcctggggatcctggtccctccctgtgactgtggacctgcctggagatgcagtggcacttggactgcaatgctttaccttggacctgaagaatgttacctgtcaatggcagcaacaggaccatgctagctcccaaggcttcttctaccacagcagggcacggtgctgccccagagacaggtaccccatctgggagaactgcgaagaggaagagaaaacaaatccaggactacagaccccacagttctctcgctgccacttcaagtcacgaaatgacagcattattcacatccttgtggaggtgaccacagccccgggtactgttcacagctacctgggctcccctttctggatccaccaggctgtgcgcctccccaccccaaacttgcactggagggagatctccagtgggcatctggaattggagtggcagcacccatcgtcctgggcagcccaagagacctgttatcaactccgatacacaggagaaggccatcaggactggaaggtgctggagccgcctctcggggcccgaggagggaccctggagctgcgcccgcgatctcgctaccgtttacagctgcgcgccaggctcaacggccccacctaccaaggtccctggagctcgtggtcggacccaactagggtggagaccgccaccgagaccgccacgcgtggaggcagtggtgtcttcacactcgaagatttcgttggggactggcgacagacagccggctacaacctggaccaagtccttgaacagggaggtgtgtccagtttgtttcagaatctcggggtgtccgtaactccgatccaaaggattgtcctgagcggtgaaaatgggctgaagatcgacatccatgtcatcatcccgtatgaaggtctgagcggcgaccaaatgggccagatcgaaaaaatttttaaggtggtgtaccctgtggatgatcatcactttaaggtgatcctgcactatggcacactggtaatcgacggggttacgccgaacatgatcgactatttcggacggccgtatgaaggcatcgccgtgttcgacggcaaaaagatcactgtaacagggaccctgtggaacggcaacaaaattatcgacgagcgcctgatcaaccccgacggctccctgctgttccgagtaaccatcaacggagtgaccggctggcggctgtgcgaacgcattctggcgagttggaaggatgcctctggatggtcc

SEQ ID NO: 927 - DNA, 2745 bp, Artificial Sequence
  Synthetic Polynucleotides
atggccttaccagtgaccgccttgctcctgccgctggccttgctgctccacgccgccaggccggacatccagatgacacagactacatcctccctgtctgcctctctgggagacagagtcaccatcagttgcagggcaagtcaggacattagtaaatatttaaattggtatcagcagaaaccagatggaactgttaaactcctgatctaccatacatcaagattacactcaggagtcccatcaaggttcagtggcagtgggtctggaacagattattctctcaccattagcaacctggagcaagaagatattgccacttacttttgccaacagggtaatacgcttccgtacacgttcggaggggggaccaagctggagatcacaggtggcggtggctcgggcggtggtgggtcgggtggcggcggatctgaggtgaaactgcaggagtcaggacctggcctggtggcgccctcacagagcctgtccgtcacatgcactgtctcaggggtctcattacccgactatggtgtaagctggattcgccagcctccacgaaagggtctggagtggctgggagtaatatggggtagtgaaaccacatactataattcagctctcaaatccagactgaccatcatcaaggacaactccaagagccaagttttcttaaaaatgaacagtctgcaaactgatgacacagccatttactactgtgccaaacattattactacggtggtagctatgctatggactactggggtcaaggaacctcagtcaccgtctcctcacgcgtagagcagaaactgatctcggaagaggatctggcgaagcccaccacgacgccagcgccgcgaccaccaacaccggcgcccaccatcgcgtcgcagcccctgtccctgcgcccagaggcgtgccggccagcggcggggggcgcagtgcacacgagggggctggacttcgcctgtgacatctacatctgggcgcccttggccgggacttgtggggtccttctcctgtcactggttatcaccctttactgcgggcgcgccagagtgaagttcagcaggagcgcagacgcccccgcgtaccagcagggccagaaccagctctataacgagctgaatctaggacgaagagaggagtacgatgttttggacaagagacgtggccgggaccctgagatggggggaaagccgagaaggaagaaccctcaggaaggcctgtacaatgaactgcagaaagataagatggcggaggcctacagtgagattgggatgaaaggcgagcgccggaggggcaaggggcacgatggcctttaccagggtctcagtacagccaccaaggacacctacgacgcccttcacatgcaggccctgccccctcgctctagaggatctggagcaacaaacttctcactactcaaacaagcaggtgacgtggaggagaatcccgggcctgggatccacatggccacttacgaggttctctgtgaggtggcgcggaaactgggcacggatgacagggaagtggtattgttcctcctaaacgtgttcatacctcaacccacactggcccaattaattggagctcttagagctttaaaggaggagggcaggttaacgtttcccctgttagcggaatgtctgtttcgtgcaggtcgcagagacctcttgcgcgacctgcttcacttagacccgcgttttttagagcgccacctagcgggcacaatgagttatttcagcccttatcagctcactgttctccacgtagacggggagctgtgtgcgagggatattaggtctttgatatttttaagcaaggacactatagggtctcgcagcacaccacagacattcttacactgggtgtactgtatggaaaacttagacctactgggtcccactgacgtggatgccctaatgtcaatgcttagatctttgtcaagagtagacctacagcgccaagtgcaaaccctaatgggccttcacctttccggcccatcacactcccaacactatcgccatacaccactcgagaccgatttctacgactacaaggacgacgatgacaagactagtggctccggcgagggcagaggaagtctactaacctgcggagatgtggaagaaaatcctggcccacatatgaccgagtacaagcccacggtgcgcctcgccacccgcgacgacgtccccagggccgtacgcaccctcgccgccgcgttcgccgactaccccgccacgcgccacaccgtcgatccggaccgccacatcgagcgggtcaccgagctgcaagaactcttcctcacgcgcgtcgggctcgacatcggcaaggtgtgggtcgcggacgacggcgccgcggtggcggtctggaccacgccggagagcgtcgaagcgggggcggtgttcgccgagatcggcccgcgcatggccgagttgagcggttcccggctggccgcgcagcaacagatggaaggcctcctggcgccgcaccggcccaaggagcccgcgtggttcctggccaccgtcggcgtctcgcccgaccaccagggcaagggtctgggcagcgccgtcgtgctccccggagtggaggcggccgagcgcgccggggtgcccgccttcctggagacctccgcgccccgcaacctccccttctacgagcggctcggcttcaccgtcaccgccgacgtcgaggtgcccgaaggaccgcgcacctggtgcatgacccgcaagcccggtgcctga

SEQ ID NO: 928 - DNA, 2745 bp, Artificial Sequence
  Synthetic Polynucleotides
atggccttaccagtgaccgccttgctcctgccgctggccttgctgctccacgccgccaggccggagatcgtgatgacccagagccctgccaccctgtctctgagccctggcgaaagagccaccctgagctgtagagccagccaggacatcagcaagtacctgaactggtatcagcagaagcccggccaggcccccagactgctgatctaccacaccagcagactgcacagcggcatccccgccagattttctggctctggcagcggcaccgactacaccctgacaatcagcagcctccagcccgaggacttcgccgtgtacttctgtcagcaaggcaacaccctgccctacaccttcggccagggcaccaagctggaaatcaagggcggaggcggaagtggaggcggaggatctggcggcggaggctctcaggtgcaactccaggaatctggccctggcctcgtgaagcccagcgagacactgagcctgacctgtaccgtgtccggcgtgtccctgcctgactatggcgtgtcctggatcagacagccccctggcaagggcctggaatggatcggagtgatttggggcagcgaaaccacctactacaacagctccctgaagtccagagtgaccatctccaaggacaactccaagaaccaggtgtccctgaagctgagcagcgtgacagccgccgacaccgccgtgtattactgcgccaagcactactactacggcggcagctacgctatggactactggggccagggaaccctcgtgaccgtgtctagtacgcgtgagcagaaactgatctcggaagaggatctggcgaagcccaccacgacgccagcgccgcgaccaccaacaccggcgcccaccatcgcgtcgcagcccctgtccctgcgcccagaggcgtgccggccagcggcggggggcgcagtgcacacgagggggctggacttcgcctgtgacatctacatctgggcgcccttggccgggacttgtggggtccttctcctgtcactggttatcaccctttactgcgggcgcgccagagtgaagttcagcaggagcgcagacgcccccgcgtaccagcagggccagaaccagctctataacgagctgaatctaggacgaagagaggagtacgatgttttggacaagagacgtggccgggaccctgagatggggggaaagccgagaaggaagaaccctcaggaaggcctgtacaatgaactgcagaaagataagatggcggaggcctacagtgagattgggatgaaaggcgagcgccggaggggcaaggggcacgatggcctttaccagggtctcagtacagccaccaaggacacctacgacgcccttcacatgcaggccctgccccctcgctctagaggatctggagcaacaaacttctcactactcaaacaagcaggtgacgtggaggagaatcccgggcctgggatccacatggccacttacgaggttctctgtgaggtggcgcggaaactgggcacggatgacagggaagtggtattgttcctcctaaacgtgttcatacctcaacccacactggcccaattaattggagctcttagagctttaaaggaggagggcaggttaacgtttcccctgttagcggaatgtctgtttcgtgcaggtcgcagagacctcttgcgcgacctgcttcacttagacccgcgttttttagagcgccacctagcgggcacaatgagttatttcagcccttatcagctcactgttctccacgtagacggggagctgtgtgcgagggatattaggtctttgatatttttaagcaaggacactatagggtctcgcagcacaccacagacattcttacactgggtgtactgtatggaaaacttagacctactgggtcccactgacgtggatgccctaatgtcaatgcttagatctttgtcaagagtagacctacagcgccaagtgcaaaccctaatgggccttcacctttccggcccatcacactcccaacactatcgccatacaccactcgagaccgatttctacgactacaaggacgacgatgacaagactagtggctccggcgagggcagaggaagtctactaacctgcggagatgtggaagaaaatcctggcccacatatgaccgagtacaagcccacggtgcgcctcgccacccgcgacgacgtccccagggccgtacgcaccctcgccgccgcgttcgccgactaccccgccacgcgccacaccgtcgatccggaccgccacatcgagcgggtcaccgagctgcaagaactcttcctcacgcgcgtcgggctcgacatcggcaaggtgtgggtcgcggacgacggcgccgcggtggcggtctggaccacgccggagagcgtcgaagcgggggcggtgttcgccgagatcggcccgcgcatggccgagttgagcggttcccggctggccgcgcagcaacagatggaaggcctcctggcgccgcaccggcccaaggagcccgcgtggttcctggccaccgtcggcgtctcgcccgaccaccagggcaagggtctgggcagcgccgtcgtgctccccggagtggaggcggccgagcgcgccggggtgcccgccttcctggagacctccgcgccccgcaacctccccttctacgagcggctcggcttcaccgtcaccgccgacgtcgaggtgcccgaaggaccgcgcacctggtgcatgacccgcaagcccggtgcctga

SEQ ID NO: 929 - DNA, 2745 bp, Artificial Sequence
  Synthetic Polynucleotides
atggccttaccagtgaccgccttgctcctgccgctggccttgctgctccacgccgccaggccggagatcgtgatgacccagagccctgccaccctgtctctgagccctggcgaaagagccaccctgagctgtagagccagccaggacatcagcaagtacctgaactggtatcagcagaagcccggccaggcccccagactgctgatctaccacaccagcagactgcacagcggcatccccgccagattttctggctctggcagcggcaccgactacaccctgacaatcagcagcctccagcccgaggacttcgccgtgtacttctgtcagcaaggcaacaccctgccctacaccttcggccagggcaccaagctggaaatcaagggcggaggcggaagtggaggcggaggatctggcggcggaggctctcaggtgcaactccaggaatctggccctggcctcgtgaagcccagcgagacactgagcctgacctgtaccgtgtccggcgtgtccctgcctgactatggcgtgtcctggatcagacagccccctggcaagggcctggaatggatcggagtgatttggggcagcgaaaccacctactaccaaagctccctgaagtccagagtgaccatctccaaggacaactccaagaaccaggtgtccctgaagctgagcagcgtgacagccgccgacaccgccgtgtattactgcgccaagcactactactacggcggcagctacgctatggactactggggccagggaaccctcgtgaccgtgtctagtacgcgtgagcagaaactgatctcggaagaggatctggcgaagcccaccacgacgccagcgccgcgaccaccaacaccggcgcccaccatcgcgtcgcagcccctgtccctgcgcccagaggcgtgccggccagcggcggggggcgcagtgcacacgagggggctggacttcgcctgtgacatctacatctgggcgcccttggccgggacttgtggggtccttctcctgtcactggttatcaccctttactgcgggcgcgccagagtgaagttcagcaggagcgcagacgcccccgcgtaccagcagggccagaaccagctctataacgagctgaatctaggacgaagagaggagtacgatgttttggacaagagacgtggccgggaccctgagatggggggaaagccgagaaggaagaaccctcaggaaggcctgtacaatgaactgcagaaagataagatggcggaggcctacagtgagattgggatgaaaggcgagcgccggaggggcaaggggcacgatggcctttaccagggtctcagtacagccaccaaggacacctacgacgcccttcacatgcaggccctgccccctcgctctagaggatctggagcaacaaacttctcactactcaaacaagcaggtgacgtggaggagaatcccgggcctgggatccacatggccacttacgaggttctctgtgaggtggcgcggaaactgggcacggatgacagggaagtggtattgttcctcctaaacgtgttcatacctcaacccacactggcccaattaattggagctcttagagctttaaaggaggagggcaggttaacgtttcccctgttagcggaatgtctgtttcgtgcaggtcgcagagacctcttgcgcgacctgcttcacttagacccgcgttttttagagcgccacctagcgggcacaatgagttatttcagcccttatcagctcactgttctccacgtagacggggagctgtgtgcgagggatattaggtctttgatatttttaagcaaggacactatagggtctcgcagcacaccacagacattcttacactgggtgtactgtatggaaaacttagacctactgggtcccactgacgtggatgccctaatgtcaatgcttagatctttgtcaagagtagacctacagcgccaagtgcaaaccctaatgggccttcacctttccggcccatcacactcccaacactatcgccatacaccactcgagaccgatttctacgactacaaggacgacgatgacaagactagtggctccggcgagggcagaggaagtctactaacctgcggagatgtggaagaaaatcctggcccacatatgaccgagtacaagcccacggtgcgcctcgccacccgcgacgacgtccccagggccgtacgcaccctcgccgccgcgttcgccgactaccccgccacgcgccacaccgtcgatccggaccgccacatcgagcgggtcaccgagctgcaagaactcttcctcacgcgcgtcgggctcgacatcggcaaggtgtgggtcgcggacgacggcgccgcggtggcggtctggaccacgccggagagcgtcgaagcgggggcggtgttcgccgagatcggcccgcgcatggccgagttgagcggttcccggctggccgcgcagcaacagatggaaggcctcctggcgccgcaccggcccaaggagcccgcgtggttcctggccaccgtcggcgtctcgcccgaccaccagggcaagggtctgggcagcgccgtcgtgctccccggagtggaggcggccgagcgcgccggggtgcccgccttcctggagacctccgcgccccgcaacctccccttctacgagcggctcggcttcaccgtcaccgccgacgtcgaggtgcccgaaggaccgcgcacctggtgcatgacccgcaagcccggtgcctga

SEQ ID NO: 930 - DNA, 2748 bp, Artificial Sequence
  Synthetic Polynucleotides
atggccttaccagtgaccgccttgctcctgccgctggccttgctgctccacgccgccaggccggacgagatcgtgctgacacagagccccgccaccctgtcactgtctccaggcgaaagagccaccctgagctgtagcgccagcagcagcgtgtcctacatgcactggtatcagcagaagcccggccaggcccccagactgctgatctacgataccagcaagctggcctccggcatccccgccagattttctggcagcggctccggcaccgacttcaccctgacaatcagcagcctggaacccgaggacgtggccgtgtactactgttttcaaggcagcgtgtaccccttcaccttcggccagggcaccaagctggaaatcaagagaggtggcggtggctcgggcggtggtgggtcgggtggcggcggatctcaggtgcagctccaggaatctggccctggcctcgtgaagcctagccagaccctgagcctgacctgtaccgtgtctggcggcagcatcagcacaagcggcatgggcgtgggctggatcagacagcaccctggcaagggcctggaatggatcggccacatttggtgggacgacgacaagcggtacaaccccgccctgaagtccagagtgaccatcagcgtggacaccagcaagaaccagttcagcctgaagctgagcagcgtgacagccgccgataccgccgtgtattattgcgcccggatggaactgtggtcctactacttcgactactggggccagggaaccctcgtgaccgtgtctagtacgcgtgagcagaaactgatctcggaagaggatctggcgaagcccaccacgacgccagcgccgcgaccaccaacaccggcgcccaccatcgcgtcgcagcccctgtccctgcgcccagaggcgtgccggccagcggcggggggcgcagtgcacacgagggggctggacttcgcctgtgacatctacatctgggcgcccttggccgggacttgtggggtccttctcctgtcactggttatcaccctttactgcgggcgcgccagagtgaagttcagcaggagcgcagacgcccccgcgtaccagcagggccagaaccagctctataacgagctgaatctaggacgaagagaggagtacgatgttttggacaagagacgtggccgggaccctgagatggggggaaagccgagaaggaagaaccctcaggaaggcctgtacaatgaactgcagaaagataagatggcggaggcctacagtgagattgggatgaaaggcgagcgccggaggggcaaggggcacgatggcctttaccagggtctcagtacagccaccaaggacacctacgacgcccttcacatgcaggccctgccccctcgctctagaggatctggagcaacaaacttctcactactcaaacaagcaggtgacgtggaggagaatcccgggcctgggatccacatggccacttacgaggttctctgtgaggtggcgcggaaactgggcacggatgacagggaagtggtattgttcctcctaaacgtgttcatacctcaacccacactggcccaattaattggagctcttagagctttaaaggaggagggcaggttaacgtttcccctgttagcggaatgtctgtttcgtgcaggtcgcagagacctcttgcgcgacctgcttcacttagacccgcgttttttagagcgccacctagcgggcacaatgagttatttcagcccttatcagctcactgttctccacgtagacggggagctgtgtgcgagggatattaggtctttgatatttttaagcaaggacactatagggtctcgcagcacaccacagacattcttacactgggtgtactgtatggaaaacttagacctactgggtcccactgacgtggatgccctaatgtcaatgcttagatctttgtcaagagtagacctacagcgccaagtgcaaaccctaatgggccttcacctttccggcccatcacactcccaacactatcgccatacaccactcgagaccgatttctacgactacaaggacgacgatgacaagactagtggctccggcgagggcagaggaagtctactaacctgcggagatgtggaagaaaatcctggcccacatatgaccgagtacaagcccacggtgcgcctcgccacccgcgacgacgtccccagggccgtacgcaccctcgccgccgcgttcgccgactaccccgccacgcgccacaccgtcgatccggaccgccacatcgagcgggtcaccgagctgcaagaactcttcctcacgcgcgtcgggctcgacatcggcaaggtgtgggtcgcggacgacggcgccgcggtggcggtctggaccacgccggagagcgtcgaagcgggggcggtgttcgccgagatcggcccgcgcatggccgagttgagcggttcccggctggccgcgcagcaacagatggaaggcctcctggcgccgcaccggcccaaggagcccgcgtggttcctggccaccgtcggcgtctcgcccgaccaccagggcaagggtctgggcagcgccgtcgtgctccccggagtggaggcggccgagcgcgccggggtgcccgccttcctggagacctccgcgccccgcaacctccccttctacgagcggctcggcttcaccgtcaccgccgacgtcgaggtgcccgaaggaccgcgcacctggtgcatgacccgcaagcccggtgcctga

SEQ ID NO: 931 - DNA, 2769 bp, Artificial Sequence
  Synthetic Polynucleotides
atggccctgcctgtgacagctctgctgctgcctctggcactgctgctgcacgccgccagacctgacatccagctgacacagagccctgccagcctggccgtgtctctgggacagagagccaccatcagctgcaaggccagccagagcgtggactacgacggcgacagctacctgaactggtatcagcagatccccggccagccccccaagctgctgatctacgatgccagcaacctggtgtccggcatcccccctagattttccggcagcggctccggcaccgacttcaccctgaatatccaccccgtggaaaaggtggacgccgccacctaccactgccagcagagcaccgaagatccctggacctttggcggaggcaccaagctggaaatcaagggaggcggaggaagtggcggcggaggatctgggggaggcggaagccaggtacagctccaacagtcaggggccgagctggtacgcccagggtccagcgtcaaaatatcatgtaaggcatctggctacgccttcagctcttactggatgaattgggtgaaacaacggccaggccagggactggagtggattggtcaaatttggccaggagacggggacacaaattacaacggaaaattcaagggaaaggccacacttaccgccgatgaaagtagttcaaccgcttatatgcagctgtcctccctcgcttctgaggactctgctgtgtacttttgcgcacgccgagaaaccaccactgtgggaagatactactacgctatggattattggggacagggcacaaccgtgaccgttagcagtacgcgtgagcagaaactgatctcggaagaggatctggcgaagcccaccacgacgccagcgccgcgaccaccaacaccggcgcccaccatcgcgtcgcagcccctgtccctgcgcccagaggcgtgccggccagcggcggggggcgcagtgcacacgagggggctggacttcgcctgtgacatctacatctgggcgcccttggccgggacttgtggggtccttctcctgtcactggttatcaccctttactgcgggcgcgccagagtgaagttcagcaggagcgcagacgcccccgcgtaccagcagggccagaaccagctctataacgagctgaatctaggacgaagagaggagtacgatgttttggacaagagacgtggccgggaccctgagatggggggaaagccgagaaggaagaaccctcaggaaggcctgtacaatgaactgcagaaagataagatggcggaggcctacagtgagattgggatgaaaggcgagcgccggaggggcaaggggcacgatggcctttaccagggtctcagtacagccaccaaggacacctacgacgcccttcacatgcaggccctgccccctcgctctagaggatctggagcaacaaacttctcactactcaaacaagcaggtgacgtggaggagaatcccgggcctgggatccacatggccacttacgaggttctctgtgaggtggcgcggaaactgggcacggatgacagggaagtggtattgttcctcctaaacgtgttcatacctcaacccacactggcccaattaattggagctcttagagctttaaaggaggagggcaggttaacgtttcccctgttagcggaatgtctgtttcgtgcaggtcgcagagacctcttgcgcgacctgcttcacttagacccgcgttttttagagcgccacctagcgggcacaatgagttatttcagcccttatcagctcactgttctccacgtagacggggagctgtgtgcgagggatattaggtctttgatatttttaagcaaggacactatagggtctcgcagcacaccacagacattcttacactgggtgtactgtatggaaaacttagacctactgggtcccactgacgtggatgccctaatgtcaatgcttagatctttgtcaagagtagacctacagcgccaagtgcaaaccctaatgggccttcacctttccggcccatcacactcccaacactatcgccatacaccactcgagaccgatttctacgactacaaggacgacgatgacaagactagtggctccggcgagggcagaggaagtctactaacctgcggagatgtggaagaaaatcctggcccacatatgaccgagtacaagcccacggtgcgcctcgccacccgcgacgacgtccccagggccgtacgcaccctcgccgccgcgttcgccgactaccccgccacgcgccacaccgtcgatccggaccgccacatcgagcgggtcaccgagctgcaagaactcttcctcacgcgcgtcgggctcgacatcggcaaggtgtgggtcgcggacgacggcgccgcggtggcggtctggaccacgccggagagcgtcgaagcgggggcggtgttcgccgagatcggcccgcgcatggccgagttgagcggttcccggctggccgcgcagcaacagatggaaggcctcctggcgccgcaccggcccaaggagcccgcgtggttcctggccaccgtcggcgtctcgcccgaccaccagggcaagggtctgggcagcgccgtcgtgctccccggagtggaggcggccgagcgcgccggggtgcccgccttcctggagacctccgcgccccgcaacctccccttctacgagcggctcggcttcaccgtcaccgccgacgtcgaggtgcccgaaggaccgcgcacctggtgcatgacccgcaagcccggtgcctga

SEQ ID NO: 932 - DNA, 2766 bp, Artificial Sequence
  Synthetic Polynucleotides
atggccttaccagtgaccgccttgctcctgccgctggccttgctgctccacgccgccaggccggacatcgtgatgacccaggccgctcccagcatccctgtgacacctggcgagagcgtgtccatctcctgccggtctagcaagagcctgctgaacagcaacggcaatacctacctgtactggttcctccagcggccaggccagtctccccaactgctgatctaccggatgagcaacctggcctccggcgtgcccgatagattttctggcagcggctccggcaccgccttcaccctgagaatcagcagagtggaagccgaggacgtgggcgtgtactactgtatgcagcacctggaataccccttcaccttcggagccggcaccaagctggaactgaagagaggcggaggcggaagtggaggcggaggatctggcggcggaggctctgaagtgcaactccagcagagcggccctgagctgattaagcctggggccagcgtgaagatgagctgcaaggccagcggctacaccttcaccagctacgtgatgcactgggtcaagcagaagcccggccagggcctggaatggatcggctacatcaacccctacaacgatggcaccaagtacaacgagaagttcaagggcaaggccaccctgaccagcgacaagagcagcagcaccgcctacatggaactgagcagcctgacaagcgaggacagcgccgtgtactattgcgccagaggcacctactactacggcagccgggtgttcgactattggggccagggcaccacactgaccgtgtcctctacgcgtgagcagaaactgatctcggaagaggatctggcgaagcccaccacgacgccagcgccgcgaccaccaacaccggcgcccaccatcgcgtcgcagcccctgtccctgcgcccagaggcgtgccggccagcggcggggggcgcagtgcacacgagggggctggacttcgcctgtgacatctacatctgggcgcccttggccgggacttgtggggtccttctcctgtcactggttatcaccctttactgcgggcgcgccagagtgaagttcagcaggagcgcagacgcccccgcgtaccagcagggccagaaccagctctataacgagctgaatctaggacgaagagaggagtacgatgttttggacaagagacgtggccgggaccctgagatggggggaaagccgagaaggaagaaccctcaggaaggcctgtacaatgaactgcagaaagataagatggcggaggcctacagtgagattgggatgaaaggcgagcgccggaggggcaaggggcacgatggcctttaccagggtctcagtacagccaccaaggacacctacgacgcccttcacatgcaggccctgccccctcgctctagaggatctggagcaacaaacttctcactactcaaacaagcaggtgacgtggaggagaatcccgggcctgggatccacatggccacttacgaggttctctgtgaggtggcgcggaaactgggcacggatgacagggaagtggtattgttcctcctaaacgtgttcatacctcaacccacactggcccaattaattggagctcttagagctttaaaggaggagggcaggttaacgtttcccctgttagcggaatgtctgtttcgtgcaggtcgcagagacctcttgcgcgacctgcttcacttagacccgcgttttttagagcgccacctagcgggcacaatgagttatttcagcccttatcagctcactgttctccacgtagacggggagctgtgtgcgagggatattaggtctttgatatttttaagcaaggacactatagggtctcgcagcacaccacagacattcttacactgggtgtactgtatggaaaacttagacctactgggtcccactgacgtggatgccctaatgtcaatgcttagatctttgtcaagagtagacctacagcgccaagtgcaaaccctaatgggccttcacctttccggcccatcacactcccaacactatcgccatacaccactcgagaccgatttctacgactacaaggacgacgatgacaagactagtggctccggcgagggcagaggaagtctactaacctgcggagatgtggaagaaaatcctggcccacatatgaccgagtacaagcccacggtgcgcctcgccacccgcgacgacgtccccagggccgtacgcaccctcgccgccgcgttcgccgactaccccgccacgcgccacaccgtcgatccggaccgccacatcgagcgggtcaccgagctgcaagaactcttcctcacgcgcgtcgggctcgacatcggcaaggtgtgggtcgcggacgacggcgccgcggtggcggtctggaccacgccggagagcgtcgaagcgggggcggtgttcgccgagatcggcccgcgcatggccgagttgagcggttcccggctggccgcgcagcaacagatggaaggcctcctggcgccgcaccggcccaaggagcccgcgtggttcctggccaccgtcggcgtctcgcccgaccaccagggcaagggtctgggcagcgccgtcgtgctccccggagtggaggcggccgagcgcgccggggtgcccgccttcctggagacctccgcgccccgcaacctccccttctacgagcggctcggcttcaccgtcaccgccgacgtcgaggtgcccgaaggaccgcgcacctggtgcatgacccgcaagcccggtgcctga

SEQ ID NO: 933 - DNA, 2760 bp, Artificial Sequence
  Synthetic Polynucleotides
atggccttaccagtgaccgccttgctcctgccgctggccttgctgctccacgccgccaggccggagatcgtgctgacacagagccccgatttccagagcgtgacccctaaagaaaaagtgaccatcacctgtcgggccagcgagagcgtggacacattcggcatcagcttcatgaactggttccagcagaagcccgatcagagccccaagctgctgattcacgccgccagcaatcaaggcagcggagtgcctagcagattttccggctctggcagcggcaccgatttcaccctgaccatcaatagcctggaagccgaggatgccgccacctactactgccagcagagcaaagaggtgcccttcacctttggcggaggcaccaaggtggaaatcaaaggcggaggcggaagtggaggcggaggatctggcggcggaggctctgaagtgcagctcgttgagtctggtggcggactggttcaacctggcggaagcctgagactgtcttgtgccgccagcggcttcaccttcagcagctcttggatgaactgggtccgacaggcccctggcaaaggactggaatgggtcggaagaatctaccccggcgacggcgacaccaactacaacggcaagttcaagggcagattcaccatcagccgggacgacagcaagaacagcctgtacctgcagatgaactccctgaaaaccgaggacaccgccgtgtactactgtgccagatccggcttcatcaccaccgtgctggacttcgattattggggccagggcaccctggtcaccgtttcttctacgcgtgagcagaaactgatctcggaagaggatctggcgaagcccaccacgacgccagcgccgcgaccaccaacaccggcgcccaccatcgcgtcgcagcccctgtccctgcgcccagaggcgtgccggccagcggcggggggcgcagtgcacacgagggggctggacttcgcctgtgacatctacatctgggcgcccttggccgggacttgtggggtccttctcctgtcactggttatcaccctttactgcgggcgcgccagagtgaagttcagcaggagcgcagacgcccccgcgtaccagcagggccagaaccagctctataacgagctgaatctaggacgaagagaggagtacgatgttttggacaagagacgtggccgggaccctgagatggggggaaagccgagaaggaagaaccctcaggaaggcctgtacaatgaactgcagaaagataagatggcggaggcctacagtgagattgggatgaaaggcgagcgccggaggggcaaggggcacgatggcctttaccagggtctcagtacagccaccaaggacacctacgacgcccttcacatgcaggccctgccccctcgctctagaggatctggagcaacaaacttctcactactcaaacaagcaggtgacgtggaggagaatcccgggcctgggatccacatggccacttacgaggttctctgtgaggtggcgcggaaactgggcacggatgacagggaagtggtattgttcctcctaaacgtgttcatacctcaacccacactggcccaattaattggagctcttagagctttaaaggaggagggcaggttaacgtttcccctgttagcggaatgtctgtttcgtgcaggtcgcagagacctcttgcgcgacctgcttcacttagacccgcgttttttagagcgccacctagcgggcacaatgagttatttcagcccttatcagctcactgttctccacgtagacggggagctgtgtgcgagggatattaggtctttgatatttttaagcaaggacactatagggtctcgcagcacaccacagacattcttacactgggtgtactgtatggaaaacttagacctactgggtcccactgacgtggatgccctaatgtcaatgcttagatctttgtcaagagtagacctacagcgccaagtgcaaaccctaatgggccttcacctttccggcccatcacactcccaacactatcgccatacaccactcgagaccgatttctacgactacaaggacgacgatgacaagactagtggctccggcgagggcagaggaagtctactaacctgcggagatgtggaagaaaatcctggcccacatatgaccgagtacaagcccacggtgcgcctcgccacccgcgacgacgtccccagggccgtacgcaccctcgccgccgcgttcgccgactaccccgccacgcgccacaccgtcgatccggaccgccacatcgagcgggtcaccgagctgcaagaactcttcctcacgcgcgtcgggctcgacatcggcaaggtgtgggtcgcggacgacggcgccgcggtggcggtctggaccacgccggagagcgtcgaagcgggggcggtgttcgccgagatcggcccgcgcatggccgagttgagcggttcccggctggccgcgcagcaacagatggaaggcctcctggcgccgcaccggcccaaggagcccgcgtggttcctggccaccgtcggcgtctcgcccgaccaccagggcaagggtctgggcagcgccgtcgtgctccccggagtggaggcggccgagcgcgccggggtgcccgccttcctggagacctccgcgccccgcaacctccccttctacgagcggctcggcttcaccgtcaccgccgacgtcgaggtgcccgaaggaccgcgcacctggtgcatgacccgcaagcccggtgcctga

SEQ ID NO: 934 - DNA, 2748 bp, Artificial Sequence
  Synthetic Polynucleotides
atggccttaccagtgaccgccttgctcctgccgctggccttgctgctccacgccgccaggccggccattcagctcacacagagcccttctagcctgagcgcctctgtgggcgacagagtgaccatcacatgtagagccagccagggcatcagcagcgcccagcagaaacctggaaaggcccctaagctgctgatcctggcctggtacagcagcctggaaagcggagtgcctagcagattcagcggctacgatgcctctggcagcggcaccgatttcaccctgacaatatccagcctccagcctgaggacttcgccacctactactgccagcagttcaacagctacccctacaccttcggccagggcaccaagctggaaatcaaaggcggaggcggaagtggaggcggaggatctggcggcggaggctctgaagtgcaactggttcagagcggagccgaagtgaagaagcctggcgagagcctgaagattagctgcaaaggctccggctacagcttcagcagctcttggatcggctgggtccgacagatgcctggcaaaggactggaatggatgggcatcatctaccccgacgacagcgacaccagatacagccctagcttccagggccaagtgacaatcagcgccgacaagagcatcagaaccgcctacctccagtggtcctctctgaaggccagcgataccgccatgtactactgcgccagacacgtgaccatgatctggggagtgattatcgacttctggggccagggaaccctggtcacagtctcttctacgcgtgagcagaaactgatctcggaagaggatctggcgaagcccaccacgacgccagcgccgcgaccaccaacaccggcgcccaccatcgcgtcgcagcccctgtccctgcgcccagaggcgtgccggccagcggcggggggcgcagtgcacacgagggggctggacttcgcctgtgacatctacatctgggcgcccttggccgggacttgtggggtccttctcctgtcactggttatcaccctttactgcgggcgcgccagagtgaagttcagcaggagcgcagacgcccccgcgtaccagcagggccagaaccagctctataacgagctgaatctaggacgaagagaggagtacgatgttttggacaagagacgtggccgggaccctgagatggggggaaagccgagaaggaagaaccctcaggaaggcctgtacaatgaactgcagaaagataagatggcggaggcctacagtgagattgggatgaaaggcgagcgccggaggggcaaggggcacgatggcctttaccagggtctcagtacagccaccaaggacacctacgacgcccttcacatgcaggccctgccccctcgctctagaggatctggagcaacaaacttctcactactcaaacaagcaggtgacgtggaggagaatcccgggcctgggatccacatggccacttacgaggttctctgtgaggtggcgcggaaactgggcacggatgacagggaagtggtattgttcctcctaaacgtgttcatacctcaacccacactggcccaattaattggagctcttagagctttaaaggaggagggcaggttaacgtttcccctgttagcggaatgtctgtttcgtgcaggtcgcagagacctcttgcgcgacctgcttcacttagacccgcgttttttagagcgccacctagcgggcacaatgagttatttcagcccttatcagctcactgttctccacgtagacggggagctgtgtgcgagggatattaggtctttgatatttttaagcaaggacactatagggtctcgcagcacaccacagacattcttacactgggtgtactgtatggaaaacttagacctactgggtcccactgacgtggatgccctaatgtcaatgcttagatctttgtcaagagtagacctacagcgccaagtgcaaaccctaatgggccttcacctttccggcccatcacactcccaacactatcgccatacaccactcgagaccgatttctacgactacaaggacgacgatgacaagactagtggctccggcgagggcagaggaagtctactaacctgcggagatgtggaagaaaatcctggcccacatatgaccgagtacaagcccacggtgcgcctcgccacccgcgacgacgtccccagggccgtacgcaccctcgccgccgcgttcgccgactaccccgccacgcgccacaccgtcgatccggaccgccacatcgagcgggtcaccgagctgcaagaactcttcctcacgcgcgtcgggctcgacatcggcaaggtgtgggtcgcggacgacggcgccgcggtggcggtctggaccacgccggagagcgtcgaagcgggggcggtgttcgccgagatcggcccgcgcatggccgagttgagcggttcccggctggccgcgcagcaacagatggaaggcctcctggcgccgcaccggcccaaggagcccgcgtggttcctggccaccgtcggcgtctcgcccgaccaccagggcaagggtctgggcagcgccgtcgtgctccccggagtggaggcggccgagcgcgccggggtgcccgccttcctggagacctccgcgccccgcaacctccccttctacgagcggctcggcttcaccgtcaccgccgacgtcgaggtgcccgaaggaccgcgcacctggtgcatgacccgcaagcccggtgcctga

SEQ ID NO: 935 - DNA, 2820 bp, Artificial Sequence
  Synthetic Polynucleotides
atggccttaccagtgaccgccttgctcctgccgctggccttgctgctccacgccgccaggccgatcaacatctacaacgccgagcctgccaatcctagcgagaagaacagccccgaattcgacatcgtgatgacacagagccccgccacactgtcactgtctccaggcgaaagagccacactgagctgtcggagcagcaagagcctccagaacgtgaacggcaacacctacctgtactggttccagcagaagcccggccagtctcctcagctcctgatctacagaatgagcaacctgaacagcggcgtgcccgacagattttctggcagcggaagcggcaccgagttcaccctgaccataagcagcctggaacctgaggacttcgccgtgtactactgtatgcagcacctggaataccccatcaccttcggagccggcaccaagctggaaatcaaaggcggaggcggaagtggaggcggaggatctggcggcggaggctctgaagtgcaactggttgaatctggcggcggactggttaagcctggcggatctctgaagctgagctgtgccgccagcggctacacctttaccagctacgtgatgcactgggtccgacaggcccctggcaaaggacttgagtggatcggctacatcaacccctacaacgatggcaccaagtacaacgagaagttccagggcagagtgaccatcagctccgacaagagcatcagcaccgcctacatggaactgagcagcctgagaagcgaggataccgccatgtactattgcgccagaggcacctactactacggcaccagagtgttcgactactggggccagggaaccctggtcacagtctcttctacgcgtgagcagaaactgatctcggaagaggatctggcgaagcccaccacgacgccagcgccgcgaccaccaacaccggcgcccaccatcgcgtcgcagcccctgtccctgcgcccagaggcgtgccggccagcggcggggggcgcagtgcacacgagggggctggacttcgcctgtgacatctacatctgggcgcccttggccgggacttgtggggtccttctcctgtcactggttatcaccctttactgcgggcgcgccagagtgaagttcagcaggagcgcagacgcccccgcgtaccagcagggccagaaccagctctataacgagctgaatctaggacgaagagaggagtacgatgttttggacaagagacgtggccgggaccctgagatggggggaaagccgagaaggaagaaccctcaggaaggcctgtacaatgaactgcagaaagataagatggcggaggcctacagtgagattgggatgaaaggcgagcgccggaggggcaaggggcacgatggcctttaccagggtctcagtacagccaccaaggacacctacgacgcccttcacatgcaggccctgccccctcgctctagaggatctggagcaacaaacttctcactactcaaacaagcaggtgacgtggaggagaatcccgggcctgggatccacatggccacttacgaggttctctgtgaggtggcgcggaaactgggcacggatgacagggaagtggtattgttcctcctaaacgtgttcatacctcaacccacactggcccaattaattggagctcttagagctttaaaggaggagggcaggttaacgtttcccctgttagcggaatgtctgtttcgtgcaggtcgcagagacctcttgcgcgacctgcttcacttagacccgcgttttttagagcgccacctagcgggcacaatgagttatttcagcccttatcagctcactgttctccacgtagacggggagctgtgtgcgagggatattaggtctttgatatttttaagcaaggacactatagggtctcgcagcacaccacagacattcttacactgggtgtactgtatggaaaacttagacctactgggtcccactgacgtggatgccctaatgtcaatgcttagatctttgtcaagagtagacctacagcgccaagtgcaaaccctaatgggccttcacctttccggcccatcacactcccaacactatcgccatacaccactcgagaccgatttctacgactacaaggacgacgatgacaagactagtggctccggcgagggcagaggaagtctactaacctgcggagatgtggaagaaaatcctggcccacatatgaccgagtacaagcccacggtgcgcctcgccacccgcgacgacgtccccagggccgtacgcaccctcgccgccgcgttcgccgactaccccgccacgcgccacaccgtcgatccggaccgccacatcgagcgggtcaccgagctgcaagaactcttcctcacgcgcgtcgggctcgacatcggcaaggtgtgggtcgcggacgacggcgccgcggtggcggtctggaccacgccggagagcgtcgaagcgggggcggtgttcgccgagatcggcccgcgcatggccgagttgagcggttcccggctggccgcgcagcaacagatggaaggcctcctggcgccgcaccggcccaaggagcccgcgtggttcctggccaccgtcggcgtctcgcccgaccaccagggcaagggtctgggcagcgccgtcgtgctccccggagtggaggcggccgagcgcgccggggtgcccgccttcctggagacctccgcgccccgcaacctccccttctacgagcggctcggcttcaccgtcaccgccgacgtcgaggtgcccgaaggaccgcgcacctggtgcatgacccgcaagcccggtgcctga

SEQ ID NO: 936 - DNA, 2766 bp, Artificial Sequence
  Synthetic Polynucleotides
atggccttaccagtgaccgccttgctcctgccgctggccttgctgctccacgccgccaggccggacatcctgctgacacagtctcccgccacactgtcactgtctccaggcgaaagagccacactgagctgtagagccagccagagcgtggactacgacggcgacagctacctgaactggtatcagcagaagcccggccagcctcctaagctgctgatctacgatgccagcaacctggtgtctggcatccctcctagattttccggcagcggctctggcaccgatttcaccctgaccatcagcagactggaacccgaggacttcgccgtgtaccactgtcagcagagcacagaggacccctggacatttggcggaggcaccaagctggaaatcaaaggcggaggcggaagtggaggcggaggatctggcggcggaggctctcaggtgcagctggttgaatctggcggcggacttgttgagcctggcggatctctgagactgagctgcatgagcggctacgccttcagcagctactggatgaactgggtccgacagatgcccggcaaaggactggaatggatgggccagatttggcctggcgacggcgataccaactacaaccccagcctgaagtccagagtgaccatcaccgccgatgagagcaccagcaccgcctacatggaactgtctagcctgaaggccgaggatacagccgtgtacttctgcgccagacgggaaaccacaaccgtgggcagatattactacgctatggactactggggccagggcaccctggttacagtctcttctacgcgtgagcagaaactgatctcggaagaggatctggcgaagcccaccacgacgccagcgccgcgaccaccaacaccggcgcccaccatcgcgtcgcagcccctgtccctgcgcccagaggcgtgccggccagcggcggggggcgcagtgcacacgagggggctggacttcgcctgtgacatctacatctgggcgcccttggccgggacttgtggggtccttctcctgtcactggttatcaccctttactgcgggcgcgccagagtgaagttcagcaggagcgcagacgcccccgcgtaccagcagggccagaaccagctctataacgagctgaatctaggacgaagagaggagtacgatgttttggacaagagacgtggccgggaccctgagatggggggaaagccgagaaggaagaaccctcaggaaggcctgtacaatgaactgcagaaagataagatggcggaggcctacagtgagattgggatgaaaggcgagcgccggaggggcaaggggcacgatggcctttaccagggtctcagtacagccaccaaggacacctacgacgcccttcacatgcaggccctgccccctcgctctagaggatctggagcaacaaacttctcactactcaaacaagcaggtgacgtggaggagaatcccgggcctgggatccacatggccacttacgaggttctctgtgaggtggcgcggaaactgggcacggatgacagggaagtggtattgttcctcctaaacgtgttcatacctcaacccacactggcccaattaattggagctcttagagctttaaaggaggagggcaggttaacgtttcccctgttagcggaatgtctgtttcgtgcaggtcgcagagacctcttgcgcgacctgcttcacttagacccgcgttttttagagcgccacctagcgggcacaatgagttatttcagcccttatcagctcactgttctccacgtagacggggagctgtgtgcgagggatattaggtctttgatatttttaagcaaggacactatagggtctcgcagcacaccacagacattcttacactgggtgtactgtatggaaaacttagacctactgggtcccactgacgtggatgccctaatgtcaatgcttagatctttgtcaagagtagacctacagcgccaagtgcaaaccctaatgggccttcacctttccggcccatcacactcccaacactatcgccatacaccactcgagaccgatttctacgactacaaggacgacgatgacaagactagtggctccggcgagggcagaggaagtctactaacctgcggagatgtggaagaaaatcctggcccacatatgaccgagtacaagcccacggtgcgcctcgccacccgcgacgacgtccccagggccgtacgcaccctcgccgccgcgttcgccgactaccccgccacgcgccacaccgtcgatccggaccgccacatcgagcgggtcaccgagctgcaagaactcttcctcacgcgcgtcgggctcgacatcggcaaggtgtgggtcgcggacgacggcgccgcggtggcggtctggaccacgccggagagcgtcgaagcgggggcggtgttcgccgagatcggcccgcgcatggccgagttgagcggttcccggctggccgcgcagcaacagatggaaggcctcctggcgccgcaccggcccaaggagcccgcgtggttcctggccaccgtcggcgtctcgcccgaccaccagggcaagggtctgggcagcgccgtcgtgctccccggagtggaggcggccgagcgcgccggggtgcccgccttcctggagacctccgcgccccgcaacctccccttctacgagcggctcggcttcaccgtcaccgccgacgtcgaggtgcccgaaggaccgcgcacctggtgcatgacccgcaagcccggtgcctga

SEQ ID NO: 937 - DNA, 2757 bp, Artificial Sequence
  Synthetic Polynucleotides
atggccttaccagtgaccgccttgctcctgccgctggccttgctgctccacgccgccaggccggacatcctgctgacacagtctcccgccacactgtcactgtctccaggcgaaagagccacactgagctgtagagccagccagagcgtggacaactacggcatcagcttcatgaactggtatcagcagaagcccggccagcctcctaagctgctgatctacgccgccagcaatcaaggctctggcatccccagcagattttccggctctggaagcggcaccgacttcaccctgaccataagcagcctggaacctgaggacttcgccatgtacttttgccagcagagcaacgaggtgcccagaacctttggcggaggcaccaagctggaaatcaaaggcggaggcggaagtggaggcggaggatctggcggcggaggctctcaggtgcaactggttgagtctggcggcggacttgttgaacctggcggaagcctgagactgagctgcatgagcggctacgcctttagcagctcctggatgaactgggtccgacagatgcctggcaaaggactggaatggatgggcagaatctaccccggcgacggcgacaccaactacaacggcaagttcaaagaacgggtcaccatcaccgccgacgagagcacaagcaccgcctacatggaactgagcagcctgaaggccgaggataccgccgtgtacttctgcgccagaagcgagtattggggcaactactgggctatggactactggggccagggcacactggtcacagtgtctagcacgcgtgagcagaaactgatctcggaagaggatctggcgaagcccaccacgacgccagcgccgcgaccaccaacaccggcgcccaccatcgcgtcgcagcccctgtccctgcgcccagaggcgtgccggccagcggcggggggcgcagtgcacacgagggggctggacttcgcctgtgacatctacatctgggcgcccttggccgggacttgtggggtccttctcctgtcactggttatcaccctttactgcgggcgcgccagagtgaagttcagcaggagcgcagacgcccccgcgtaccagcagggccagaaccagctctataacgagctgaatctaggacgaagagaggagtacgatgttttggacaagagacgtggccgggaccctgagatggggggaaagccgagaaggaagaaccctcaggaaggcctgtacaatgaactgcagaaagataagatggcggaggcctacagtgagattgggatgaaaggcgagcgccggaggggcaaggggcacgatggcctttaccagggtctcagtacagccaccaaggacacctacgacgcccttcacatgcaggccctgccccctcgctctagaggatctggagcaacaaacttctcactactcaaacaagcaggtgacgtggaggagaatcccgggcctgggatccacatggccacttacgaggttctctgtgaggtggcgcggaaactgggcacggatgacagggaagtggtattgttcctcctaaacgtgttcatacctcaacccacactggcccaattaattggagctcttagagctttaaaggaggagggcaggttaacgtttcccctgttagcggaatgtctgtttcgtgcaggtcgcagagacctcttgcgcgacctgcttcacttagacccgcgttttttagagcgccacctagcgggcacaatgagttatttcagcccttatcagctcactgttctccacgtagacggggagctgtgtgcgagggatattaggtctttgatatttttaagcaaggacactatagggtctcgcagcacaccacagacattcttacactgggtgtactgtatggaaaacttagacctactgggtcccactgacgtggatgccctaatgtcaatgcttagatctttgtcaagagtagacctacagcgccaagtgcaaaccctaatgggccttcacctttccggcccatcacactcccaacactatcgccatacaccactcgagaccgatttctacgactacaaggacgacgatgacaagactagtggctccggcgagggcagaggaagtctactaacctgcggagatgtggaagaaaatcctggcccacatatgaccgagtacaagcccacggtgcgcctcgccacccgcgacgacgtccccagggccgtacgcaccctcgccgccgcgttcgccgactaccccgccacgcgccacaccgtcgatccggaccgccacatcgagcgggtcaccgagctgcaagaactcttcctcacgcgcgtcgggctcgacatcggcaaggtgtgggtcgcggacgacggcgccgcggtggcggtctggaccacgccggagagcgtcgaagcgggggcggtgttcgccgagatcggcccgcgcatggccgagttgagcggttcccggctggccgcgcagcaacagatggaaggcctcctggcgccgcaccggcccaaggagcccgcgtggttcctggccaccgtcggcgtctcgcccgaccaccagggcaagggtctgggcagcgccgtcgtgctccccggagtggaggcggccgagcgcgccggggtgcccgccttcctggagacctccgcgccccgcaacctccccttctacgagcggctcggcttcaccgtcaccgccgacgtcgaggtgcccgaaggaccgcgcacctggtgcatgacccgcaagcccggtgcctga

SEQ ID NO: 938 - DNA, 2754 bp, Artificial Sequence
  Synthetic Polynucleotides
atggccttaccagtgaccgccttgctcctgccgctggccttgctgctccacgccgccaggccggacatcctgctgacacagtctcccgccacactgtcactgtctccaggcgaaagagccacactgagctgcaaggccagtcagaacgtgggcacaaacgtggcctggtatcagcagaagcctggacagcctcctaagctgctgatctacagcgccacctaccggaactctggcatccctgccagattttctggcagcggctctggcaccgagttcaccctgaccatcaccaacgtgcagagcaaggacctggccgactacttctacttctgccagtacaacagatacccctacaccagcggcggaggcaccaagctggaaatcaaaagaggcggaggcggaagtggaggcggaggatctggcggcggaggctctcaggtgcaactggttgaatcaggcggaggactggtggaacctggcggatctctgagactgagctgtatgagcggctacgccttcagcagctactggatgaactgggtccgacagatgcccggcaaaggactggaatggatgggccaaatctaccccggcgacggcgacaccaactacaacggcaagttcaagggcagagtgacaatcaccgccgacgagagcacaagcaccgcctacatggaactgagcagcctgaaggccgaggataccgccgtgtacttctgcgccagaaagaccatcagcagcgtggtggatttctacttcgacaactggggccagggcaccctggtcacagtttcttctacgcgtgagcagaaactgatctcggaagaggatctggcgaagcccaccacgacgccagcgccgcgaccaccaacaccggcgcccaccatcgcgtcgcagcccctgtccctgcgcccagaggcgtgccggccagcggcggggggcgcagtgcacacgagggggctggacttcgcctgtgacatctacatctgggcgcccttggccgggacttgtggggtccttctcctgtcactggttatcaccctttactgcgggcgcgccagagtgaagttcagcaggagcgcagacgcccccgcgtaccagcagggccagaaccagctctataacgagctgaatctaggacgaagagaggagtacgatgttttggacaagagacgtggccgggaccctgagatggggggaaagccgagaaggaagaaccctcaggaaggcctgtacaatgaactgcagaaagataagatggcggaggcctacagtgagattgggatgaaaggcgagcgccggaggggcaaggggcacgatggcctttaccagggtctcagtacagccaccaaggacacctacgacgcccttcacatgcaggccctgccccctcgctctagaggatctggagcaacaaacttctcactactcaaacaagcaggtgacgtggaggagaatcccgggcctgggatccacatggccacttacgaggttctctgtgaggtggcgcggaaactgggcacggatgacagggaagtggtattgttcctcctaaacgtgttcatacctcaacccacactggcccaattaattggagctcttagagctttaaaggaggagggcaggttaacgtttcccctgttagcggaatgtctgtttcgtgcaggtcgcagagacctcttgcgcgacctgcttcacttagacccgcgttttttagagcgccacctagcgggcacaatgagttatttcagcccttatcagctcactgttctccacgtagacggggagctgtgtgcgagggatattaggtctttgatatttttaagcaaggacactatagggtctcgcagcacaccacagacattcttacactgggtgtactgtatggaaaacttagacctactgggtcccactgacgtggatgccctaatgtcaatgcttagatctttgtcaagagtagacctacagcgccaagtgcaaaccctaatgggccttcacctttccggcccatcacactcccaacactatcgccatacaccactcgagaccgatttctacgactacaaggacgacgatgacaagactagtggctccggcgagggcagaggaagtctactaacctgcggagatgtggaagaaaatcctggcccacatatgaccgagtacaagcccacggtgcgcctcgccacccgcgacgacgtccccagggccgtacgcaccctcgccgccgcgttcgccgactaccccgccacgcgccacaccgtcgatccggaccgccacatcgagcgggtcaccgagctgcaagaactcttcctcacgcgcgtcgggctcgacatcggcaaggtgtgggtcgcggacgacggcgccgcggtggcggtctggaccacgccggagagcgtcgaagcgggggcggtgttcgccgagatcggcccgcgcatggccgagttgagcggttcccggctggccgcgcagcaacagatggaaggcctcctggcgccgcaccggcccaaggagcccgcgtggttcctggccaccgtcggcgtctcgcccgaccaccagggcaagggtctgggcagcgccgtcgtgctccccggagtggaggcggccgagcgcgccggggtgcccgccttcctggagacctccgcgccccgcaacctccccttctacgagcggctcggcttcaccgtcaccgccgacgtcgaggtgcccgaaggaccgcgcacctggtgcatgacccgcaagcccggtgcctga

SEQ ID NO: 939 - DNA, 2793 bp, Artificial Sequence
  Synthetic Polynucleotides
atggccttaccagtgaccgccttgctcctgccgctggccttgctgctccacgccgccaggccgatcaacatctacaacgccgagcctgccaatcctagcgagaagaacagccccgaattccagatcgtgctgacacagtctccagccacactgagcgcttctccaggcgagaaggccaccatgacatgttctgccagcagcggcgtgaactacatgcactggtatcagcagaagcccggcacaagccccaagcggtggatctacgataccgacaagacagccagcggagtgcccgccagattttctggctctggcagcggcacatcctacagcctgacaatcagcagcatggaagccgaggatgccgccacctactactgtcaccagagaggcagctacaccttcggcggaggcaccaagctggaaatcaaaggcggaggcggaagtggaggcggaggatctggcggcggaggctctcaagttcagctggaacaacctggcgctgaggtggtcaaaccaggggcctctgtgaaggtgtcctgcaagacaagcggctacacattcaccagcaactggatgcactgggtcaagcagacccctggcaaaggactggaatggatcggcgagatcgaccccagcgactcctacaccaactacaaccagaagttcgacggcaaggccaagctgaccgtggacaagtctagcagcaccgcctacatggaagtgtccgatctgaccgccgaagatagcgccacatattactgcgccagaggcagcaacccctactactacgctatggactattggggccagggcaccagcgtgacagtctcttctacgcgtgagcagaaactgatctcggaagaggatctggcgaagcccaccacgacgccagcgccgcgaccaccaacaccggcgcccaccatcgcgtcgcagcccctgtccctgcgcccagaggcgtgccggccagcggcggggggcgcagtgcacacgagggggctggacttcgcctgtgacatctacatctgggcgcccttggccgggacttgtggggtccttctcctgtcactggttatcaccctttactgcgggcgcgccagagtgaagttcagcaggagcgcagacgcccccgcgtaccagcagggccagaaccagctctataacgagctgaatctaggacgaagagaggagtacgatgttttggacaagagacgtggccgggaccctgagatggggggaaagccgagaaggaagaaccctcaggaaggcctgtacaatgaactgcagaaagataagatggcggaggcctacagtgagattgggatgaaaggcgagcgccggaggggcaaggggcacgatggcctttaccagggtctcagtacagccaccaaggacacctacgacgcccttcacatgcaggccctgccccctcgctctagaggatctggagcaacaaacttctcactactcaaacaagcaggtgacgtggaggagaatcccgggcctgggatccacatggccacttacgaggttctctgtgaggtggcgcggaaactgggcacggatgacagggaagtggtattgttcctcctaaacgtgttcatacctcaacccacactggcccaattaattggagctcttagagctttaaaggaggagggcaggttaacgtttcccctgttagcggaatgtctgtttcgtgcaggtcgcagagacctcttgcgcgacctgcttcacttagacccgcgttttttagagcgccacctagcgggcacaatgagttatttcagcccttatcagctcactgttctccacgtagacggggagctgtgtgcgagggatattaggtctttgatatttttaagcaaggacactatagggtctcgcagcacaccacagacattcttacactgggtgtactgtatggaaaacttagacctactgggtcccactgacgtggatgccctaatgtcaatgcttagatctttgtcaagagtagacctacagcgccaagtgcaaaccctaatgggccttcacctttccggcccatcacactcccaacactatcgccatacaccactcgagaccgatttctacgactacaaggacgacgatgacaagactagtggctccggcgagggcagaggaagtctactaacctgcggagatgtggaagaaaatcctggcccacatatgaccgagtacaagcccacggtgcgcctcgccacccgcgacgacgtccccagggccgtacgcaccctcgccgccgcgttcgccgactaccccgccacgcgccacaccgtcgatccggaccgccacatcgagcgggtcaccgagctgcaagaactcttcctcacgcgcgtcgggctcgacatcggcaaggtgtgggtcgcggacgacggcgccgcggtggcggtctggaccacgccggagagcgtcgaagcgggggcggtgttcgccgagatcggcccgcgcatggccgagttgagcggttcccggctggccgcgcagcaacagatggaaggcctcctggcgccgcaccggcccaaggagcccgcgtggttcctggccaccgtcggcgtctcgcccgaccaccagggcaagggtctgggcagcgccgtcgtgctccccggagtggaggcggccgagcgcgccggggtgcccgccttcctggagacctccgcgccccgcaacctccccttctacgagcggctcggcttcaccgtcaccgccgacgtcgaggtgcccgaaggaccgcgcacctggtgcatgacccgcaagcccggtgcctga

SEQ ID NO: 940 - DNA, 2751 bp, Artificial Sequence
  Synthetic Polynucleotides
atggccttaccagtgaccgccttgctcctgccgctggccttgctgctccacgccgccaggccggacatccagatgacacagagccctagcagcctgtctgccagcgtgggagacagagtgaccatcacatgcaaggccagcgaccacatcaacaactggctggcctggtatcagcagaagcctggacaggcccctaagctgctgatctacggcgctaccacactggaaacaggcgtgcccagcagattttctggcagcggctctggcaccgactacaccctgacaatatccagcctccagcctgaggacttcgccacctactactgtcagcagagctggaacaccccttggacattcggccagggcaccaagctggaaatcaagagaggcggaggcggaagtggaggcggaggatctggcggcggaggctctcaagttcagcttcaacagcctggcgctgagctggtcaaacctggcgcttctgtgaagatgagctgcaaagccagcggctacgccttcagcagctactggatcaactggatgaagcagaaacccggccagggactcgaatggatcggccaaatctatcccggcgacggcgacaccaactacaacggcaagttcaagggcagagccacactgaccgccgatacctctagcagcacagcctacatgcagctgagcagcctgaccagcgaagatagcgccgtgtacttctgtgcccggtccatcacaacagtcgtgggctgcgctatggactattggggccagggaacaagcgtgaccgtgtctagtacgcgtgagcagaaactgatctcggaagaggatctggcgaagcccaccacgacgccagcgccgcgaccaccaacaccggcgcccaccatcgcgtcgcagcccctgtccctgcgcccagaggcgtgccggccagcggcggggggcgcagtgcacacgagggggctggacttcgcctgtgacatctacatctgggcgcccttggccgggacttgtggggtccttctcctgtcactggttatcaccctttactgcgggcgcgccagagtgaagttcagcaggagcgcagacgcccccgcgtaccagcagggccagaaccagctctataacgagctgaatctaggacgaagagaggagtacgatgttttggacaagagacgtggccgggaccctgagatggggggaaagccgagaaggaagaaccctcaggaaggcctgtacaatgaactgcagaaagataagatggcggaggcctacagtgagattgggatgaaaggcgagcgccggaggggcaaggggcacgatggcctttaccagggtctcagtacagccaccaaggacacctacgacgcccttcacatgcaggccctgccccctcgctctagaggatctggagcaacaaacttctcactactcaaacaagcaggtgacgtggaggagaatcccgggcctgggatccacatggccacttacgaggttctctgtgaggtggcgcggaaactgggcacggatgacagggaagtggtattgttcctcctaaacgtgttcatacctcaacccacactggcccaattaattggagctcttagagctttaaaggaggagggcaggttaacgtttcccctgttagcggaatgtctgtttcgtgcaggtcgcagagacctcttgcgcgacctgcttcacttagacccgcgttttttagagcgccacctagcgggcacaatgagttatttcagcccttatcagctcactgttctccacgtagacggggagctgtgtgcgagggatattaggtctttgatatttttaagcaaggacactatagggtctcgcagcacaccacagacattcttacactgggtgtactgtatggaaaacttagacctactgggtcccactgacgtggatgccctaatgtcaatgcttagatctttgtcaagagtagacctacagcgccaagtgcaaaccctaatgggccttcacctttccggcccatcacactcccaacactatcgccatacaccactcgagaccgatttctacgactacaaggacgacgatgacaagactagtggctccggcgagggcagaggaagtctactaacctgcggagatgtggaagaaaatcctggcccacatatgaccgagtacaagcccacggtgcgcctcgccacccgcgacgacgtccccagggccgtacgcaccctcgccgccgcgttcgccgactaccccgccacgcgccacaccgtcgatccggaccgccacatcgagcgggtcaccgagctgcaagaactcttcctcacgcgcgtcgggctcgacatcggcaaggtgtgggtcgcggacgacggcgccgcggtggcggtctggaccacgccggagagcgtcgaagcgggggcggtgttcgccgagatcggcccgcgcatggccgagttgagcggttcccggctggccgcgcagcaacagatggaaggcctcctggcgccgcaccggcccaaggagcccgcgtggttcctggccaccgtcggcgtctcgcccgaccaccagggcaagggtctgggcagcgccgtcgtgctccccggagtggaggcggccgagcgcgccggggtgcccgccttcctggagacctccgcgccccgcaacctccccttctacgagcggctcggcttcaccgtcaccgccgacgtcgaggtgcccgaaggaccgcgcacctggtgcatgacccgcaagcccggtgcctga

SEQ ID NO: 941 - DNA, 2775 bp, Artificial Sequence
  Synthetic Polynucleotides
atggccttaccagtgaccgccttgctcctgccgctggccttgctgctccacgccgccaggccggacgacatccagctgacccagagccccagcagcctgagcgccagcgtgggcgacagagtgaccatcacctgcaaggccagccagagcgtggactacgacggcgacagctacctgaactggtaccagcagatccccggcaaggcccccaagctgctgatctacgacgccagcaacctggtgagcggcatcccccccagattcagcggcagcggcagcggcaccgactacaccttcaccatcagcagcctgcagcccgaggacatcgccacctaccactgccagcagagcaccgaggacccctggaccttcggcggcggcaccaagctgcagatcaagagaggcggaggcggaagtggaggcggaggatctggcggcggaggctctcaggtgcagctgcagcagagcggcgccgaggtgaagaagcccggcagcagcgtgaaggtgagctgcaaggccagcggctacgccttcagcagctactggatgaactgggtgagacagagacccggccagggcctggagtggatcggccagatttggcccggcgacggcgacaccaactacaacggcaagttcaagggcagagccaccatcaccgccgacgagagcaccaacaccgcctacatggagctgagcagcctgagaagcgaggacaccgccttctacagctgcgccagaagagagaccaccaccgtgggcagatactactacgctatggactactggggccagggcaccaccgtgaccgtgagcagcacgcgtgagcagaaactgatctcggaagaggatctggcgaagcccaccacgacgccagcgccgcgaccaccaacaccggcgcccaccatcgcgtcgcagcccctgtccctgcgcccagaggcgtgccggccagcggcggggggcgcagtgcacacgagggggctggacttcgcctgtgacatctacatctgggcgcccttggccgggacttgtggggtccttctcctgtcactggttatcaccctttactgcgggcgcgccagagtgaagttcagcaggagcgcagacgcccccgcgtaccagcagggccagaaccagctctataacgagctgaatctaggacgaagagaggagtacgatgttttggacaagagacgtggccgggaccctgagatggggggaaagccgagaaggaagaaccctcaggaaggcctgtacaatgaactgcagaaagataagatggcggaggcctacagtgagattgggatgaaaggcgagcgccggaggggcaaggggcacgatggcctttaccagggtctcagtacagccaccaaggacacctacgacgcccttcacatgcaggccctgccccctcgctctagaggatctggagcaacaaacttctcactactcaaacaagcaggtgacgtggaggagaatcccgggcctgggatccacatggccacttacgaggttctctgtgaggtggcgcggaaactgggcacggatgacagggaagtggtattgttcctcctaaacgtgttcatacctcaacccacactggcccaattaattggagctcttagagctttaaaggaggagggcaggttaacgtttcccctgttagcggaatgtctgtttcgtgcaggtcgcagagacctcttgcgcgacctgcttcacttagacccgcgttttttagagcgccacctagcgggcacaatgagttatttcagcccttatcagctcactgttctccacgtagacggggagctgtgtgcgagggatattaggtctttgatatttttaagcaaggacactatagggtctcgcagcacaccacagacattcttacactgggtgtactgtatggaaaacttagacctactgggtcccactgacgtggatgccctaatgtcaatgcttagatctttgtcaagagtagacctacagcgccaagtgcaaaccctaatgggccttcacctttccggcccatcacactcccaacactatcgccatacaccactcgagaccgatttctacgactacaaggacgacgatgacaagactagtggctccggcgagggcagaggaagtctactaacctgcggagatgtggaagaaaatcctggcccacatatgaccgagtacaagcccacggtgcgcctcgccacccgcgacgacgtccccagggccgtacgcaccctcgccgccgcgttcgccgactaccccgccacgcgccacaccgtcgatccggaccgccacatcgagcgggtcaccgagctgcaagaactcttcctcacgcgcgtcgggctcgacatcggcaaggtgtgggtcgcggacgacggcgccgcggtggcggtctggaccacgccggagagcgtcgaagcgggggcggtgttcgccgagatcggcccgcgcatggccgagttgagcggttcccggctggccgcgcagcaacagatggaaggcctcctggcgccgcaccggcccaaggagcccgcgtggttcctggccaccgtcggcgtctcgcccgaccaccagggcaagggtctgggcagcgccgtcgtgctccccggagtggaggcggccgagcgcgccggggtgcccgccttcctggagacctccgcgccccgcaacctccccttctacgagcggctcggcttcaccgtcaccgccgacgtcgaggtgcccgaaggaccgcgcacctggtgcatgacccgcaagcccggtgcctga

SEQ ID NO: 942 - DNA, 2748 bp, Artificial Sequence
  Synthetic Polynucleotides
atggccttaccagtgaccgccttgctcctgccgctggccttgctgctccacgccgccaggccgcagtctgtgctgacacagcctgcctctgtgtctggctctcctggccagagcatcaccatcagctgtaccggcaccagctctgatgtcggcggctacaattacgtgtcctggtatcagcagcaccccggcaaggcccctaagctgatgatctacgacgtgaacaacagacccagcgaggtgtccaacagattcagcggcagcaagagcggcaataccgccagcctgacaatctctggactgcaagccgaggacgaggccgactactactgtagcagctacaccacaggcagcagagccgtttttggcggaggcaccaaactgacagtgcttggaggcggaggcggaagtggaggcggaggatctggcggcggaggctctgaagttcagctggttcagtctggcgccgaagtgaagaagcctggcgagtctctgaccatctcctgcaaggccagcggctacagcttccccaactactggatcacctgggtccgacagatgtccggtggtggccttgagtggatgggcagaatcgatcccggcgactcctacaccacctacaatcctagcttccagggccacgtgaccatcagcatcgacaagagcaccaacaccgcctacctgcactggaacagcctgaaagccagcgacaccgccatgtactactgcgcccggtactatgtgtccctggtggacatttggggccagggcacactggtcacagtgtctagtacgcgtgagcagaaactgatctcggaagaggatctggcgaagcccaccacgacgccagcgccgcgaccaccaacaccggcgcccaccatcgcgtcgcagcccctgtccctgcgcccagaggcgtgccggccagcggcggggggcgcagtgcacacgagggggctggacttcgcctgtgacatctacatctgggcgcccttggccgggacttgtggggtccttctcctgtcactggttatcaccctttactgcgggcgcgccagagtgaagttcagcaggagcgcagacgcccccgcgtaccagcagggccagaaccagctctataacgagctgaatctaggacgaagagaggagtacgatgttttggacaagagacgtggccgggaccctgagatggggggaaagccgagaaggaagaaccctcaggaaggcctgtacaatgaactgcagaaagataagatggcggaggcctacagtgagattgggatgaaaggcgagcgccggaggggcaaggggcacgatggcctttaccagggtctcagtacagccaccaaggacacctacgacgcccttcacatgcaggccctgccccctcgctctagaggatctggagcaacaaacttctcactactcaaacaagcaggtgacgtggaggagaatcccgggcctgggatccacatggccacttacgaggttctctgtgaggtggcgcggaaactgggcacggatgacagggaagtggtattgttcctcctaaacgtgttcatacctcaacccacactggcccaattaattggagctcttagagctttaaaggaggagggcaggttaacgtttcccctgttagcggaatgtctgtttcgtgcaggtcgcagagacctcttgcgcgacctgcttcacttagacccgcgttttttagagcgccacctagcgggcacaatgagttatttcagcccttatcagctcactgttctccacgtagacggggagctgtgtgcgagggatattaggtctttgatatttttaagcaaggacactatagggtctcgcagcacaccacagacattcttacactgggtgtactgtatggaaaacttagacctactgggtcccactgacgtggatgccctaatgtcaatgcttagatctttgtcaagagtagacctacagcgccaagtgcaaaccctaatgggccttcacctttccggcccatcacactcccaacactatcgccatacaccactcgagaccgatttctacgactacaaggacgacgatgacaagactagtggctccggcgagggcagaggaagtctactaacctgcggagatgtggaagaaaatcctggcccacatatgaccgagtacaagcccacggtgcgcctcgccacccgcgacgacgtccccagggccgtacgcaccctcgccgccgcgttcgccgactaccccgccacgcgccacaccgtcgatccggaccgccacatcgagcgggtcaccgagctgcaagaactcttcctcacgcgcgtcgggctcgacatcggcaaggtgtgggtcgcggacgacggcgccgcggtggcggtctggaccacgccggagagcgtcgaagcgggggcggtgttcgccgagatcggcccgcgcatggccgagttgagcggttcccggctggccgcgcagcaacagatggaaggcctcctggcgccgcaccggcccaaggagcccgcgtggttcctggccaccgtcggcgtctcgcccgaccaccagggcaagggtctgggcagcgccgtcgtgctccccggagtggaggcggccgagcgcgccggggtgcccgccttcctggagacctccgcgccccgcaacctccccttctacgagcggctcggcttcaccgtcaccgccgacgtcgaggtgcccgaaggaccgcgcacctggtgcatgacccgcaagcccggtgcctga

SEQ ID NO: 943 - DNA, 2766 bp, Artificial Sequence
  Synthetic Polynucleotides
atggccttaccagtgaccgccttgctcctgccgctggccttgctgctccacgccgccaggccgcagtctgtggtcacacagcctccatccgtgtctgctgcccctggacagaaagtgaccatctcctgtagcggcagcagcagcaacatcggcaacaactacgtgtcctggtatcagcagctccccggcacagctcccaaactgctgatctacgacaacaacaagcggcccagcggcatccccgatagattttctggcagcaagagcggcaccagcgccacactgggaattaccggacttcagacaggcgacgaggccgactactactgtggcacatgggatggcagcctgtacaccatgcttttcggcggaggcaccaagctgacagtgcttggcggaggcggaagtggaggcggaggatctggcggcggaggctctgaagtgcaactggtggaatctggcggcggactggttaagcctggcggatctctgagactgtcttgtgccgccagcggcttcaccttcagcaatgcctggatgagctgggttcgacaggcccctggaaaaggactggaatgggtcggattcatccggtccaaagcctacggcggcaccacagaatatgccgcctctgtgaagggcagattcaccatcagccgggacgacagcaagtctatcgcctacctccagatgaacaacctgaaaaccgaggacaccgccgtgtactactgcgccagagatggcctgtacagcagctcttggtacgacagcgattactggggccagggcacactggtcacagtgtcatctacgcgtgagcagaaactgatctcggaagaggatctggcgaagcccaccacgacgccagcgccgcgaccaccaacaccggcgcccaccatcgcgtcgcagcccctgtccctgcgcccagaggcgtgccggccagcggcggggggcgcagtgcacacgagggggctggacttcgcctgtgacatctacatctgggcgcccttggccgggacttgtggggtccttctcctgtcactggttatcaccctttactgcgggcgcgccagagtgaagttcagcaggagcgcagacgcccccgcgtaccagcagggccagaaccagctctataacgagctgaatctaggacgaagagaggagtacgatgttttggacaagagacgtggccgggaccctgagatggggggaaagccgagaaggaagaaccctcaggaaggcctgtacaatgaactgcagaaagataagatggcggaggcctacagtgagattgggatgaaaggcgagcgccggaggggcaaggggcacgatggcctttaccagggtctcagtacagccaccaaggacacctacgacgcccttcacatgcaggccctgccccctcgctctagaggatctggagcaacaaacttctcactactcaaacaagcaggtgacgtggaggagaatcccgggcctgggatccacatggccacttacgaggttctctgtgaggtggcgcggaaactgggcacggatgacagggaagtggtattgttcctcctaaacgtgttcatacctcaacccacactggcccaattaattggagctcttagagctttaaaggaggagggcaggttaacgtttcccctgttagcggaatgtctgtttcgtgcaggtcgcagagacctcttgcgcgacctgcttcacttagacccgcgttttttagagcgccacctagcgggcacaatgagttatttcagcccttatcagctcactgttctccacgtagacggggagctgtgtgcgagggatattaggtctttgatatttttaagcaaggacactatagggtctcgcagcacaccacagacattcttacactgggtgtactgtatggaaaacttagacctactgggtcccactgacgtggatgccctaatgtcaatgcttagatctttgtcaagagtagacctacagcgccaagtgcaaaccctaatgggccttcacctttccggcccatcacactcccaacactatcgccatacaccactcgagaccgatttctacgactacaaggacgacgatgacaagactagtggctccggcgagggcagaggaagtctactaacctgcggagatgtggaagaaaatcctggcccacatatgaccgagtacaagcccacggtgcgcctcgccacccgcgacgacgtccccagggccgtacgcaccctcgccgccgcgttcgccgactaccccgccacgcgccacaccgtcgatccggaccgccacatcgagcgggtcaccgagctgcaagaactcttcctcacgcgcgtcgggctcgacatcggcaaggtgtgggtcgcggacgacggcgccgcggtggcggtctggaccacgccggagagcgtcgaagcgggggcggtgttcgccgagatcggcccgcgcatggccgagttgagcggttcccggctggccgcgcagcaacagatggaaggcctcctggcgccgcaccggcccaaggagcccgcgtggttcctggccaccgtcggcgtctcgcccgaccaccagggcaagggtctgggcagcgccgtcgtgctccccggagtggaggcggccgagcgcgccggggtgcccgccttcctggagacctccgcgccccgcaacctccccttctacgagcggctcggcttcaccgtcaccgccgacgtcgaggtgcccgaaggaccgcgcacctggtgcatgacccgcaagcccggtgcctga

SEQ ID NO: 944 - DNA, 2781 bp, Artificial Sequence
  Synthetic Polynucleotides
atggccttaccagtgaccgccttgctcctgccgctggccttgctgctccacgccgccaggccgcagtctgtgctgacacagcctcctagtgtgtctggcgctcctggacagagagtgaccatctcttgtaccggcagcagcagcaatatcggagccggctatgacgtgcactggtatcagcagctccctggcacagcccctaaactgctgatcttcggcaacagcaacagacccagcggcgtgcccgatagattcagcggctttaagagcggcacaagcgccagcctggctatcactggactgcaagccgaggacgaggccgactacttctgccagagctacgatagcagcctgagcggcagcggagtgtttggcacaggcaccaaagtgacagtgcttggcggcggaggcggaagtggaggcggaggatctggcggcggaggctctcaaatgcaactggttcaaagcggcggtggcctggtgcaacctggaagaagtctgagactgagctgtgccgccagcggcttcaccttcgatgattacgccatgcactgggtccgacaggcccctggaaaaggactggaatgggtgtccggcatctcctggaatagcggctctatcggctacgccgacagcgtgaagggcagattcaccatcagccgggacaacgccaagaacagcctgtacctccagatgaactccctgagagccgaggatacagccctgtactactgcgccaaggacatccacagcggcagctactacggcctgctgtactacgctatggacgtgtggggccagggcacaaccgtgacagtttcttctacgcgtgagcagaaactgatctcggaagaggatctggcgaagcccaccacgacgccagcgccgcgaccaccaacaccggcgcccaccatcgcgtcgcagcccctgtccctgcgcccagaggcgtgccggccagcggcggggggcgcagtgcacacgagggggctggacttcgcctgtgacatctacatctgggcgcccttggccgggacttgtggggtccttctcctgtcactggttatcaccctttactgcgggcgcgccagagtgaagttcagcaggagcgcagacgcccccgcgtaccagcagggccagaaccagctctataacgagctgaatctaggacgaagagaggagtacgatgttttggacaagagacgtggccgggaccctgagatggggggaaagccgagaaggaagaaccctcaggaaggcctgtacaatgaactgcagaaagataagatggcggaggcctacagtgagattgggatgaaaggcgagcgccggaggggcaaggggcacgatggcctttaccagggtctcagtacagccaccaaggacacctacgacgcccttcacatgcaggccctgccccctcgctctagaggatctggagcaacaaacttctcactactcaaacaagcaggtgacgtggaggagaatcccgggcctgggatccacatggccacttacgaggttctctgtgaggtggcgcggaaactgggcacggatgacagggaagtggtattgttcctcctaaacgtgttcatacctcaacccacactggcccaattaattggagctcttagagctttaaaggaggagggcaggttaacgtttcccctgttagcggaatgtctgtttcgtgcaggtcgcagagacctcttgcgcgacctgcttcacttagacccgcgttttttagagcgccacctagcgggcacaatgagttatttcagcccttatcagctcactgttctccacgtagacggggagctgtgtgcgagggatattaggtctttgatatttttaagcaaggacactatagggtctcgcagcacaccacagacattcttacactgggtgtactgtatggaaaacttagacctactgggtcccactgacgtggatgccctaatgtcaatgcttagatctttgtcaagagtagacctacagcgccaagtgcaaaccctaatgggccttcacctttccggcccatcacactcccaacactatcgccatacaccactcgagaccgatttctacgactacaaggacgacgatgacaagactagtggctccggcgagggcagaggaagtctactaacctgcggagatgtggaagaaaatcctggcccacatatgaccgagtacaagcccacggtgcgcctcgccacccgcgacgacgtccccagggccgtacgcaccctcgccgccgcgttcgccgactaccccgccacgcgccacaccgtcgatccggaccgccacatcgagcgggtcaccgagctgcaagaactcttcctcacgcgcgtcgggctcgacatcggcaaggtgtgggtcgcggacgacggcgccgcggtggcggtctggaccacgccggagagcgtcgaagcgggggcggtgttcgccgagatcggcccgcgcatggccgagttgagcggttcccggctggccgcgcagcaacagatggaaggcctcctggcgccgcaccggcccaaggagcccgcgtggttcctggccaccgtcggcgtctcgcccgaccaccagggcaagggtctgggcagcgccgtcgtgctccccggagtggaggcggccgagcgcgccggggtgcccgccttcctggagacctccgcgccccgcaacctccccttctacgagcggctcggcttcaccgtcaccgccgacgtcgaggtgcccgaaggaccgcgcacctggtgcatgacccgcaagcccggtgcctga

SEQ ID NO: 945 - DNA, 2742 bp, Artificial Sequence
  Synthetic Polynucleotides
atggccttaccagtgaccgccttgctcctgccgctggccttgctgctccacgccgccaggccggactacatccacgtgacacagagccctagcagcctgtccgtgtccatcggcgatagagtgaccatcaactgccagacctctcaaggcgtgggcagcgacctgcactggtatcagcacaaacctggcagagcccctaagctgctgatccaccatgccagctctgtggaagatggcgtgcccagcagattttccggcaccggatttcacaccagcttcaacctgacaatcaacgacctccaggccgacgacatcggcacctactactgtcaagtgctccagagcttcggcagaggcagcagactggatacaaaaggcggaggcggaagtggaggcggaggatctggcggcggaggctctagggcacacctggtgcagtctggcaccgccatgaagaaacctggcgcttccgtcagagtgtcctgtcagacaagcggctacaccttcacagcccacatcctgttctggttcagacaggccccaggcagaggactggaatgggtcggatggatcaagccccagtacggggccgtgaatttcggcggaggcttcagagacagagtgaccctgaccagggacgtgtaccgggaaatcgcctacatggacatccggggcctgaagcctgatgacaccgccgtgtactactgcgccagggatagaagctacggcgacagctcttgggctctcgatgcttggggacagggcacaacagtggtggtgtctgctacgcgtgagcagaaactgatctcggaagaggatctggcgaagcccaccacgacgccagcgccgcgaccaccaacaccggcgcccaccatcgcgtcgcagcccctgtccctgcgcccagaggcgtgccggccagcggcggggggcgcagtgcacacgagggggctggacttcgcctgtgacatctacatctgggcgcccttggccgggacttgtggggtccttctcctgtcactggttatcaccctttactgcgggcgcgccagagtgaagttcagcaggagcgcagacgcccccgcgtaccagcagggccagaaccagctctataacgagctgaatctaggacgaagagaggagtacgatgttttggacaagagacgtggccgggaccctgagatggggggaaagccgagaaggaagaaccctcaggaaggcctgtacaatgaactgcagaaagataagatggcggaggcctacagtgagattgggatgaaaggcgagcgccggaggggcaaggggcacgatggcctttaccagggtctcagtacagccaccaaggacacctacgacgcccttcacatgcaggccctgccccctcgctctagaggatctggagcaacaaacttctcactactcaaacaagcaggtgacgtggaggagaatcccgggcctgggatccacatggccacttacgaggttctctgtgaggtggcgcggaaactgggcacggatgacagggaagtggtattgttcctcctaaacgtgttcatacctcaacccacactggcccaattaattggagctcttagagctttaaaggaggagggcaggttaacgtttcccctgttagcggaatgtctgtttcgtgcaggtcgcagagacctcttgcgcgacctgcttcacttagacccgcgttttttagagcgccacctagcgggcacaatgagttatttcagcccttatcagctcactgttctccacgtagacggggagctgtgtgcgagggatattaggtctttgatatttttaagcaaggacactatagggtctcgcagcacaccacagacattcttacactgggtgtactgtatggaaaacttagacctactgggtcccactgacgtggatgccctaatgtcaatgcttagatctttgtcaagagtagacctacagcgccaagtgcaaaccctaatgggccttcacctttccggcccatcacactcccaacactatcgccatacaccactcgagaccgatttctacgactacaaggacgacgatgacaagactagtggctccggcgagggcagaggaagtctactaacctgcggagatgtggaagaaaatcctggcccacatatgaccgagtacaagcccacggtgcgcctcgccacccgcgacgacgtccccagggccgtacgcaccctcgccgccgcgttcgccgactaccccgccacgcgccacaccgtcgatccggaccgccacatcgagcgggtcaccgagctgcaagaactcttcctcacgcgcgtcgggctcgacatcggcaaggtgtgggtcgcggacgacggcgccgcggtggcggtctggaccacgccggagagcgtcgaagcgggggcggtgttcgccgagatcggcccgcgcatggccgagttgagcggttcccggctggccgcgcagcaacagatggaaggcctcctggcgccgcaccggcccaaggagcccgcgtggttcctggccaccgtcggcgtctcgcccgaccaccagggcaagggtctgggcagcgccgtcgtgctccccggagtggaggcggccgagcgcgccggggtgcccgccttcctggagacctccgcgccccgcaacctccccttctacgagcggctcggcttcaccgtcaccgccgacgtcgaggtgcccgaaggaccgcgcacctggtgcatgacccgcaagcccggtgcctga

SEQ ID NO: 946 - DNA, 2772 bp, Artificial Sequence
  Synthetic Polynucleotides
atggccttaccagtgaccgccttgctcctgccgctggccttgctgctccacgccgccaggccggacgtgcagatgatccagacccccgatagcctggccgtgtccctgggacagagagccaccatctcttgcagagccagcgagagcgtggacaactacggcatcagcttcatgcactggtatcagcagaagcccggccagagccccaagctgctgatctacagagcctccaacctggaaagcggcatccccgccagattttccggcagcggcagcagaaccgacttcaccctgaccatcaaccccgtggaaaccgacgacgtggcaacctactactgccagcagaacaacaaggacccccccacctttggcggaggcaccaagctggaaatcaagggcggaggcggaagtggaggcggaggatctggcggcggaggctctgggggaggcggctctcaggtgcaactccagcagtctggcgctgagcttgtgaagcctggggccagcgtgaagattagctgcaaggccagcggctacgccttcagcagctactggatgaactgggtcaagcagcggcctggcaagggcctggaatggatcggccaaatctaccccggcgacggcgacaccacctacaacggcaagttcaagggcaaggccaccctgacagccgacaagagcagcagcaccgtgtacatgcaactgaacagcctgaccagcgaggacagcgccgtgtacttctgcgtgcggtactactacggcagctccggctacttcgactattggggccagggcaccacactgaccgtgtcctctacgcgtgagcagaaactgatctcggaagaggatctggcgaagcccaccacgacgccagcgccgcgaccaccaacaccggcgcccaccatcgcgtcgcagcccctgtccctgcgcccagaggcgtgccggccagcggcggggggcgcagtgcacacgagggggctggacttcgcctgtgacatctacatctgggcgcccttggccgggacttgtggggtccttctcctgtcactggttatcaccctttactgcgggcgcgccagagtgaagttcagcaggagcgcagacgcccccgcgtaccagcagggccagaaccagctctataacgagctgaatctaggacgaagagaggagtacgatgttttggacaagagacgtggccgggaccctgagatggggggaaagccgagaaggaagaaccctcaggaaggcctgtacaatgaactgcagaaagataagatggcggaggcctacagtgagattgggatgaaaggcgagcgccggaggggcaaggggcacgatggcctttaccagggtctcagtacagccaccaaggacacctacgacgcccttcacatgcaggccctgccccctcgctctagaggatctggagcaacaaacttctcactactcaaacaagcaggtgacgtggaggagaatcccgggcctgggatccacatggccacttacgaggttctctgtgaggtggcgcggaaactgggcacggatgacagggaagtggtattgttcctcctaaacgtgttcatacctcaacccacactggcccaattaattggagctcttagagctttaaaggaggagggcaggttaacgtttcccctgttagcggaatgtctgtttcgtgcaggtcgcagagacctcttgcgcgacctgcttcacttagacccgcgttttttagagcgccacctagcgggcacaatgagttatttcagcccttatcagctcactgttctccacgtagacggggagctgtgtgcgagggatattaggtctttgatatttttaagcaaggacactatagggtctcgcagcacaccacagacattcttacactgggtgtactgtatggaaaacttagacctactgggtcccactgacgtggatgccctaatgtcaatgcttagatctttgtcaagagtagacctacagcgccaagtgcaaaccctaatgggccttcacctttccggcccatcacactcccaacactatcgccatacaccactcgagaccgatttctacgactacaaggacgacgatgacaagactagtggctccggcgagggcagaggaagtctactaacctgcggagatgtggaagaaaatcctggcccacatatgaccgagtacaagcccacggtgcgcctcgccacccgcgacgacgtccccagggccgtacgcaccctcgccgccgcgttcgccgactaccccgccacgcgccacaccgtcgatccggaccgccacatcgagcgggtcaccgagctgcaagaactcttcctcacgcgcgtcgggctcgacatcggcaaggtgtgggtcgcggacgacggcgccgcggtggcggtctggaccacgccggagagcgtcgaagcgggggcggtgttcgccgagatcggcccgcgcatggccgagttgagcggttcccggctggccgcgcagcaacagatggaaggcctcctggcgccgcaccggcccaaggagcccgcgtggttcctggccaccgtcggcgtctcgcccgaccaccagggcaagggtctgggcagcgccgtcgtgctccccggagtggaggcggccgagcgcgccggggtgcccgccttcctggagacctccgcgccccgcaacctccccttctacgagcggctcggcttcaccgtcaccgccgacgtcgaggtgcccgaaggaccgcgcacctggtgcatgacccgcaagcccggtgcctga

SEQ ID NO: 947 - DNA, 2745 bp, Artificial Sequence
  Synthetic Polynucleotides
atggccttaccagtgaccgccttgctcctgccgctggccttgctgctccacgccgccaggccggacgtgcagatgatccagacccccagcagcctgtctgccagcctgggcgatagagtgaccatcagctgtcgggccagccaggacatcggcaactacctgaactggtatcagcagaaacccgacggcaccgtgaagctgctgatctactacaccagcagactgcacagcggcgtgcccagcagattttctggcagcggctctggcaccgagtacagcctgaccatctccaacctggaacaggaagatattgctacctacttctgtcagcaaggcagcgccctgccccctacatttggcggcggaacaaagctggaaatcaacggcggaggcggaagtggaggcggaggatctggcggcggaggctctgctctccagctccagcagtctggcgcagaactcgtgcggcctggcgcttctgtgaccctgagctgtaaagccagcggctacaccttcaccgactacgagatgcactgggtcaagcagacccctgtgcacggcctggaatggatcggagccatcgaccctgagacaggcggcaccgcctacaaccagaagttcgagggcaaggccatcctgaccgccgacaagagcagcagcacagcctacatggaactgcggagcctgacctccgaggacagccccgtgtactactgtgccagacggcggtactacggcagcagctccttcgactattggggccagggcaccaccctgaccgtgtctagtacgcgtgagcagaaactgatctcggaagaggatctggcgaagcccaccacgacgccagcgccgcgaccaccaacaccggcgcccaccatcgcgtcgcagcccctgtccctgcgcccagaggcgtgccggccagcggcggggggcgcagtgcacacgagggggctggacttcgcctgtgacatctacatctgggcgcccttggccgggacttgtggggtccttctcctgtcactggttatcaccctttactgcgggcgcgccagagtgaagttcagcaggagcgcagacgcccccgcgtaccagcagggccagaaccagctctataacgagctgaatctaggacgaagagaggagtacgatgttttggacaagagacgtggccgggaccctgagatggggggaaagccgagaaggaagaaccctcaggaaggcctgtacaatgaactgcagaaagataagatggcggaggcctacagtgagattgggatgaaaggcgagcgccggaggggcaaggggcacgatggcctttaccagggtctcagtacagccaccaaggacacctacgacgcccttcacatgcaggccctgccccctcgctctagaggatctggagcaacaaacttctcactactcaaacaagcaggtgacgtggaggagaatcccgggcctgggatccacatggccacttacgaggttctctgtgaggtggcgcggaaactgggcacggatgacagggaagtggtattgttcctcctaaacgtgttcatacctcaacccacactggcccaattaattggagctcttagagctttaaaggaggagggcaggttaacgtttcccctgttagcggaatgtctgtttcgtgcaggtcgcagagacctcttgcgcgacctgcttcacttagacccgcgttttttagagcgccacctagcgggcacaatgagttatttcagcccttatcagctcactgttctccacgtagacggggagctgtgtgcgagggatattaggtctttgatatttttaagcaaggacactatagggtctcgcagcacaccacagacattcttacactgggtgtactgtatggaaaacttagacctactgggtcccactgacgtggatgccctaatgtcaatgcttagatctttgtcaagagtagacctacagcgccaagtgcaaaccctaatgggccttcacctttccggcccatcacactcccaacactatcgccatacaccactcgagaccgatttctacgactacaaggacgacgatgacaagactagtggctccggcgagggcagaggaagtctactaacctgcggagatgtggaagaaaatcctggcccacatatgaccgagtacaagcccacggtgcgcctcgccacccgcgacgacgtccccagggccgtacgcaccctcgccgccgcgttcgccgactaccccgccacgcgccacaccgtcgatccggaccgccacatcgagcgggtcaccgagctgcaagaactcttcctcacgcgcgtcgggctcgacatcggcaaggtgtgggtcgcggacgacggcgccgcggtggcggtctggaccacgccggagagcgtcgaagcgggggcggtgttcgccgagatcggcccgcgcatggccgagttgagcggttcccggctggccgcgcagcaacagatggaaggcctcctggcgccgcaccggcccaaggagcccgcgtggttcctggccaccgtcggcgtctcgcccgaccaccagggcaagggtctgggcagcgccgtcgtgctccccggagtggaggcggccgagcgcgccggggtgcccgccttcctggagacctccgcgccccgcaacctccccttctacgagcggctcggcttcaccgtcaccgccgacgtcgaggtgcccgaaggaccgcgcacctggtgcatgacccgcaagcccggtgcctga

SEQ ID NO: 948 - DNA, 2766 bp, Artificial Sequence
  Synthetic Polynucleotides
atgaggctccctgctcagctcctggggctgctaatgctctgggtctctggaagcagtggggatgttgtgatgactcagtctccactctccctgcccgtcacccctggagcgccggcctccatctcctgcagatccagtcagagcattgtacatagtaatggaaacacctatttagagtggtatcttcaaaagccagggcagtctccaaagctcctgatctataaagtttccaaccgattttctggagtccctgacaggttcagtggaagtggatcaggcacagattttacactgagaatcagcagagtggaggctgaggatgttggaatttattactgctttcaaggttcacatgttcctccgacgttcggccctgggaccaaattggaaatcaaaggcggaggcggaagtggaggcggaggatctggcggcggaggctctgaagtgcagctggtggagtctgggggaggcttggtccagcctggggggtccctgagactctcctgttcagcctctggattcacctttagtagctttggaatgcactgggtccgccaggctccagggaaggggctggaatgggtggcctacattagtagtggcagtagtaccatctactatggagacaccgtgaagggccgattcaccatctccagagacaacgccaagaactcactgtttctgcaaatgagcagcctgagagccgaggacacggccgtgtattattgtgcgagagaggggggatattactacggaaggagttactatactatggactactggggccaagggaccacggtcaccgtctccacgcgtgagcagaaactgatctcggaagaggatctggcgaagcccaccacgacgccagcgccgcgaccaccaacaccggcgcccaccatcgcgtcgcagcccctgtccctgcgcccagaggcgtgccggccagcggcggggggcgcagtgcacacgagggggctggacttcgcctgtgacatctacatctgggcgcccttggccgggacttgtggggtccttctcctgtcactggttatcaccctttactgcgggcgcgccagagtgaagttcagcaggagcgcagacgcccccgcgtaccagcagggccagaaccagctctataacgagctgaatctaggacgaagagaggagtacgatgttttggacaagagacgtggccgggaccctgagatggggggaaagccgagaaggaagaaccctcaggaaggcctgtacaatgaactgcagaaagataagatggcggaggcctacagtgagattgggatgaaaggcgagcgccggaggggcaaggggcacgatggcctttaccagggtctcagtacagccaccaaggacacctacgacgcccttcacatgcaggccctgccccctcgctctagaggatctggagcaacaaacttctcactactcaaacaagcaggtgacgtggaggagaatcccgggcctgggatccacatggccacttacgaggttctctgtgaggtggcgcggaaactgggcacggatgacagggaagtggtattgttcctcctaaacgtgttcatacctcaacccacactggcccaattaattggagctcttagagctttaaaggaggagggcaggttaacgtttcccctgttagcggaatgtctgtttcgtgcaggtcgcagagacctcttgcgcgacctgcttcacttagacccgcgttttttagagcgccacctagcgggcacaatgagttatttcagcccttatcagctcactgttctccacgtagacggggagctgtgtgcgagggatattaggtctttgatatttttaagcaaggacactatagggtctcgcagcacaccacagacattcttacactgggtgtactgtatggaaaacttagacctactgggtcccactgacgtggatgccctaatgtcaatgcttagatctttgtcaagagtagacctacagcgccaagtgcaaaccctaatgggccttcacctttccggcccatcacactcccaacactatcgccatacaccactcgagaccgatttctacgactacaaggacgacgatgacaagactagtggctccggcgagggcagaggaagtctactaacctgcggagatgtggaagaaaatcctggcccacatatgaccgagtacaagcccacggtgcgcctcgccacccgcgacgacgtccccagggccgtacgcaccctcgccgccgcgttcgccgactaccccgccacgcgccacaccgtcgatccggaccgccacatcgagcgggtcaccgagctgcaagaactcttcctcacgcgcgtcgggctcgacatcggcaaggtgtgggtcgcggacgacggcgccgcggtggcggtctggaccacgccggagagcgtcgaagcgggggcggtgttcgccgagatcggcccgcgcatggccgagttgagcggttcccggctggccgcgcagcaacagatggaaggcctcctggcgccgcaccggcccaaggagcccgcgtggttcctggccaccgtcggcgtctcgcccgaccaccagggcaagggtctgggcagcgccgtcgtgctccccggagtggaggcggccgagcgcgccggggtgcccgccttcctggagacctccgcgccccgcaacctccccttctacgagcggctcggcttcaccgtcaccgccgacgtcgaggtgcccgaaggaccgcgcacctggtgcatgacccgcaagcccggtgcctga

SEQ ID NO: 949 - DNA, 2841 bp, Artificial Sequence
  Synthetic Polynucleotides
atggccttaccagtgaccgccttgctcctgccgctggccttgctgctccacgccgccaggccggccagaaagagaacccagcccaccttcggcttcaccgtgaactggaagttcagcgagagcaccaccgtgttcaccggccagtgcttcatcgaccggaacggcaaagaggtgctgaaaaccatgtggctgctgcggagcagcgtgaacgacatcggcgacgactggaaggccaccagagtgggcatcaacatcttcacccggctgcggacacagaaagagggcggctctggcggaagcgccagaaagtgtagcctgaccggcaagtggaccaacgacctgggcagcaacatgaccatcggagccgtgaacagcagaggcgagtttaccggcacctacatcaccgccgtgaccgccaccagcaacgagatcaaagagagccccctgcacggcacccagaacaccatcaacaagagcggcggcagcacaacagtgtttacaggacagtgctttattgaccgcaatgggaaagaagtgctgaaaacaatgtggctgctgaggtcctccgtgaatgacattggagatgattggaaagctacaagagtggggattaacatttttaccagactgaggacccagaaagaagggggcagcggaggctccgccagaaaatgctctctgacagggaagtggacaaatgatctggggtccaatatgacaatcggcgctgtgaactctcggggcgagttcactggaacatatattacagccgtgacagctacctctaacgaaatcaaagagtctcctctgcacgggacacagaataccattaacaaacggacccagcctacatttgggtttacagtgaattggaaattctccgagacgcgtgagcagaaactgatctcggaagaggatctggcgaagcccaccacgacgccagcgccgcgaccaccaacaccggcgcccaccatcgcgtcgcagcccctgtccctgcgcccagaggcgtgccggccagcggcggggggcgcagtgcacacgagggggctggacttcgcctgtgacatctacatctgggcgcccttggccgggacttgtggggtccttctcctgtcactggttatcaccctttactgcgggcgcgccagagtgaagttcagcaggagcgcagacgcccccgcgtaccagcagggccagaaccagctctataacgagctgaatctaggacgaagagaggagtacgatgttttggacaagagacgtggccgggaccctgagatggggggaaagccgagaaggaagaaccctcaggaaggcctgtacaatgaactgcagaaagataagatggcggaggcctacagtgagattgggatgaaaggcgagcgccggaggggcaaggggcacgatggcctttaccagggtctcagtacagccaccaaggacacctacgacgcccttcacatgcaggccctgccccctcgctctagaggatctggagcaacaaacttctcactactcaaacaagcaggtgacgtggaggagaatcccgggcctgggatccacatggccacttacgaggttctctgtgaggtggcgcggaaactgggcacggatgacagggaagtggtattgttcctcctaaacgtgttcatacctcaacccacactggcccaattaattggagctcttagagctttaaaggaggagggcaggttaacgtttcccctgttagcggaatgtctgtttcgtgcaggtcgcagagacctcttgcgcgacctgcttcacttagacccgcgttttttagagcgccacctagcgggcacaatgagttatttcagcccttatcagctcactgttctccacgtagacggggagctgtgtgcgagggatattaggtctttgatatttttaagcaaggacactatagggtctcgcagcacaccacagacattcttacactgggtgtactgtatggaaaacttagacctactgggtcccactgacgtggatgccctaatgtcaatgcttagatctttgtcaagagtagacctacagcgccaagtgcaaaccctaatgggccttcacctttccggcccatcacactcccaacactatcgccatacaccactcgagaccgatttctacgactacaaggacgacgatgacaagactagtggctccggcgagggcagaggaagtctactaacctgcggagatgtggaagaaaatcctggcccacatatgaccgagtacaagcccacggtgcgcctcgccacccgcgacgacgtccccagggccgtacgcaccctcgccgccgcgttcgccgactaccccgccacgcgccacaccgtcgatccggaccgccacatcgagcgggtcaccgagctgcaagaactcttcctcacgcgcgtcgggctcgacatcggcaaggtgtgggtcgcggacgacggcgccgcggtggcggtctggaccacgccggagagcgtcgaagcgggggcggtgttcgccgagatcggcccgcgcatggccgagttgagcggttcccggctggccgcgcagcaacagatggaaggcctcctggcgccgcaccggcccaaggagcccgcgtggttcctggccaccgtcggcgtctcgcccgaccaccagggcaagggtctgggcagcgccgtcgtgctccccggagtggaggcggccgagcgcgccggggtgcccgccttcctggagacctccgcgccccgcaacctccccttctacgagcggctcggcttcaccgtcaccgccgacgtcgaggtgcccgaaggaccgcgcacctggtgcatgacccgcaagcccggtgcctga

SEQ ID NO: 950 - DNA, 2757 bp, Artificial Sequence
  Synthetic Polynucleotides
atggccttaccagtgaccgccttgctcctgccgctggccttgctgctccacgccgccaggccggacatcgtcctgacccagtccccagccagcctggcggtgtccctgggtcaacgagctaccatttcctgcagagcctctaagtccgtatccacttccggctatagttacctgcattggtaccaacagaaaccagggcagccacccaagctgctcatctatctggcctcaaacctggagtccggcgtgcccgccagattctccggaagtgggagcggcaccgactttacattgaacatccacccagtcgaagaggaagatgctgccacttattactgtcagcactccagggagctgccatttacatttggctctggcacaaaactggagatcaaaggcggaggcggaagtggaggcggaggatctggcggcggaggctctcaggttcagctggtcgagtccgggggaggtctggtacagccgggtggcagcctcaagctgtcatgtgccgcatctggttttgactttagcaggtattggatgagctgggtccgccaggccccgggcaagggacttgagtggattggagaaataaaccctacttccagcacaatcaacttcacaccttctttgaaagataaggtttttatctctcgggataacgctaaaaacacactgtacttgcagatgtctaaggtgcgaagcgaagacaccgccctctattattgcgcccggggtaattactaccgctatggggatgcgatggactattgggggcaaggtacctccgtcacggtctcaacgcgtgagcagaaactgatctcggaagaggatctggcgaagcccaccacgacgccagcgccgcgaccaccaacaccggcgcccaccatcgcgtcgcagcccctgtccctgcgcccagaggcgtgccggccagcggcggggggcgcagtgcacacgagggggctggacttcgcctgtgacatctacatctgggcgcccttggccgggacttgtggggtccttctcctgtcactggttatcaccctttactgcgggcgcgccagagtgaagttcagcaggagcgcagacgcccccgcgtaccagcagggccagaaccagctctataacgagctgaatctaggacgaagagaggagtacgatgttttggacaagagacgtggccgggaccctgagatggggggaaagccgagaaggaagaaccctcaggaaggcctgtacaatgaactgcagaaagataagatggcggaggcctacagtgagattgggatgaaaggcgagcgccggaggggcaaggggcacgatggcctttaccagggtctcagtacagccaccaaggacacctacgacgcccttcacatgcaggccctgccccctcgctctagaggatctggagcaacaaacttctcactactcaaacaagcaggtgacgtggaggagaatcccgggcctgggatccacatggccacttacgaggttctctgtgaggtggcgcggaaactgggcacggatgacagggaagtggtattgttcctcctaaacgtgttcatacctcaacccacactggcccaattaattggagctcttagagctttaaaggaggagggcaggttaacgtttcccctgttagcggaatgtctgtttcgtgcaggtcgcagagacctcttgcgcgacctgcttcacttagacccgcgttttttagagcgccacctagcgggcacaatgagttatttcagcccttatcagctcactgttctccacgtagacggggagctgtgtgcgagggatattaggtctttgatatttttaagcaaggacactatagggtctcgcagcacaccacagacattcttacactgggtgtactgtatggaaaacttagacctactgggtcccactgacgtggatgccctaatgtcaatgcttagatctttgtcaagagtagacctacagcgccaagtgcaaaccctaatgggccttcacctttccggcccatcacactcccaacactatcgccatacaccactcgagaccgatttctacgactacaaggacgacgatgacaagactagtggctccggcgagggcagaggaagtctactaacctgcggagatgtggaagaaaatcctggcccacatatgaccgagtacaagcccacggtgcgcctcgccacccgcgacgacgtccccagggccgtacgcaccctcgccgccgcgttcgccgactaccccgccacgcgccacaccgtcgatccggaccgccacatcgagcgggtcaccgagctgcaagaactcttcctcacgcgcgtcgggctcgacatcggcaaggtgtgggtcgcggacgacggcgccgcggtggcggtctggaccacgccggagagcgtcgaagcgggggcggtgttcgccgagatcggcccgcgcatggccgagttgagcggttcccggctggccgcgcagcaacagatggaaggcctcctggcgccgcaccggcccaaggagcccgcgtggttcctggccaccgtcggcgtctcgcccgaccaccagggcaagggtctgggcagcgccgtcgtgctccccggagtggaggcggccgagcgcgccggggtgcccgccttcctggagacctccgcgccccgcaacctccccttctacgagcggctcggcttcaccgtcaccgccgacgtcgaggtgcccgaaggaccgcgcacctggtgcatgacccgcaagcccggtgcctga

SEQ ID NO: 951 - DNA, 2751 bp, Artificial Sequence
  Synthetic Polynucleotides
atggccttaccagtgaccgccttgctcctgccgctggccttgctgctccacgccgccaggccggacatccagatgacccagagccctagctcactgagcgccagcgtgggcgacagggtgaccattacctgctccgccagccaggacatcagcaactacctgaactggtaccagcagaagcccggcaaggcccccaagctgctgatctactacacctccaacctgcactccggcgtgcccagcaggttcagcggaagcggcagcggcaccgatttcaccctgaccatctccagcctgcagcccgaggacttcgccacctactactgccagcagtacaggaagctcccctggactttcggccagggcaccaaactggagatcaagcgtggcggaggcggaagtggaggcggaggatctggcggcggaggctctcaggtgcagctggtccagagcggcgccgaagtgaagaagcccggcagctccgtgaaagtgagctgcaaggccagcggcggcaccttcagcaactactggatgcactgggtgaggcaggcccccggacagggcctggagtggatgggcgccacctacaggggccacagcgacacctactacaaccagaagttcaagggccgggtgaccatcaccgccgacaagagcaccagcaccgcctacatggaactgagcagcctcaggagcgaggacaccgctgtgtattactgcgccaggggcgccatctacgacggctacgacgtgctggacaactggggccagggcacactggtgaccgtgtccagcacgcgtgagcagaaactgatctcggaagaggatctggcgaagcccaccacgacgccagcgccgcgaccaccaacaccggcgcccaccatcgcgtcgcagcccctgtccctgcgcccagaggcgtgccggccagcggcggggggcgcagtgcacacgagggggctggacttcgcctgtgacatctacatctgggcgcccttggccgggacttgtggggtccttctcctgtcactggttatcaccctttactgcgggcgcgccagagtgaagttcagcaggagcgcagacgcccccgcgtaccagcagggccagaaccagctctataacgagctgaatctaggacgaagagaggagtacgatgttttggacaagagacgtggccgggaccctgagatggggggaaagccgagaaggaagaaccctcaggaaggcctgtacaatgaactgcagaaagataagatggcggaggcctacagtgagattgggatgaaaggcgagcgccggaggggcaaggggcacgatggcctttaccagggtctcagtacagccaccaaggacacctacgacgcccttcacatgcaggccctgccccctcgctctagaggatctggagcaacaaacttctcactactcaaacaagcaggtgacgtggaggagaatcccgggcctgggatccacatggccacttacgaggttctctgtgaggtggcgcggaaactgggcacggatgacagggaagtggtattgttcctcctaaacgtgttcatacctcaacccacactggcccaattaattggagctcttagagctttaaaggaggagggcaggttaacgtttcccctgttagcggaatgtctgtttcgtgcaggtcgcagagacctcttgcgcgacctgcttcacttagacccgcgttttttagagcgccacctagcgggcacaatgagttatttcagcccttatcagctcactgttctccacgtagacggggagctgtgtgcgagggatattaggtctttgatatttttaagcaaggacactatagggtctcgcagcacaccacagacattcttacactgggtgtactgtatggaaaacttagacctactgggtcccactgacgtggatgccctaatgtcaatgcttagatctttgtcaagagtagacctacagcgccaagtgcaaaccctaatgggccttcacctttccggcccatcacactcccaacactatcgccatacaccactcgagaccgatttctacgactacaaggacgacgatgacaagactagtggctccggcgagggcagaggaagtctactaacctgcggagatgtggaagaaaatcctggcccacatatgaccgagtacaagcccacggtgcgcctcgccacccgcgacgacgtccccagggccgtacgcaccctcgccgccgcgttcgccgactaccccgccacgcgccacaccgtcgatccggaccgccacatcgagcgggtcaccgagctgcaagaactcttcctcacgcgcgtcgggctcgacatcggcaaggtgtgggtcgcggacgacggcgccgcggtggcggtctggaccacgccggagagcgtcgaagcgggggcggtgttcgccgagatcggcccgcgcatggccgagttgagcggttcccggctggccgcgcagcaacagatggaaggcctcctggcgccgcaccggcccaaggagcccgcgtggttcctggccaccgtcggcgtctcgcccgaccaccagggcaagggtctgggcagcgccgtcgtgctccccggagtggaggcggccgagcgcgccggggtgcccgccttcctggagacctccgcgccccgcaacctccccttctacgagcggctcggcttcaccgtcaccgccgacgtcgaggtgcccgaaggaccgcgcacctggtgcatgacccgcaagcccggtgcctga

SEQ ID NO: 952 - DNA, 2751 bp, Artificial Sequence
  Synthetic Polynucleotides
atggccttaccagtgaccgccttgctcctgccgctggccttgctgctccacgccgccaggccggacatcgtgctgacacagagccctgccaccctgtctctgagccctggcgatagagccaccatcagctgtagagccagcgagagcgtgaccatcctgggcagccacctgatctactggtatcagcagaagcccggccagccccccagactgctgattcagctggcctccaatgtgcagaccggcgtgccagccagattttccggcagcggcagcagaaccgacttcaccctgaccatcagcagcgtggaacccgaggacttcgccgtgtactactgcctccagagccggaccatccccagaacattcggccagggcaccaagctggaaatcaagagaggcggaggcggaagtggaggcggaggatctggcggcggaggctctcaggtgcagctggtgcagtctggccccgaagtgaagaaacccggcgagtccgtgaagatcagctgcaaggccagcggctacaccttccggcactacagcatgaactgggtcaagcaggccccaggccagggcctgaagtggatgggcagaatcaacaccgagagcggcgtgcccatctacgccgacgacttcaagggccggttcagcttcaccgtggacaccagcgccagcaccgcctacctggaaatctccagcctgaccagcgaggataccgccgtgtatttctgctccaacgactacctgtacagcctggatttctggggccagggaaccaccctgacagtgtcctctacgcgtgagcagaaactgatctcggaagaggatctggcgaagcccaccacgacgccagcgccgcgaccaccaacaccggcgcccaccatcgcgtcgcagcccctgtccctgcgcccagaggcgtgccggccagcggcggggggcgcagtgcacacgagggggctggacttcgcctgtgacatctacatctgggcgcccttggccgggacttgtggggtccttctcctgtcactggttatcaccctttactgcgggcgcgccagagtgaagttcagcaggagcgcagacgcccccgcgtaccagcagggccagaaccagctctataacgagctgaatctaggacgaagagaggagtacgatgttttggacaagagacgtggccgggaccctgagatggggggaaagccgagaaggaagaaccctcaggaaggcctgtacaatgaactgcagaaagataagatggcggaggcctacagtgagattgggatgaaaggcgagcgccggaggggcaaggggcacgatggcctttaccagggtctcagtacagccaccaaggacacctacgacgcccttcacatgcaggccctgccccctcgctctagaggatctggagcaacaaacttctcactactcaaacaagcaggtgacgtggaggagaatcccgggcctgggatccacatggccacttacgaggttctctgtgaggtggcgcggaaactgggcacggatgacagggaagtggtattgttcctcctaaacgtgttcatacctcaacccacactggcccaattaattggagctcttagagctttaaaggaggagggcaggttaacgtttcccctgttagcggaatgtctgtttcgtgcaggtcgcagagacctcttgcgcgacctgcttcacttagacccgcgttttttagagcgccacctagcgggcacaatgagttatttcagcccttatcagctcactgttctccacgtagacggggagctgtgtgcgagggatattaggtctttgatatttttaagcaaggacactatagggtctcgcagcacaccacagacattcttacactgggtgtactgtatggaaaacttagacctactgggtcccactgacgtggatgccctaatgtcaatgcttagatctttgtcaagagtagacctacagcgccaagtgcaaaccctaatgggccttcacctttccggcccatcacactcccaacactatcgccatacaccactcgagaccgatttctacgactacaaggacgacgatgacaagactagtggctccggcgagggcagaggaagtctactaacctgcggagatgtggaagaaaatcctggcccacatatgaccgagtacaagcccacggtgcgcctcgccacccgcgacgacgtccccagggccgtacgcaccctcgccgccgcgttcgccgactaccccgccacgcgccacaccgtcgatccggaccgccacatcgagcgggtcaccgagctgcaagaactcttcctcacgcgcgtcgggctcgacatcggcaaggtgtgggtcgcggacgacggcgccgcggtggcggtctggaccacgccggagagcgtcgaagcgggggcggtgttcgccgagatcggcccgcgcatggccgagttgagcggttcccggctggccgcgcagcaacagatggaaggcctcctggcgccgcaccggcccaaggagcccgcgtggttcctggccaccgtcggcgtctcgcccgaccaccagggcaagggtctgggcagcgccgtcgtgctccccggagtggaggcggccgagcgcgccggggtgcccgccttcctggagacctccgcgccccgcaacctccccttctacgagcggctcggcttcaccgtcaccgccgacgtcgaggtgcccgaaggaccgcgcacctggtgcatgacccgcaagcccggtgcctga

SEQ ID NO: 953 - DNA, 2754 bp, Artificial Sequence
  Synthetic Polynucleotides
atggccttaccagtgaccgccttgctcctgccgctggccttgctgctccacgccgccaggccgcagtctgtgctgacacagcctcctagtgtgtctggcgctcctggacagagagtgaccatcagctgtacaggcagcagcagcaatatcggagccggctttgacgtgcactggtatcagcagctgcctggcacagcccctaaactgctgatctacggcaacagcaacagacccagcggcgtgcccgatagattttccggctctaagagcggcacaagcgccagcctggctattactggactccaggccgaggacgaggccgactactactgtcagagctacgacagcagcctgagcggctacgttttcggcaccggcaccaaagtgacagtgcttggtggcggaggcggaagtggaggcggaggatctggcggcggaggctctcaagttcagctggttcagagcggagccgaagtgaagaaacctggggcctctgtgaaggtgtcctgcaaggcttccggctacacctttaccgattactacatgcactgggtccgacaggctcccggccaaagacttgaatggatgggctggatcaaccccaacagcggcggcacaaattacgcccagaagttccaggaccggatcaccgtgaccagagacaccagctccaacaccggctacatggaactgacccggctgagatccgatgacaccgccgtgtactactgcgctagaagcccttactccggcgtgctggataagtggggacagggcacactggtcaccgtgtcatctacgcgtgagcagaaactgatctcggaagaggatctggcgaagcccaccacgacgccagcgccgcgaccaccaacaccggcgcccaccatcgcgtcgcagcccctgtccctgcgcccagaggcgtgccggccagcggcggggggcgcagtgcacacgagggggctggacttcgcctgtgacatctacatctgggcgcccttggccgggacttgtggggtccttctcctgtcactggttatcaccctttactgcgggcgcgccagagtgaagttcagcaggagcgcagacgcccccgcgtaccagcagggccagaaccagctctataacgagctgaatctaggacgaagagaggagtacgatgttttggacaagagacgtggccgggaccctgagatggggggaaagccgagaaggaagaaccctcaggaaggcctgtacaatgaactgcagaaagataagatggcggaggcctacagtgagattgggatgaaaggcgagcgccggaggggcaaggggcacgatggcctttaccagggtctcagtacagccaccaaggacacctacgacgcccttcacatgcaggccctgccccctcgctctagaggatctggagcaacaaacttctcactactcaaacaagcaggtgacgtggaggagaatcccgggcctgggatccacatggccacttacgaggttctctgtgaggtggcgcggaaactgggcacggatgacagggaagtggtattgttcctcctaaacgtgttcatacctcaacccacactggcccaattaattggagctcttagagctttaaaggaggagggcaggttaacgtttcccctgttagcggaatgtctgtttcgtgcaggtcgcagagacctcttgcgcgacctgcttcacttagacccgcgttttttagagcgccacctagcgggcacaatgagttatttcagcccttatcagctcactgttctccacgtagacggggagctgtgtgcgagggatattaggtctttgatatttttaagcaaggacactatagggtctcgcagcacaccacagacattcttacactgggtgtactgtatggaaaacttagacctactgggtcccactgacgtggatgccctaatgtcaatgcttagatctttgtcaagagtagacctacagcgccaagtgcaaaccctaatgggccttcacctttccggcccatcacactcccaacactatcgccatacaccactcgagaccgatttctacgactacaaggacgacgatgacaagactagtggctccggcgagggcagaggaagtctactaacctgcggagatgtggaagaaaatcctggcccacatatgaccgagtacaagcccacggtgcgcctcgccacccgcgacgacgtccccagggccgtacgcaccctcgccgccgcgttcgccgactaccccgccacgcgccacaccgtcgatccggaccgccacatcgagcgggtcaccgagctgcaagaactcttcctcacgcgcgtcgggctcgacatcggcaaggtgtgggtcgcggacgacggcgccgcggtggcggtctggaccacgccggagagcgtcgaagcgggggcggtgttcgccgagatcggcccgcgcatggccgagttgagcggttcccggctggccgcgcagcaacagatggaaggcctcctggcgccgcaccggcccaaggagcccgcgtggttcctggccaccgtcggcgtctcgcccgaccaccagggcaagggtctgggcagcgccgtcgtgctccccggagtggaggcggccgagcgcgccggggtgcccgccttcctggagacctccgcgccccgcaacctccccttctacgagcggctcggcttcaccgtcaccgccgacgtcgaggtgcccgaaggaccgcgcacctggtgcatgacccgcaagcccggtgcctga

SEQ ID NO: 954 - DNA, 2748 bp, Artificial Sequence
  Synthetic Polynucleotides
atggccttaccagtgaccgccttgctcctgccgctggccttgctgctccacgccgccaggccgcaggctgttctgacacagcctccatctgcctctggcacacctggacagagagtgaccatctcctgtagcggcagcagcagcaacatcggcagctacaccgtgtcctggtatcagcagctccctggaacagcccctaagttcctgatctacagcaacaaccagcggcctagcggcgtgcccgatagattttctggcagcaagagcggcacaagcgccagcctggctatttctggactccagtctgaggacgaggccgactactattgtgccgcctgggacgatagcctgaacggctatgtgtttggcaccggcaccaaagtgacagtgcttggtggcggaggcggaagtggaggcggaggatctggcggcggaggctctgaagttcaactggttcagagcggagccgaagtgaagaagcctggcgagagcctgaagattagctgcaaaggcagcggctacgacttcaccacctactggatcggctgggtccgacagatgcctggcaaaggactggaatggatgggcatcatctaccccggcgacagcgacaccagatacagccctagcgttagaggccgcgtgaccatcagcgccgacaagtctatcaacaccgcctacctccagtggtccagcctggaagcctctgacaccgccatgtactactgcgccagaatgtggaccttcagccaggatggatggggccagggaacactggtcacagtgtcatctacgcgtgagcagaaactgatctcggaagaggatctggcgaagcccaccacgacgccagcgccgcgaccaccaacaccggcgcccaccatcgcgtcgcagcccctgtccctgcgcccagaggcgtgccggccagcggcggggggcgcagtgcacacgagggggctggacttcgcctgtgacatctacatctgggcgcccttggccgggacttgtggggtccttctcctgtcactggttatcaccctttactgcgggcgcgccagagtgaagttcagcaggagcgcagacgcccccgcgtaccagcagggccagaaccagctctataacgagctgaatctaggacgaagagaggagtacgatgttttggacaagagacgtggccgggaccctgagatggggggaaagccgagaaggaagaaccctcaggaaggcctgtacaatgaactgcagaaagataagatggcggaggcctacagtgagattgggatgaaaggcgagcgccggaggggcaaggggcacgatggcctttaccagggtctcagtacagccaccaaggacacctacgacgcccttcacatgcaggccctgccccctcgctctagaggatctggagcaacaaacttctcactactcaaacaagcaggtgacgtggaggagaatcccgggcctgggatccacatggccacttacgaggttctctgtgaggtggcgcggaaactgggcacggatgacagggaagtggtattgttcctcctaaacgtgttcatacctcaacccacactggcccaattaattggagctcttagagctttaaaggaggagggcaggttaacgtttcccctgttagcggaatgtctgtttcgtgcaggtcgcagagacctcttgcgcgacctgcttcacttagacccgcgttttttagagcgccacctagcgggcacaatgagttatttcagcccttatcagctcactgttctccacgtagacggggagctgtgtgcgagggatattaggtctttgatatttttaagcaaggacactatagggtctcgcagcacaccacagacattcttacactgggtgtactgtatggaaaacttagacctactgggtcccactgacgtggatgccctaatgtcaatgcttagatctttgtcaagagtagacctacagcgccaagtgcaaaccctaatgggccttcacctttccggcccatcacactcccaacactatcgccatacaccactcgagaccgatttctacgactacaaggacgacgatgacaagactagtggctccggcgagggcagaggaagtctactaacctgcggagatgtggaagaaaatcctggcccacatatgaccgagtacaagcccacggtgcgcctcgccacccgcgacgacgtccccagggccgtacgcaccctcgccgccgcgttcgccgactaccccgccacgcgccacaccgtcgatccggaccgccacatcgagcgggtcaccgagctgcaagaactcttcctcacgcgcgtcgggctcgacatcggcaaggtgtgggtcgcggacgacggcgccgcggtggcggtctggaccacgccggagagcgtcgaagcgggggcggtgttcgccgagatcggcccgcgcatggccgagttgagcggttcccggctggccgcgcagcaacagatggaaggcctcctggcgccgcaccggcccaaggagcccgcgtggttcctggccaccgtcggcgtctcgcccgaccaccagggcaagggtctgggcagcgccgtcgtgctccccggagtggaggcggccgagcgcgccggggtgcccgccttcctggagacctccgcgccccgcaacctccccttctacgagcggctcggcttcaccgtcaccgccgacgtcgaggtgcccgaaggaccgcgcacctggtgcatgacccgcaagcccggtgcctga

SEQ ID NO: 955 - DNA, 2781 bp, Artificial Sequence
  Synthetic Polynucleotides
atggccttaccagtgaccgccttgctcctgccgctggccttgctgctccacgccgccaggccgctgcctgttctgacacagcctccatctgcctctggcacacctggacagagagtgaccatcagctgtagcggcagaagcagcaacatcggcagcaacagcgtgaactggtacagacagcttcctggcgctgcccctaagctgctgatctacagcaacaaccagcggcctcctggcgtgccagtcagattttctggcagcaagagcggcacaagcgccagcctggctatttctggactccagtctgaggacgaggccacctactactgtgccacctgggacgacaacctgaacgtgcactacgtgttcggcaccggcaccaaagtgacagtgcttggaagtagaggcggaggcggaagtggaggcggaggatctggcggcggaggctctcttgaaatggctcaggtgcagctggtgcagagcggagccgaagtgaagaaacctggcagcagcgtgaaggtgtcctgcaaagcttctggcggcaccttcagcagctacgccatctcttgggttcgacaggcccctggacaaggactggaatggatgggcagaatcatccccatcctgggaatcgccaactacgcccagaaattccagggcagagtgacaatcaccgccgacaagagcaccagcaccgcctacatggaactgagcagcctgagaagcgaggacaccgccgtgtactattgtgcaagaggcggctactacagccacgacatgtggagcgaagattggggccagggcacactggtcacagtgtcatctacgcgtgagcagaaactgatctcggaagaggatctggcgaagcccaccacgacgccagcgccgcgaccaccaacaccggcgcccaccatcgcgtcgcagcccctgtccctgcgcccagaggcgtgccggccagcggcggggggcgcagtgcacacgagggggctggacttcgcctgtgacatctacatctgggcgcccttggccgggacttgtggggtccttctcctgtcactggttatcaccctttactgcgggcgcgccagagtgaagttcagcaggagcgcagacgcccccgcgtaccagcagggccagaaccagctctataacgagctgaatctaggacgaagagaggagtacgatgttttggacaagagacgtggccgggaccctgagatggggggaaagccgagaaggaagaaccctcaggaaggcctgtacaatgaactgcagaaagataagatggcggaggcctacagtgagattgggatgaaaggcgagcgccggaggggcaaggggcacgatggcctttaccagggtctcagtacagccaccaaggacacctacgacgcccttcacatgcaggccctgccccctcgctctagaggatctggagcaacaaacttctcactactcaaacaagcaggtgacgtggaggagaatcccgggcctgggatccacatggccacttacgaggttctctgtgaggtggcgcggaaactgggcacggatgacagggaagtggtattgttcctcctaaacgtgttcatacctcaacccacactggcccaattaattggagctcttagagctttaaaggaggagggcaggttaacgtttcccctgttagcggaatgtctgtttcgtgcaggtcgcagagacctcttgcgcgacctgcttcacttagacccgcgttttttagagcgccacctagcgggcacaatgagttatttcagcccttatcagctcactgttctccacgtagacggggagctgtgtgcgagggatattaggtctttgatatttttaagcaaggacactatagggtctcgcagcacaccacagacattcttacactgggtgtactgtatggaaaacttagacctactgggtcccactgacgtggatgccctaatgtcaatgcttagatctttgtcaagagtagacctacagcgccaagtgcaaaccctaatgggccttcacctttccggcccatcacactcccaacactatcgccatacaccactcgagaccgatttctacgactacaaggacgacgatgacaagactagtggctccggcgagggcagaggaagtctactaacctgcggagatgtggaagaaaatcctggcccacatatgaccgagtacaagcccacggtgcgcctcgccacccgcgacgacgtccccagggccgtacgcaccctcgccgccgcgttcgccgactaccccgccacgcgccacaccgtcgatccggaccgccacatcgagcgggtcaccgagctgcaagaactcttcctcacgcgcgtcgggctcgacatcggcaaggtgtgggtcgcggacgacggcgccgcggtggcggtctggaccacgccggagagcgtcgaagcgggggcggtgttcgccgagatcggcccgcgcatggccgagttgagcggttcccggctggccgcgcagcaacagatggaaggcctcctggcgccgcaccggcccaaggagcccgcgtggttcctggccaccgtcggcgtctcgcccgaccaccagggcaagggtctgggcagcgccgtcgtgctccccggagtggaggcggccgagcgcgccggggtgcccgccttcctggagacctccgcgccccgcaacctccccttctacgagcggctcggcttcaccgtcaccgccgacgtcgaggtgcccgaaggaccgcgcacctggtgcatgacccgcaagcccggtgcctga

SEQ ID NO: 956 - DNA, 2748 bp, Artificial Sequence
  Synthetic Polynucleotides
atggccttaccagtgaccgccttgctcctgccgctggccttgctgctccacgccgccaggccggacatcgtgctgacacagagccctgcttctctggccgtgtctctgggagagagagccaccatcaactgtagagccagcgagagcgtgtccgtgattggagcccacctgatccactggtatcagcagaagcctggacagcctcctaagctgctgatctacctggcctccaacctggaaacaggcgtgccagccagattttctggcagcggctctggcaccgatttcaccctgacaatcagcagcctccaggccgaagatgccgccatctactactgcctccagagccggatcttccccagaacctttggacagggcaccaagctggaaatcaaaggcggaggcggaagtggaggcggaggatctggcggcggaggctctcaagttcagctggtgcagtctggctccgagctgaagaaacctggcgagtccgtgaagatcagctgcaaggccagcggctacaccttcaccgactacagcatcaactgggtcaagcaggcccctggacagggactgaaatggatgggctggatcaacaccgagacaagagagcccgcctacgcctacgacttcagaggcagattcgtgttctccctggacaccagcgccagcacagcctatctccagatcagctctctgaaggccgaggataccgccgtgtacttctgcgccctggactacagctacgctatggactattggggccagggcaccctggtcacagtctcttctacgcgtgagcagaaactgatctcggaagaggatctggcgaagcccaccacgacgccagcgccgcgaccaccaacaccggcgcccaccatcgcgtcgcagcccctgtccctgcgcccagaggcgtgccggccagcggcggggggcgcagtgcacacgagggggctggacttcgcctgtgacatctacatctgggcgcccttggccgggacttgtggggtccttctcctgtcactggttatcaccctttactgcgggcgcgccagagtgaagttcagcaggagcgcagacgcccccgcgtaccagcagggccagaaccagctctataacgagctgaatctaggacgaagagaggagtacgatgttttggacaagagacgtggccgggaccctgagatggggggaaagccgagaaggaagaaccctcaggaaggcctgtacaatgaactgcagaaagataagatggcggaggcctacagtgagattgggatgaaaggcgagcgccggaggggcaaggggcacgatggcctttaccagggtctcagtacagccaccaaggacacctacgacgcccttcacatgcaggccctgccccctcgctctagaggatctggagcaacaaacttctcactactcaaacaagcaggtgacgtggaggagaatcccgggcctgggatccacatggccacttacgaggttctctgtgaggtggcgcggaaactgggcacggatgacagggaagtggtattgttcctcctaaacgtgttcatacctcaacccacactggcccaattaattggagctcttagagctttaaaggaggagggcaggttaacgtttcccctgttagcggaatgtctgtttcgtgcaggtcgcagagacctcttgcgcgacctgcttcacttagacccgcgttttttagagcgccacctagcgggcacaatgagttatttcagcccttatcagctcactgttctccacgtagacggggagctgtgtgcgagggatattaggtctttgatatttttaagcaaggacactatagggtctcgcagcacaccacagacattcttacactgggtgtactgtatggaaaacttagacctactgggtcccactgacgtggatgccctaatgtcaatgcttagatctttgtcaagagtagacctacagcgccaagtgcaaaccctaatgggccttcacctttccggcccatcacactcccaacactatcgccatacaccactcgagaccgatttctacgactacaaggacgacgatgacaagactagtggctccggcgagggcagaggaagtctactaacctgcggagatgtggaagaaaatcctggcccacatatgaccgagtacaagcccacggtgcgcctcgccacccgcgacgacgtccccagggccgtacgcaccctcgccgccgcgttcgccgactaccccgccacgcgccacaccgtcgatccggaccgccacatcgagcgggtcaccgagctgcaagaactcttcctcacgcgcgtcgggctcgacatcggcaaggtgtgggtcgcggacgacggcgccgcggtggcggtctggaccacgccggagagcgtcgaagcgggggcggtgttcgccgagatcggcccgcgcatggccgagttgagcggttcccggctggccgcgcagcaacagatggaaggcctcctggcgccgcaccggcccaaggagcccgcgtggttcctggccaccgtcggcgtctcgcccgaccaccagggcaagggtctgggcagcgccgtcgtgctccccggagtggaggcggccgagcgcgccggggtgcccgccttcctggagacctccgcgccccgcaacctccccttctacgagcggctcggcttcaccgtcaccgccgacgtcgaggtgcccgaaggaccgcgcacctggtgcatgacccgcaagcccggtgcctga

SEQ ID NO: 957 - DNA, 2751 bp, Artificial Sequence
  Synthetic Polynucleotides
atggccttaccagtgaccgccttgctcctgccgctggccttgctgctccacgccgccaggccggacatcgtgctgacacagtctcccgccacactgtcactgagccctggcgatagagccacactgagctgtagagccagcgagagcgtgacaatcctgggcagccacctgatctactggtatcagcagaagcccggacaggcccctagactgctgattcagctcgccagcaatgtgcagacaggcatccctgccagattttccggcagcggcagcagaaccgatttcaccctgaccataagcagcctggaacctgaggacttcgccgtgtactactgcctccagagccggacaatccccagaacctttggacagggcaccaagctggaaatcaagagaggcggaggcggaagtggaggcggaggatctggcggcggaggctctcaagttcaactggtgcagagcggctccgagctgaagaaacctggcgagtccgtgaagattagctgcaaggccagcggctacaccttcacacactacagcatgaactgggtccgacaggctccaggccaaggactggaatggatgggcagaatcaacaccgagacaggcgagcccctgtacgccgacgatttcaagggcagattcgtgttcagcctggacaccagcgccagcacagcctatctccagatcagctctctgaaggccgaggacaccgccgtgtattattgcagcaacgactacctgtactccctggactattggggccagggcacactggtcacagtgtctagtacgcgtgagcagaaactgatctcggaagaggatctggcgaagcccaccacgacgccagcgccgcgaccaccaacaccggcgcccaccatcgcgtcgcagcccctgtccctgcgcccagaggcgtgccggccagcggcggggggcgcagtgcacacgagggggctggacttcgcctgtgacatctacatctgggcgcccttggccgggacttgtggggtccttctcctgtcactggttatcaccctttactgcgggcgcgccagagtgaagttcagcaggagcgcagacgcccccgcgtaccagcagggccagaaccagctctataacgagctgaatctaggacgaagagaggagtacgatgttttggacaagagacgtggccgggaccctgagatggggggaaagccgagaaggaagaaccctcaggaaggcctgtacaatgaactgcagaaagataagatggcggaggcctacagtgagattgggatgaaaggcgagcgccggaggggcaaggggcacgatggcctttaccagggtctcagtacagccaccaaggacacctacgacgcccttcacatgcaggccctgccccctcgctctagaggatctggagcaacaaacttctcactactcaaacaagcaggtgacgtggaggagaatcccgggcctgggatccacatggccacttacgaggttctctgtgaggtggcgcggaaactgggcacggatgacagggaagtggtattgttcctcctaaacgtgttcatacctcaacccacactggcccaattaattggagctcttagagctttaaaggaggagggcaggttaacgtttcccctgttagcggaatgtctgtttcgtgcaggtcgcagagacctcttgcgcgacctgcttcacttagacccgcgttttttagagcgccacctagcgggcacaatgagttatttcagcccttatcagctcactgttctccacgtagacggggagctgtgtgcgagggatattaggtctttgatatttttaagcaaggacactatagggtctcgcagcacaccacagacattcttacactgggtgtactgtatggaaaacttagacctactgggtcccactgacgtggatgccctaatgtcaatgcttagatctttgtcaagagtagacctacagcgccaagtgcaaaccctaatgggccttcacctttccggcccatcacactcccaacactatcgccatacaccactcgagaccgatttctacgactacaaggacgacgatgacaagactagtggctccggcgagggcagaggaagtctactaacctgcggagatgtggaagaaaatcctggcccacatatgaccgagtacaagcccacggtgcgcctcgccacccgcgacgacgtccccagggccgtacgcaccctcgccgccgcgttcgccgactaccccgccacgcgccacaccgtcgatccggaccgccacatcgagcgggtcaccgagctgcaagaactcttcctcacgcgcgtcgggctcgacatcggcaaggtgtgggtcgcggacgacggcgccgcggtggcggtctggaccacgccggagagcgtcgaagcgggggcggtgttcgccgagatcggcccgcgcatggccgagttgagcggttcccggctggccgcgcagcaacagatggaaggcctcctggcgccgcaccggcccaaggagcccgcgtggttcctggccaccgtcggcgtctcgcccgaccaccagggcaagggtctgggcagcgccgtcgtgctccccggagtggaggcggccgagcgcgccggggtgcccgccttcctggagacctccgcgccccgcaacctccccttctacgagcggctcggcttcaccgtcaccgccgacgtcgaggtgcccgaaggaccgcgcacctggtgcatgacccgcaagcccggtgcctga

SEQ ID NO: 958 - DNA, 2754 bp, Artificial Sequence
  Synthetic Polynucleotides
atggccttaccagtgaccgccttgctcctgccgctggccttgctgctccacgccgccaggccggacatcgtgatgacccagagccccgatagcctggccgtgtctctgggagagagagccaccatcaactgcaagagcagccagagcatcctgtacagcagcaaccagaagaactacctggcctggtatcagcagaagcccggccagagccctaagctgctgatctactgggccagcaccagagaaagcggcgtgcccgatagattcagcggcagcggctctggcaccgacttcaccctgaccatcagttctcttcaggccgaggacgtggccgtgtactactgccaccagtacatcagctcctacaccttcggccagggcaccaagctggaaatcaagggcggaggcggaagtggaggcggaggatctggcggcggaggctctcaggtgcagctggtgcagtctggcgctgaagtgaagaaacctggggccagcgtgaaggtgtcctgcaaggccagcggctacacctttgccagccagtggatgcactggatgagacaggcccctggacagggcctggaatggatcggctggatcaaccccggcaacgtgaacaccaagtacaacgagaagttcaagggcagagccaccctgacagtggacaccagcaccaacaccgcctacatggaactgagcagcctgcggagcgaggacaccgccgtgtattattgcgccagaagcacctggtacagacccctggattattggggccagggaacccttgtgaccgtgtcctctacgcgtgagcagaaactgatctcggaagaggatctggcgaagcccaccacgacgccagcgccgcgaccaccaacaccggcgcccaccatcgcgtcgcagcccctgtccctgcgcccagaggcgtgccggccagcggcggggggcgcagtgcacacgagggggctggacttcgcctgtgacatctacatctgggcgcccttggccgggacttgtggggtccttctcctgtcactggttatcaccctttactgcgggcgcgccagagtgaagttcagcaggagcgcagacgcccccgcgtaccagcagggccagaaccagctctataacgagctgaatctaggacgaagagaggagtacgatgttttggacaagagacgtggccgggaccctgagatggggggaaagccgagaaggaagaaccctcaggaaggcctgtacaatgaactgcagaaagataagatggcggaggcctacagtgagattgggatgaaaggcgagcgccggaggggcaaggggcacgatggcctttaccagggtctcagtacagccaccaaggacacctacgacgcccttcacatgcaggccctgccccctcgctctagaggatctggagcaacaaacttctcactactcaaacaagcaggtgacgtggaggagaatcccgggcctgggatccacatggccacttacgaggttctctgtgaggtggcgcggaaactgggcacggatgacagggaagtggtattgttcctcctaaacgtgttcatacctcaacccacactggcccaattaattggagctcttagagctttaaaggaggagggcaggttaacgtttcccctgttagcggaatgtctgtttcgtgcaggtcgcagagacctcttgcgcgacctgcttcacttagacccgcgttttttagagcgccacctagcgggcacaatgagttatttcagcccttatcagctcactgttctccacgtagacggggagctgtgtgcgagggatattaggtctttgatatttttaagcaaggacactatagggtctcgcagcacaccacagacattcttacactgggtgtactgtatggaaaacttagacctactgggtcccactgacgtggatgccctaatgtcaatgcttagatctttgtcaagagtagacctacagcgccaagtgcaaaccctaatgggccttcacctttccggcccatcacactcccaacactatcgccatacaccactcgagaccgatttctacgactacaaggacgacgatgacaagactagtggctccggcgagggcagaggaagtctactaacctgcggagatgtggaagaaaatcctggcccacatatgaccgagtacaagcccacggtgcgcctcgccacccgcgacgacgtccccagggccgtacgcaccctcgccgccgcgttcgccgactaccccgccacgcgccacaccgtcgatccggaccgccacatcgagcgggtcaccgagctgcaagaactcttcctcacgcgcgtcgggctcgacatcggcaaggtgtgggtcgcggacgacggcgccgcggtggcggtctggaccacgccggagagcgtcgaagcgggggcggtgttcgccgagatcggcccgcgcatggccgagttgagcggttcccggctggccgcgcagcaacagatggaaggcctcctggcgccgcaccggcccaaggagcccgcgtggttcctggccaccgtcggcgtctcgcccgaccaccagggcaagggtctgggcagcgccgtcgtgctccccggagtggaggcggccgagcgcgccggggtgcccgccttcctggagacctccgcgccccgcaacctccccttctacgagcggctcggcttcaccgtcaccgccgacgtcgaggtgcccgaaggaccgcgcacctggtgcatgacccgcaagcccggtgcctga

SEQ ID NO: 959 - DNA, 3126 bp, Artificial Sequence
  Synthetic Polynucleotides
atggttaggggcgttccattcagacatctgcttctggtcttgcagcttgcactcttgcccgctgccacccagggcaaaaaagtggtgctgggcaagaaaggcgacaccgtggaactgacctgcaccgccagccagaagaagtccatccagttccactggaagaacagcaaccagatcaagatcctgggcaaccagggcagcttcctgaccaagggacccagcaagctgaacgacagagccgacagcagacggtccctgtgggaccagggcaatttcccactgattatcaagaacctgaagatcgaggacagcgacacctacatctgcgaggtggaagatcagaaagaagaggtgcaactgctggtgttcggcctgaccgccaactccgacacccatctgctccagggccagagcctgaccctgacactggaaagccctccaggcagctcccccagcgtgcagtgtagaagcccacgaggcaagaacatccagggaggcaaaacattgtcagtgtcccaactggaactccaggactccggcacctggacctgtaccgtgctccagaaccagaaaaaggtggagttcaagatcgacatcgtggtgctggccttccagaaagcctctggcggaggcggaagtggaggcggaggatctggcggcggaggctctatctaccaggaactgacacaactgaaggccgccgtggaacggctgtgccacccttgtccttgggagtggaccttctttcagggcaactgctacttcatgagcaacagccagcggaactggcacgacagcatcaccgcctgcaaagaagtgggagcccaactggtcgtgattaagagcgccgaggaacagaacttcctccaactccagagcagcagaagcaacagattcacctggatgggcctgagcgacctgaaccaggaaggcacctggcagtgggtggacggatctcctctgctgcccagcttcaagcagtattggaaccggggcgagcccaacaacgtgggcgaagaggattgcgccgagttcagcggcaacggctggaacgacgacaagtgcaacctggctaagttctggatctgcaagaagtccgccgcctcctgtagccgggatgaggaacagttcctgagccctgcccctgccacccctaatcctccaccagctacgcgtgagcagaaactgatctcggaagaggatctggcgaagcccaccacgacgccagcgccgcgaccaccaacaccggcgcccaccatcgcgtcgcagcccctgtccctgcgcccagaggcgtgccggccagcggcggggggcgcagtgcacacgagggggctggacttcgcctgtgacatctacatctgggcgcccttggccgggacttgtggggtccttctcctgtcactggttatcaccctttactgcgggcgcgccagagtgaagttcagcaggagcgcagacgcccccgcgtaccagcagggccagaaccagctctataacgagctgaatctaggacgaagagaggagtacgatgttttggacaagagacgtggccgggaccctgagatggggggaaagccgagaaggaagaaccctcaggaaggcctgtacaatgaactgcagaaagataagatggcggaggcctacagtgagattgggatgaaaggcgagcgccggaggggcaaggggcacgatggcctttaccagggtctcagtacagccaccaaggacacctacgacgcccttcacatgcaggccctgccccctcgctctagaggatctggagcaacaaacttctcactactcaaacaagcaggtgacgtggaggagaatcccgggcctgggatccacatggccacttacgaggttctctgtgaggtggcgcggaaactgggcacggatgacagggaagtggtattgttcctcctaaacgtgttcatacctcaacccacactggcccaattaattggagctcttagagctttaaaggaggagggcaggttaacgtttcccctgttagcggaatgtctgtttcgtgcaggtcgcagagacctcttgcgcgacctgcttcacttagacccgcgttttttagagcgccacctagcgggcacaatgagttatttcagcccttatcagctcactgttctccacgtagacggggagctgtgtgcgagggatattaggtctttgatatttttaagcaaggacactatagggtctcgcagcacaccacagacattcttacactgggtgtactgtatggaaaacttagacctactgggtcccactgacgtggatgccctaatgtcaatgcttagatctttgtcaagagtagacctacagcgccaagtgcaaaccctaatgggccttcacctttccggcccatcacactcccaacactatcgccatacaccactcgagaccgatttctacgactacaaggacgacgatgacaagactagtggctccggcgagggcagaggaagtctactaacctgcggagatgtggaagaaaatcctggcccacatatgaccgagtacaagcccacggtgcgcctcgccacccgcgacgacgtccccagggccgtacgcaccctcgccgccgcgttcgccgactaccccgccacgcgccacaccgtcgatccggaccgccacatcgagcgggtcaccgagctgcaagaactcttcctcacgcgcgtcgggctcgacatcggcaaggtgtgggtcgcggacgacggcgccgcggtggcggtctggaccacgccggagagcgtcgaagcgggggcggtgttcgccgagatcggcccgcgcatggccgagttgagcggttcccggctggccgcgcagcaacagatggaaggcctcctggcgccgcaccggcccaaggagcccgcgtggttcctggccaccgtcggcgtctcgcccgaccaccagggcaagggtctgggcagcgccgtcgtgctccccggagtggaggcggccgagcgcgccggggtgcccgccttcctggagacctccgcgccccgcaacctccccttctacgagcggctcggcttcaccgtcaccgccgacgtcgaggtgcccgaaggaccgcgcacctggtgcatgacccgcaagcccggtgcctga

SEQ ID NO: 960 - DNA, 2754 bp, Artificial Sequence
  Synthetic Polynucleotides
atggccttaccagtgaccgccttgctcctgccgctggccttgctgctccacgccgccaggccggaccacatcgtgctgacccagagccctagcagcctgtctgccagcctgggcgacagagtgaccatcagctgtagagccagccaggacatcagcacctacctgaactggtatcagcagaaacccgacggcaccgtgaagctgctgatcttctacaccagcagactgcacgccggggtgcccagcagattttctggcagcggctctggcacccaccacagcctgaccatctccaacctggaacaggaagatattgctacctacttctgtcagcaaggcaacagcctgcccttcaccttcggcagcggcaccaagctggaaatcaagagaggcggaggcggaagtggaggcggaggatctggcggcggaggctctcaggtgcagctgaaagagagcggccctgagctggaaaagcctggggccagcgtgaagattagctgcaaggccagcggctacagcttcaccgcctacagcatgaactgggtcaagcagaacaacggcatgagcctggaatggatcggcagcatcgacccctactacggcgacaccaaatacgcccagaagttcaagggcaaggccaccctgaccgtggataaggccagcagcaccgcctacctccagctgaagtctctgaccagcgaggacagcgccgtgtactactgcgccagacggatgattaccaccggcgactggtacttcgacgtgtggggagccggaaccaccgtgacagtgtctagcacgcgtgagcagaaactgatctcggaagaggatctggcgaagcccaccacgacgccagcgccgcgaccaccaacaccggcgcccaccatcgcgtcgcagcccctgtccctgcgcccagaggcgtgccggccagcggcggggggcgcagtgcacacgagggggctggacttcgcctgtgacatctacatctgggcgcccttggccgggacttgtggggtccttctcctgtcactggttatcaccctttactgcgggcgcgccagagtgaagttcagcaggagcgcagacgcccccgcgtaccagcagggccagaaccagctctataacgagctgaatctaggacgaagagaggagtacgatgttttggacaagagacgtggccgggaccctgagatggggggaaagccgagaaggaagaaccctcaggaaggcctgtacaatgaactgcagaaagataagatggcggaggcctacagtgagattgggatgaaaggcgagcgccggaggggcaaggggcacgatggcctttaccagggtctcagtacagccaccaaggacacctacgacgcccttcacatgcaggccctgccccctcgctctagaggatctggagcaacaaacttctcactactcaaacaagcaggtgacgtggaggagaatcccgggcctgggatccacatggccacttacgaggttctctgtgaggtggcgcggaaactgggcacggatgacagggaagtggtattgttcctcctaaacgtgttcatacctcaacccacactggcccaattaattggagctcttagagctttaaaggaggagggcaggttaacgtttcccctgttagcggaatgtctgtttcgtgcaggtcgcagagacctcttgcgcgacctgcttcacttagacccgcgttttttagagcgccacctagcgggcacaatgagttatttcagcccttatcagctcactgttctccacgtagacggggagctgtgtgcgagggatattaggtctttgatatttttaagcaaggacactatagggtctcgcagcacaccacagacattcttacactgggtgtactgtatggaaaacttagacctactgggtcccactgacgtggatgccctaatgtcaatgcttagatctttgtcaagagtagacctacagcgccaagtgcaaaccctaatgggccttcacctttccggcccatcacactcccaacactatcgccatacaccactcgagaccgatttctacgactacaaggacgacgatgacaagactagtggctccggcgagggcagaggaagtctactaacctgcggagatgtggaagaaaatcctggcccacatatgaccgagtacaagcccacggtgcgcctcgccacccgcgacgacgtccccagggccgtacgcaccctcgccgccgcgttcgccgactaccccgccacgcgccacaccgtcgatccggaccgccacatcgagcgggtcaccgagctgcaagaactcttcctcacgcgcgtcgggctcgacatcggcaaggtgtgggtcgcggacgacggcgccgcggtggcggtctggaccacgccggagagcgtcgaagcgggggcggtgttcgccgagatcggcccgcgcatggccgagttgagcggttcccggctggccgcgcagcaacagatggaaggcctcctggcgccgcaccggcccaaggagcccgcgtggttcctggccaccgtcggcgtctcgcccgaccaccagggcaagggtctgggcagcgccgtcgtgctccccggagtggaggcggccgagcgcgccggggtgcccgccttcctggagacctccgcgccccgcaacctccccttctacgagcggctcggcttcaccgtcaccgccgacgtcgaggtgcccgaaggaccgcgcacctggtgcatgacccgcaagcccggtgcctga

SEQ ID NO: 961 - DNA, 2754 bp, Artificial Sequence; identical to SEQ ID NO: 960
  Synthetic Polynucleotides

SEQ ID NO: 962 - DNA, 2595 bp, Artificial Sequence
  Synthetic Polynucleotides
atggcccttccagtcactgccttgctgttgcctctggcgctcctgctccacgccgctagaccgggcatgagaaccgaggacctgcctaaggccgtggtgttcctggaaccccagtggtacagagtgctggaaaaggacagcgtgaccctgaagtgccagggcgcctacagccccgaggacaatagcacccagtggttccacaacgagagcctgatctccagccaggccagcagctacttcatcgacgccgccaccgtggacgacagcggcgagtatagatgccagaccaacctgagcaccctgagcgaccccgtgcagctggaagtgcacatcggatggctgctgctgcaggcccccagatgggtgttcaaagaagaggaccccatccacctgagatgccactcttggaagaacaccgccctgcacaaagtgacctacctgcagaacggcaagggcagaaagtacttccaccacaacagcgacttctacatccccaaggccaccctgaaggactccggctcctacttctgcagaggcctcgtgggcagcaagaacgtgtccagcgagacagtgaacatcaccatcacccagggcctggccgtgtctaccatcagcagctttttcccacccggctaccagacgcgtgagcagaaactgatctcggaagaggatctggcgaagcccaccacgacgccagcgccgcgaccaccaacaccggcgcccaccatcgcgtcgcagcccctgtccctgcgcccagaggcgtgccggccagcggcggggggcgcagtgcacacgagggggctggacttcgcctgtgacatctacatctgggcgcccttggccgggacttgtggggtccttctcctgtcactggttatcaccctttactgcgggcgcgccagagtgaagttcagcaggagcgcagacgcccccgcgtaccagcagggccagaaccagctctataacgagctgaatctaggacgaagagaggagtacgatgttttggacaagagacgtggccgggaccctgagatggggggaaagccgagaaggaagaaccctcaggaaggcctgtacaatgaactgcagaaagataagatggcggaggcctacagtgagattgggatgaaaggcgagcgccggaggggcaaggggcacgatggcctttaccagggtctcagtacagccaccaaggacacctacgacgcccttcacatgcaggccctgccccctcgctctagaggatctggagcaacaaacttctcactactcaaacaagcaggtgacgtggaggagaatcccgggcctgggatccacatggccacttacgaggttctctgtgaggtggcgcggaaactgggcacggatgacagggaagtggtattgttcctcctaaacgtgttcatacctcaacccacactggcccaattaattggagctcttagagctttaaaggaggagggcaggttaacgtttcccctgttagcggaatgtctgtttcgtgcaggtcgcagagacctcttgcgcgacctgcttcacttagacccgcgttttttagagcgccacctagcgggcacaatgagttatttcagcccttatcagctcactgttctccacgtagacggggagctgtgtgcgagggatattaggtctttgatatttttaagcaaggacactatagggtctcgcagcacaccacagacattcttacactgggtgtactgtatggaaaacttagacctactgggtcccactgacgtggatgccctaatgtcaatgcttagatctttgtcaagagtagacctacagcgccaagtgcaaaccctaatgggccttcacctttccggcccatcacactcccaacactatcgccatacaccactcgagaccgatttctacgactacaaggacgacgatgacaagactagtggctccggcgagggcagaggaagtctactaacctgcggagatgtggaagaaaatcctggcccacatatgaccgagtacaagcccacggtgcgcctcgccacccgcgacgacgtccccagggccgtacgcaccctcgccgccgcgttcgccgactaccccgccacgcgccacaccgtcgatccggaccgccacatcgagcgggtcaccgagctgcaagaactcttcctcacgcgcgtcgggctcgacatcggcaaggtgtgggtcgcggacgacggcgccgcggtggcggtctggaccacgccggagagcgtcgaagcgggggcggtgttcgccgagatcggcccgcgcatggccgagttgagcggttcccggctggccgcgcagcaacagatggaaggcctcctggcgccgcaccggcccaaggagcccgcgtggttcctggccaccgtcggcgtctcgcccgaccaccagggcaagggtctgggcagcgccgtcgtgctccccggagtggaggcggccgagcgcgccggggtgcccgccttcctggagacctccgcgccccgcaacctccccttctacgagcggctcggcttcaccgtcaccgccgacgtcgaggtgcccgaaggaccgcgcacctggtgcatgacccgcaagcccggtgcctga

SEQ ID NO: 963 - DNA, 2595 bp, Artificial Sequence
  Synthetic Polynucleotides
atggccttaccagtgaccgccttgctcctgccgctggccttgctgctccacgccgccaggccgggcatgcggactgaagacctcccaaaggctgtggtgttcctggagcctcaatggtacagggtgctggagaaggacagtgtgactctgaagtgccagggagcctactcccctgaggacaattccacacagtggtttcacaatgagagcctcatctcaagccaggcctccagctacttcattgacgctgccacagtggacgacagtggagagtacaggtgccagacaaacctctccaccctcagtgacccggtgcagctagaagtccatatcggctggctgttgctccaggcccctcggtgggtgttcaaggaggaagaccctattcacctgaggtgtcacagctggaagaacactgctctgcataaggtcacatatttacagaatggcaaaggcaggaagtattttcatcataattctgacttctacattccaaaagccacactcaaagacagcggctcctacttctgcagggggcttgttgggagtaaaaatgtgtcttcagagactgtgaacatcaccatcactcaaggtttggcagtgtcaaccatctcatcattctttccacctggctaccaaacgcgtgagcagaaactgatctcggaagaggatctggcgaagcccaccacgacgccagcgccgcgaccaccaacaccggcgcccaccatcgcgtcgcagcccctgtccctgcgcccagaggcgtgccggccagcggcggggggcgcagtgcacacgagggggctggacttcgcctgtgacatctacatctgggcgcccttggccgggacttgtggggtccttctcctgtcactggttatcaccctttactgcgggcgcgccagagtgaagttcagcaggagcgcagacgcccccgcgtaccagcagggccagaaccagctctataacgagctgaatctaggacgaagagaggagtacgatgttttggacaagagacgtggccgggaccctgagatggggggaaagccgagaaggaagaaccctcaggaaggcctgtacaatgaactgcagaaagataagatggcggaggcctacagtgagattgggatgaaaggcgagcgccggaggggcaaggggcacgatggcctttaccagggtctcagtacagccaccaaggacacctacgacgcccttcacatgcaggccctgccccctcgctctagaggatctggagcaacaaacttctcactactcaaacaagcaggtgacgtggaggagaatcccgggcctgggatccacatggccacttacgaggttctctgtgaggtggcgcggaaactgggcacggatgacagggaagtggtattgttcctcctaaacgtgttcatacctcaacccacactggcccaattaattggagctcttagagctttaaaggaggagggcaggttaacgtttcccctgttagcggaatgtctgtttcgtgcaggtcgcagagacctcttgcgcgacctgcttcacttagacccgcgttttttagagcgccacctagcgggcacaatgagttatttcagcccttatcagctcactgttctccacgtagacggggagctgtgtgcgagggatattaggtctttgatatttttaagcaaggacactatagggtctcgcagcacaccacagacattcttacactgggtgtactgtatggaaaacttagacctactgggtcccactgacgtggatgccctaatgtcaatgcttagatctttgtcaagagtagacctacagcgccaagtgcaaaccctaatgggccttcacctttccggcccatcacactcccaacactatcgccatacaccactcgagaccgatttctacgactacaaggacgacgatgacaagactagtggctccggcgagggcagaggaagtctactaacctgcggagatgtggaagaaaatcctggcccacatatgaccgagtacaagcccacggtgcgcctcgccacccgcgacgacgtccccagggccgtacgcaccctcgccgccgcgttcgccgactaccccgccacgcgccacaccgtcgatccggaccgccacatcgagcgggtcaccgagctgcaagaactcttcctcacgcgcgtcgggctcgacatcggcaaggtgtgggtcgcggacgacggcgccgcggtggcggtctggaccacgccggagagcgtcgaagcgggggcggtgttcgccgagatcggcccgcgcatggccgagttgagcggttcccggctggccgcgcagcaacagatggaaggcctcctggcgccgcaccggcccaaggagcccgcgtggttcctggccaccgtcggcgtctcgcccgaccaccagggcaagggtctgggcagcgccgtcgtgctccccggagtggaggcggccgagcgcgccggggtgcccgccttcctggagacctccgcgccccgcaacctccccttctacgagcggctcggcttcaccgtcaccgccgacgtcgaggtgcccgaaggaccgcgcacctggtgcatgacccgcaagcccggtgcctga

SEQ ID NO: 964 - DNA, 2754 bp, Artificial Sequence
  Synthetic Polynucleotides
atggccttaccagtgaccgccttgctcctgccgctggccttgctgctccacgccgccaggccggacgagatcgtgctgacacagagccctgccaccctgtctctgagccctggcgaaagagccaccctgagctgtagagccagccagagcgtgtccagctacctggcctggtatcagcagaagcccggccaggctccccggctgctgatctacgatgccagcaatagagccaccggcatccccgccagattttccggctctggcagcggcaccgacttcaccctgaccatcagctccctggaacccgaggacttcgccgtgtactactgccagcagcggagcaactggcccatcacattcggccagggcacccggctggaaatcaaaggcggaggcggaagtggaggcggaggatctggcggcggaggctctgaagtgcagctggtggaatcaggcggcggactggtgcagcctggcagaagcctgagactgagctgtgccgccagcggcttcaccttcaacgactacgccatgcactgggtgcgccaggcccctggaaaaggactggaatgggtgtccacaatcagctggaacagcggcagcatcggctacgccgatagcgtgaagggccggttcaccatcagccgggacaacgccaagaagtccctgtacctccagatgaacagcctgcgggccgaggacacagccctgtactattgcgccaaggacatccagtacggcaactactactacggcatggacgtgtggggccagggaaccaccgtgaccgtgtcatctacgcgtgagcagaaactgatctcggaagaggatctggcgaagcccaccacgacgccagcgccgcgaccaccaacaccggcgcccaccatcgcgtcgcagcccctgtccctgcgcccagaggcgtgccggccagcggcggggggcgcagtgcacacgagggggctggacttcgcctgtgacatctacatctgggcgcccttggccgggacttgtggggtccttctcctgtcactggttatcaccctttactgcgggcgcgccagagtgaagttcagcaggagcgcagacgcccccgcgtaccagcagggccagaaccagctctataacgagctgaatctaggacgaagagaggagtacgatgttttggacaagagacgtggccgggaccctgagatggggggaaagccgagaaggaagaaccctcaggaaggcctgtacaatgaactgcagaaagataagatggcggaggcctacagtgagattgggatgaaaggcgagcgccggaggggcaaggggcacgatggcctttaccagggtctcagtacagccaccaaggacacctacgacgcccttcacatgcaggccctgccccctcgctctagaggatctggagcaacaaacttctcactactcaaacaagcaggtgacgtggaggagaatcccgggcctgggatccacatggccacttacgaggttctctgtgaggtggcgcggaaactgggcacggatgacagggaagtggtattgttcctcctaaacgtgttcatacctcaacccacactggcccaattaattggagctcttagagctttaaaggaggagggcaggttaacgtttcccctgttagcggaatgtctgtttcgtgcaggtcgcagagacctcttgcgcgacctgcttcacttagacccgcgttttttagagcgccacctagcgggcacaatgagttatttcagcccttatcagctcactgttctccacgtagacggggagctgtgtgcgagggatattaggtctttgatatttttaagcaaggacactatagggtctcgcagcacaccacagacattcttacactgggtgtactgtatggaaaacttagacctactgggtcccactgacgtggatgccctaatgtcaatgcttagatctttgtcaagagtagacctacagcgccaagtgcaaaccctaatgggccttcacctttccggcccatcacactcccaacactatcgccatacaccactcgagaccgatttctacgactacaaggacgacgatgacaagactagtggctccggcgagggcagaggaagtctactaacctgcggagatgtggaagaaaatcctggcccacatatgaccgagtacaagcccacggtgcgcctcgccacccgcgacgacgtccccagggccgtacgcaccctcgccgccgcgttcgccgactaccccgccacgcgccacaccgtcgatccggaccgccacatcgagcgggtcaccgagctgcaagaactcttcctcacgcgcgtcgggctcgacatcggcaaggtgtgggtcgcggacgacggcgccgcggtggcggtctggaccacgccggagagcgtcgaagcgggggcggtgttcgccgagatcggcccgcgcatggccgagttgagcggttcccggctggccgcgcagcaacagatggaaggcctcctggcgccgcaccggcccaaggagcccgcgtggttcctggccaccgtcggcgtctcgcccgaccaccagggcaagggtctgggcagcgccgtcgtgctccccggagtggaggcggccgagcgcgccggggtgcccgccttcctggagacctccgcgccccgcaacctccccttctacgagcggctcggcttcaccgtcaccgccgacgtcgaggtgcccgaaggaccgcgcacctggtgcatgacccgcaagcccggtgcctga

SEQ ID NO: 965 - DNA, 2760 bp, Artificial Sequence
  Synthetic Polynucleotides
atggccttaccagtgaccgccttgctcctgccgctggccttgctgctccacgccgccaggccggacatcgtgatgacccagacccccctgagcctgcctgtgacacctggcgagcctgccagcatctcctgcagaagcagcaagagcctgctgcacagcaacggcatcacctacctgtactggtatctgcagaaacccggccagagcccccaactgctgatctaccagatgagcaacctggtgtccggcgtgcccgacagattttctggcagcggctccggcaccgacttcaccctgaagatcagccgggtggaagccgaggacgtgggcgtgtactactgcgcccagaacctggaactgccctacacctttggcggcggaacaaaggtggaaatcaagcggggcggaggcggaagtggaggcggaggatctggcggcggaggctctcaggtgcaactggtgcagagcggagccgaagtgaaaaagcccggcagcagcgtgaaggtgtcctgcaaggccagcggctacgccttcagctactcctggatcaactgggtgcgccaggcccctggacagggcctggaatggatgggcagaatcttccccggcgacggcgacaccgactacaacggcaagttcaagggcagagtgaccatcaccgccgacaagagcaccagcaccgcctacatggaactgagcagcctgcggagcgaggataccgccgtgtactattgtgccagaaacgtgttcgacggctactggctggtgtactggggccagggaacacttgtgaccgtgtccagcacgcgtgagcagaaactgatctcggaagaggatctggcgaagcccaccacgacgccagcgccgcgaccaccaacaccggcgcccaccatcgcgtcgcagcccctgtccctgcgcccagaggcgtgccggccagcggcggggggcgcagtgcacacgagggggctggacttcgcctgtgacatctacatctgggcgcccttggccgggacttgtggggtccttctcctgtcactggttatcaccctttactgcgggcgcgccagagtgaagttcagcaggagcgcagacgcccccgcgtaccagcagggccagaaccagctctataacgagctgaatctaggacgaagagaggagtacgatgttttggacaagagacgtggccgggaccctgagatggggggaaagccgagaaggaagaaccctcaggaaggcctgtacaatgaactgcagaaagataagatggcggaggcctacagtgagattgggatgaaaggcgagcgccggaggggcaaggggcacgatggcctttaccagggtctcagtacagccaccaaggacacctacgacgcccttcacatgcaggccctgccccctcgctctagaggatctggagcaacaaacttctcactactcaaacaagcaggtgacgtggaggagaatcccgggcctgggatccacatggccacttacgaggttctctgtgaggtggcgcggaaactgggcacggatgacagggaagtggtattgttcctcctaaacgtgttcatacctcaacccacactggcccaattaattggagctcttagagctttaaaggaggagggcaggttaacgtttcccctgttagcggaatgtctgtttcgtgcaggtcgcagagacctcttgcgcgacctgcttcacttagacccgcgttttttagagcgccacctagcgggcacaatgagttatttcagcccttatcagctcactgttctccacgtagacggggagctgtgtgcgagggatattaggtctttgatatttttaagcaaggacactatagggtctcgcagcacaccacagacattcttacactgggtgtactgtatggaaaacttagacctactgggtcccactgacgtggatgccctaatgtcaatgcttagatctttgtcaagagtagacctacagcgccaagtgcaaaccctaatgggccttcacctttccggcccatcacactcccaacactatcgccatacaccactcgagaccgatttctacgactacaaggacgacgatgacaagactagtggctccggcgagggcagaggaagtctactaacctgcggagatgtggaagaaaatcctggcccacatatgaccgagtacaagcccacggtgcgcctcgccacccgcgacgacgtccccagggccgtacgcaccctcgccgccgcgttcgccgactaccccgccacgcgccacaccgtcgatccggaccgccacatcgagcgggtcaccgagctgcaagaactcttcctcacgcgcgtcgggctcgacatcggcaaggtgtgggtcgcggacgacggcgccgcggtggcggtctggaccacgccggagagcgtcgaagcgggggcggtgttcgccgagatcggcccgcgcatggccgagttgagcggttcccggctggccgcgcagcaacagatggaaggcctcctggcgccgcaccggcccaaggagcccgcgtggttcctggccaccgtcggcgtctcgcccgaccaccagggcaagggtctgggcagcgccgtcgtgctccccggagtggaggcggccgagcgcgccggggtgcccgccttcctggagacctccgcgccccgcaacctccccttctacgagcggctcggcttcaccgtcaccgccgacgtcgaggtgcccgaaggaccgcgcacctggtgcatgacccgcaagcccggtgcctga

SEQ ID NO: 966 - DNA, 2751 bp, Artificial Sequence
  Synthetic Polynucleotides
atggccttaccagtgaccgccttgctcctgccgctggccttgctgctccacgccgccaggccggacatcgtgctgacacagagccctgccatcatcacagcctctccaggcgagaaagtgaccatgacctgtagagccagcagcagcgtgaactacatggactggtatcagaagaagcccggcagcagccccaagccttggatctacgccacaagcaatctggcctctggcgtgcccagcagattttctggctctggcagcggcaccacctacagcatgacaatctctagcctggaagccgaggacgccgccacctactattgtcagcagtggtccttcaatcctcctaccttcggcggaggcaccaagctggaaatcaaaagaggcggaggcggaagtggaggcggaggatctggcggcggaggctctgaagttcagcttcagcagagcggagccgagctgaagaaacctggcgcttctgtgaaggtgtcctgcaaggccagcggctacacctttaccagctacaacatgcactgggtcaagcagaccccaggccagggactcgaatggatcggagccatctatcccggcaacggcgacacctcctacaaccagaagttcaagggcaagaccacactgaccgccgacaagagcagctccaccgcctacatggaactgagcagcctgagatccgaggataccgccgtgtactactgcgccagaagcaactactacggcagctcctactggttcttcgacgtgtggggcaccggcacaaccgtgacagtttcttctacgcgtgagcagaaactgatctcggaagaggatctggcgaagcccaccacgacgccagcgccgcgaccaccaacaccggcgcccaccatcgcgtcgcagcccctgtccctgcgcccagaggcgtgccggccagcggcggggggcgcagtgcacacgagggggctggacttcgcctgtgacatctacatctgggcgcccttggccgggacttgtggggtccttctcctgtcactggttatcaccctttactgcgggcgcgccagagtgaagttcagcaggagcgcagacgcccccgcgtaccagcagggccagaaccagctctataacgagctgaatctaggacgaagagaggagtacgatgttttggacaagagacgtggccgggaccctgagatggggggaaagccgagaaggaagaaccctcaggaaggcctgtacaatgaactgcagaaagataagatggcggaggcctacagtgagattgggatgaaaggcgagcgccggaggggcaaggggcacgatggcctttaccagggtctcagtacagccaccaaggacacctacgacgcccttcacatgcaggccctgccccctcgctctagaggatctggagcaacaaacttctcactactcaaacaagcaggtgacgtggaggagaatcccgggcctgggatccacatggccacttacgaggttctctgtgaggtggcgcggaaactgggcacggatgacagggaagtggtattgttcctcctaaacgtgttcatacctcaacccacactggcccaattaattggagctcttagagctttaaaggaggagggcaggttaacgtttcccctgttagcggaatgtctgtttcgtgcaggtcgcagagacctcttgcgcgacctgcttcacttagacccgcgttttttagagcgccacctagcgggcacaatgagttatttcagcccttatcagctcactgttctccacgtagacggggagctgtgtgcgagggatattaggtctttgatatttttaagcaaggacactatagggtctcgcagcacaccacagacattcttacactgggtgtactgtatggaaaacttagacctactgggtcccactgacgtggatgccctaatgtcaatgcttagatctttgtcaagagtagacctacagcgccaagtgcaaaccctaatgggccttcacctttccggcccatcacactcccaacactatcgccatacaccactcgagaccgatttctacgactacaaggacgacgatgacaagactagtggctccggcgagggcagaggaagtctactaacctgcggagatgtggaagaaaatcctggcccacatatgaccgagtacaagcccacggtgcgcctcgccacccgcgacgacgtccccagggccgtacgcaccctcgccgccgcgttcgccgactaccccgccacgcgccacaccgtcgatccggaccgccacatcgagcgggtcaccgagctgcaagaactcttcctcacgcgcgtcgggctcgacatcggcaaggtgtgggtcgcggacgacggcgccgcggtggcggtctggaccacgccggagagcgtcgaagcgggggcggtgttcgccgagatcggcccgcgcatggccgagttgagcggttcccggctggccgcgcagcaacagatggaaggcctcctggcgccgcaccggcccaaggagcccgcgtggttcctggccaccgtcggcgtctcgcccgaccaccagggcaagggtctgggcagcgccgtcgtgctccccggagtggaggcggccgagcgcgccggggtgcccgccttcctggagacctccgcgccccgcaacctccccttctacgagcggctcggcttcaccgtcaccgccgacgtcgaggtgcccgaaggaccgcgcacctggtgcatgacccgcaagcccggtgcctga

SEQ ID NO: 967 - DNA, 2760 bp, Artificial Sequence
  Synthetic Polynucleotides
atggccttaccagtgaccgccttgctcctgccgctggccttgctgctccacgccgccaggccggagatcgtgctgacacagtctcccgccacactgtcactgtctccaggcgaaagagccacactgagctgtagagccagccagagcgtgtcctcttacctggcctggtatcagcagaagcctggacaggctccccggctgctgatctacgatgccagcaatagagccacaggcatccccgccagattttctggctctggcagcggcaccgatttcaccctgaccataagcagcctggaacctgaggacttcgccgtgtactactgccagcagagaagcgactggcccctgacatttggcggcggaacaaaggtggaaatcaaaggcggaggcggaagtggaggcggaggatctggcggcggaggctctgaagtgcaactggttcaatcaggtggcggcctggttcaccctggcggatctctgagactgtcttgtaccggcagcggcttcaccttcagctaccacgccatgcactgggtccgacaggcacctggaaaaggactggaatgggtgtccatcatcggcacaggcggcgtgacctactacgccgattctgtgaagggcagattcaccatcagccgggacaacgtgaagaacagcctgtacctccagatgaactccctgagagccgaggatatggccgtgtattattgcgccagagactactacggcgctggcagcttttacgacggcctgtacggaatggatgtgtggggccagggaaccaccgtgactgtctcttctacgcgtgagcagaaactgatctcggaagaggatctggcgaagcccaccacgacgccagcgccgcgaccaccaacaccggcgcccaccatcgcgtcgcagcccctgtccctgcgcccagaggcgtgccggccagcggcggggggcgcagtgcacacgagggggctggacttcgcctgtgacatctacatctgggcgcccttggccgggacttgtggggtccttctcctgtcactggttatcaccctttactgcgggcgcgccagagtgaagttcagcaggagcgcagacgcccccgcgtaccagcagggccagaaccagctctataacgagctgaatctaggacgaagagaggagtacgatgttttggacaagagacgtggccgggaccctgagatggggggaaagccgagaaggaagaaccctcaggaaggcctgtacaatgaactgcagaaagataagatggcggaggcctacagtgagattgggatgaaaggcgagcgccggaggggcaaggggcacgatggcctttaccagggtctcagtacagccaccaaggacacctacgacgcccttcacatgcaggccctgccccctcgctctagaggatctggagcaacaaacttctcactactcaaacaagcaggtgacgtggaggagaatcccgggcctgggatccacatggccacttacgaggttctctgtgaggtggcgcggaaactgggcacggatgacagggaagtggtattgttcctcctaaacgtgttcatacctcaacccacactggcccaattaattggagctcttagagctttaaaggaggagggcaggttaacgtttcccctgttagcggaatgtctgtttcgtgcaggtcgcagagacctcttgcgcgacctgcttcacttagacccgcgttttttagagcgccacctagcgggcacaatgagttatttcagcccttatcagctcactgttctccacgtagacggggagctgtgtgcgagggatattaggtctttgatatttttaagcaaggacactatagggtctcgcagcacaccacagacattcttacactgggtgtactgtatggaaaacttagacctactgggtcccactgacgtggatgccctaatgtcaatgcttagatctttgtcaagagtagacctacagcgccaagtgcaaaccctaatgggccttcacctttccggcccatcacactcccaacactatcgccatacaccactcgagaccgatttctacgactacaaggacgacgatgacaagactagtggctccggcgagggcagaggaagtctactaacctgcggagatgtggaagaaaatcctggcccacatatgaccgagtacaagcccacggtgcgcctcgccacccgcgacgacgtccccagggccgtacgcaccctcgccgccgcgttcgccgactaccccgccacgcgccacaccgtcgatccggaccgccacatcgagcgggtcaccgagctgcaagaactcttcctcacgcgcgtcgggctcgacatcggcaaggtgtgggtcgcggacgacggcgccgcggtggcggtctggaccacgccggagagcgtcgaagcgggggcggtgttcgccgagatcggcccgcgcatggccgagttgagcggttcccggctggccgcgcagcaacagatggaaggcctcctggcgccgcaccggcccaaggagcccgcgtggttcctggccaccgtcggcgtctcgcccgaccaccagggcaagggtctgggcagcgccgtcgtgctccccggagtggaggcggccgagcgcgccggggtgcccgccttcctggagacctccgcgccccgcaacctccccttctacgagcggctcggcttcaccgtcaccgccgacgtcgaggtgcccgaaggaccgcgcacctggtgcatgacccgcaagcccggtgcctga

SEQ ID NO: 968 - DNA, 2754 bp, Artificial Sequence
  Synthetic Polynucleotides
atggccttaccagtgaccgccttgctcctgccgctggccttgctgctccacgccgccaggccggagatcgtgctgacacagtctcccgccacactgtcactgtctccaggcgaaagagccacactgagctgtagagccagccagagcgtgtcctcttacctggcctggtatcagcagaagcctggacaggctccccggctgctgatctacgatgccagcaatagagccacaggcatccccgccagattttctggctctggcagcggcaccgatttcaccctgaccataagcagcctggaacctgaggacttcgccgtgtactactgccagcagagaagcaactggcccctgacatttggcggaggcaccaaggtggaaatcaaaggcggaggcggaagtggaggcggaggatctggcggcggaggctctgctgtgcagctcgttgagtctggcggaggacttgttcagcctggcagatccctgagactgtcttgtgccgccagcggcttcaccttcggcgattacacaatgcactgggtccgacaggcccctggcaaaggacttgaatgggtgtccggcatctcctggaacagcggctctatcggctacgccgattccgtgaagggcagattcaccatcagccgggacaacgccaagaacagcctgtacctccagatgaactccctgagagccgaggacacagccctgtactattgcaccaaggacaaccagtacggctccggcagcacatacggacttggagtttggggccagggcaccctggttacagtctcttctacgcgtgagcagaaactgatctcggaagaggatctggcgaagcccaccacgacgccagcgccgcgaccaccaacaccggcgcccaccatcgcgtcgcagcccctgtccctgcgcccagaggcgtgccggccagcggcggggggcgcagtgcacacgagggggctggacttcgcctgtgacatctacatctgggcgcccttggccgggacttgtggggtccttctcctgtcactggttatcaccctttactgcgggcgcgccagagtgaagttcagcaggagcgcagacgcccccgcgtaccagcagggccagaaccagctctataacgagctgaatctaggacgaagagaggagtacgatgttttggacaagagacgtggccgggaccctgagatggggggaaagccgagaaggaagaaccctcaggaaggcctgtacaatgaactgcagaaagataagatggcggaggcctacagtgagattgggatgaaaggcgagcgccggaggggcaaggggcacgatggcctttaccagggtctcagtacagccaccaaggacacctacgacgcccttcacatgcaggccctgccccctcgctctagaggatctggagcaacaaacttctcactactcaaacaagcaggtgacgtggaggagaatcccgggcctgggatccacatggccacttacgaggttctctgtgaggtggcgcggaaactgggcacggatgacagggaagtggtattgttcctcctaaacgtgttcatacctcaacccacactggcccaattaattggagctcttagagctttaaaggaggagggcaggttaacgtttcccctgttagcggaatgtctgtttcgtgcaggtcgcagagacctcttgcgcgacctgcttcacttagacccgcgttttttagagcgccacctagcgggcacaatgagttatttcagcccttatcagctcactgttctccacgtagacggggagctgtgtgcgagggatattaggtctttgatatttttaagcaaggacactatagggtctcgcagcacaccacagacattcttacactgggtgtactgtatggaaaacttagacctactgggtcccactgacgtggatgccctaatgtcaatgcttagatctttgtcaagagtagacctacagcgccaagtgcaaaccctaatgggccttcacctttccggcccatcacactcccaacactatcgccatacaccactcgagaccgatttctacgactacaaggacgacgatgacaagactagtggctccggcgagggcagaggaagtctactaacctgcggagatgtggaagaaaatcctggcccacatatgaccgagtacaagcccacggtgcgcctcgccacccgcgacgacgtccccagggccgtacgcaccctcgccgccgcgttcgccgactaccccgccacgcgccacaccgtcgatccggaccgccacatcgagcgggtcaccgagctgcaagaactcttcctcacgcgcgtcgggctcgacatcggcaaggtgtgggtcgcggacgacggcgccgcggtggcggtctggaccacgccggagagcgtcgaagcgggggcggtgttcgccgagatcggcccgcgcatggccgagttgagcggttcccggctggccgcgcagcaacagatggaaggcctcctggcgccgcaccggcccaaggagcccgcgtggttcctggccaccgtcggcgtctcgcccgaccaccagggcaagggtctgggcagcgccgtcgtgctccccggagtggaggcggccgagcgcgccggggtgcccgccttcctggagacctccgcgccccgcaacctccccttctacgagcggctcggcttcaccgtcaccgccgacgtcgaggtgcccgaaggaccgcgcacctggtgcatgacccgcaagcccggtgcctga

SEQ ID NO: 969 - DNA, 2751 bp, Artificial Sequence
  Synthetic Polynucleotides
atggccttaccagtgaccgccttgctcctgccgctggccttgctgctccacgccgccaggccggacatccagatgacacagagccctagcagcctgtctgccagcgtgggagacagagtgaccatcacctgtagagccagcagcagcgtgtcctacatgcactggtatcagcagaagcccggcaaggcccctaagcctctgatctacgcccctagcaatctggcctctggcgtgccaagcagattttctggcagcggctctggcaccgacttcaccctgacaatatccagcctccagcctgaggacttcgccacctactactgccagcagtggtccttcaatcctcctaccttcggccagggcaccaaggtggaaatcaaaagaggcggaggcggaagtggaggcggaggatctggcggcggaggctctgaagtgcagcttgttgaatctggcggcggactggttcagcctggcggatctctgagactgtcttgtgccgccagcggctacaccttcaccagctacaatatgcactgggtccgacaggcccctggcaaaggacttgaatgggtcggagccatctatcccggcaacggcgacacctcctacaaccagaagttcaagggcagattcaccatcagcgtggacaagagcaagaacaccctgtacctccagatgaactccctgagagccgaggacaccgccgtgtactattgtgccagagtggtgtactacagcaacagctactggtacttcgacgtgtggggccagggaaccctggtcacagtttcttctacgcgtgagcagaaactgatctcggaagaggatctggcgaagcccaccacgacgccagcgccgcgaccaccaacaccggcgcccaccatcgcgtcgcagcccctgtccctgcgcccagaggcgtgccggccagcggcggggggcgcagtgcacacgagggggctggacttcgcctgtgacatctacatctgggcgcccttggccgggacttgtggggtccttctcctgtcactggttatcaccctttactgcgggcgcgccagagtgaagttcagcaggagcgcagacgcccccgcgtaccagcagggccagaaccagctctataacgagctgaatctaggacgaagagaggagtacgatgttttggacaagagacgtggccgggaccctgagatggggggaaagccgagaaggaagaaccctcaggaaggcctgtacaatgaactgcagaaagataagatggcggaggcctacagtgagattgggatgaaaggcgagcgccggaggggcaaggggcacgatggcctttaccagggtctcagtacagccaccaaggacacctacgacgcccttcacatgcaggccctgccccctcgctctagaggatctggagcaacaaacttctcactactcaaacaagcaggtgacgtggaggagaatcccgggcctgggatccacatggccacttacgaggttctctgtgaggtggcgcggaaactgggcacggatgacagggaagtggtattgttcctcctaaacgtgttcatacctcaacccacactggcccaattaattggagctcttagagctttaaaggaggagggcaggttaacgtttcccctgttagcggaatgtctgtttcgtgcaggtcgcagagacctcttgcgcgacctgcttcacttagacccgcgttttttagagcgccacctagcgggcacaatgagttatttcagcccttatcagctcactgttctccacgtagacggggagctgtgtgcgagggatattaggtctttgatatttttaagcaaggacactatagggtctcgcagcacaccacagacattcttacactgggtgtactgtatggaaaacttagacctactgggtcccactgacgtggatgccctaatgtcaatgcttagatctttgtcaagagtagacctacagcgccaagtgcaaaccctaatgggccttcacctttccggcccatcacactcccaacactatcgccatacaccactcgagaccgatttctacgactacaaggacgacgatgacaagactagtggctccggcgagggcagaggaagtctactaacctgcggagatgtggaagaaaatcctggcccacatatgaccgagtacaagcccacggtgcgcctcgccacccgcgacgacgtccccagggccgtacgcaccctcgccgccgcgttcgccgactaccccgccacgcgccacaccgtcgatccggaccgccacatcgagcgggtcaccgagctgcaagaactcttcctcacgcgcgtcgggctcgacatcggcaaggtgtgggtcgcggacgacggcgccgcggtggcggtctggaccacgccggagagcgtcgaagcgggggcggtgttcgccgagatcggcccgcgcatggccgagttgagcggttcccggctggccgcgcagcaacagatggaaggcctcctggcgccgcaccggcccaaggagcccgcgtggttcctggccaccgtcggcgtctcgcccgaccaccagggcaagggtctgggcagcgccgtcgtgctccccggagtggaggcggccgagcgcgccggggtgcccgccttcctggagacctccgcgccccgcaacctccccttctacgagcggctcggcttcaccgtcaccgccgacgtcgaggtgcccgaaggaccgcgcacctggtgcatgacccgcaagcccggtgcctga

SEQ ID NO: 970 - DNA, 2745 bp, Artificial Sequence
  Synthetic Polynucleotides
atggccttaccagtgaccgccttgctcctgccgctggccttgctgctccacgccgccaggccggacatccagctcacacagagcccttctagcctgtctgccagcgtgggcgatagagtgaccatgacctgtagagccagcagcagcgtgtcctacatccactggttccagcagaagcctggcaaggcccctaagccttggatctacgccaccagcaatctggcctctggcgtgccagtcagattttctggcagcggctctggcaccgactacaccttcacaatatccagcctccagcctgaggacattgccacctactactgccagcagtggacctccaatcctcctacctttggcggaggcaccaagctggaaatcaaaggcggaggcggaagtggaggcggaggatctggcggcggaggctctcaggttcagctccagcagtctggggccgaagtgaagaaacctggcagctccgtgaaagtgtcctgcaaggccagcggctacacctttaccagctacaacatgcactgggtcaagcaggcccctggacagggactcgaatggatcggagccatctatcccggcaacggcgacacctcctacaaccagaagttcaagggcaaagccacactgaccgccgacgagagcacaaacaccgcctacatggaactgagcagcctgagaagcgaggacaccgccttctactactgtgcccggtctacctactacggcggcgactggtactttgacgtgtggggccagggaaccaccgtgacagtttcttctacgcgtgagcagaaactgatctcggaagaggatctggcgaagcccaccacgacgccagcgccgcgaccaccaacaccggcgcccaccatcgcgtcgcagcccctgtccctgcgcccagaggcgtgccggccagcggcggggggcgcagtgcacacgagggggctggacttcgcctgtgacatctacatctgggcgcccttggccgggacttgtggggtccttctcctgtcactggttatcaccctttactgcgggcgcgccagagtgaagttcagcaggagcgcagacgcccccgcgtaccagcagggccagaaccagctctataacgagctgaatctaggacgaagagaggagtacgatgttttggacaagagacgtggccgggaccctgagatggggggaaagccgagaaggaagaaccctcaggaaggcctgtacaatgaactgcagaaagataagatggcggaggcctacagtgagattgggatgaaaggcgagcgccggaggggcaaggggcacgatggcctttaccagggtctcagtacagccaccaaggacacctacgacgcccttcacatgcaggccctgccccctcgctctagaggatctggagcaacaaacttctcactactcaaacaagcaggtgacgtggaggagaatcccgggcctgggatccacatggccacttacgaggttctctgtgaggtggcgcggaaactgggcacggatgacagggaagtggtattgttcctcctaaacgtgttcatacctcaacccacactggcccaattaattggagctcttagagctttaaaggaggagggcaggttaacgtttcccctgttagcggaatgtctgtttcgtgcaggtcgcagagacctcttgcgcgacctgcttcacttagacccgcgttttttagagcgccacctagcgggcacaatgagttatttcagcccttatcagctcactgttctccacgtagacggggagctgtgtgcgagggatattaggtctttgatatttttaagcaaggacactatagggtctcgcagcacaccacagacattcttacactgggtgtactgtatggaaaacttagacctactgggtcccactgacgtggatgccctaatgtcaatgcttagatctttgtcaagagtagacctacagcgccaagtgcaaaccctaatgggccttcacctttccggcccatcacactcccaacactatcgccatacaccactcgagaccgatttctacgactacaaggacgacgatgacaagactagtggctccggcgagggcagaggaagtctactaacctgcggagatgtggaagaaaatcctggcccacatatgaccgagtacaagcccacggtgcgcctcgccacccgcgacgacgtccccagggccgtacgcaccctcgccgccgcgttcgccgactaccccgccacgcgccacaccgtcgatccggaccgccacatcgagcgggtcaccgagctgcaagaactcttcctcacgcgcgtcgggctcgacatcggcaaggtgtgggtcgcggacgacggcgccgcggtggcggtctggaccacgccggagagcgtcgaagcgggggcggtgttcgccgagatcggcccgcgcatggccgagttgagcggttcccggctggccgcgcagcaacagatggaaggcctcctggcgccgcaccggcccaaggagcccgcgtggttcctggccaccgtcggcgtctcgcccgaccaccagggcaagggtctgggcagcgccgtcgtgctccccggagtggaggcggccgagcgcgccggggtgcccgccttcctggagacctccgcgccccgcaacctccccttctacgagcggctcggcttcaccgtcaccgccgacgtcgaggtgcccgaaggaccgcgcacctggtgcatgacccgcaagcccggtgcctga

SEQ ID NO: 971 - DNA, 2781 bp, Artificial Sequence
  Synthetic Polynucleotides
atggccttaccagtgaccgccttgctcctgccgctggccttgctgctccacgccgccaggccgagcaccgtgatgacacagagccctgatagcctggccgtgtctctgggagagagagccaccatcaactgcaagagcagccagagcaacagcaacgacgtggcctggtatcagcagaagccaggacagagccccaaggtgctgatctacttcgccagcaacagatacagcggcgtgcccgatagattttccggcagcggctacggcaccgacttcacccttacaatcagcagcctccaggccgaggatgtggccgtgtacttctgtcagcaagactacagcagccctctgacctttggagccggcaccaagctggaactgaaaagagctgacgctggcggaggcggaagtggaggcggaggatctggcggcggaggctctcagattcagctggtgcagtctggcagcgagctgaagaaacctggggcctctgtgaaggtgtcctgcaaggcttccggctacacctttaccaacttcggcgtgaactgggtccgacaggcccctggaaaaggactggaatggatgggctggatcaacacctacaccggcgagcctagctacgcccagggctttacaggcagattcgtgttcagcctggacgcctctgtgtctaccgcctacctccagatcagctccctgaaagccgaggacaccgccacctatttctgcaccagacggaccaactactacgggacctcctactactacgctatggactactggggccagggcaccaccgtgacagtgtctagcgccaagacaaccacgcgtgagcagaaactgatctcggaagaggatctggcgaagcccaccacgacgccagcgccgcgaccaccaacaccggcgcccaccatcgcgtcgcagcccctgtccctgcgcccagaggcgtgccggccagcggcggggggcgcagtgcacacgagggggctggacttcgcctgtgacatctacatctgggcgcccttggccgggacttgtggggtccttctcctgtcactggttatcaccctttactgcgggcgcgccagagtgaagttcagcaggagcgcagacgcccccgcgtaccagcagggccagaaccagctctataacgagctgaatctaggacgaagagaggagtacgatgttttggacaagagacgtggccgggaccctgagatggggggaaagccgagaaggaagaaccctcaggaaggcctgtacaatgaactgcagaaagataagatggcggaggcctacagtgagattgggatgaaaggcgagcgccggaggggcaaggggcacgatggcctttaccagggtctcagtacagccaccaaggacacctacgacgcccttcacatgcaggccctgccccctcgctctagaggatctggagcaacaaacttctcactactcaaacaagcaggtgacgtggaggagaatcccgggcctgggatccacatggccacttacgaggttctctgtgaggtggcgcggaaactgggcacggatgacagggaagtggtattgttcctcctaaacgtgttcatacctcaacccacactggcccaattaattggagctcttagagctttaaaggaggagggcaggttaacgtttcccctgttagcggaatgtctgtttcgtgcaggtcgcagagacctcttgcgcgacctgcttcacttagacccgcgttttttagagcgccacctagcgggcacaatgagttatttcagcccttatcagctcactgttctccacgtagacggggagctgtgtgcgagggatattaggtctttgatatttttaagcaaggacactatagggtctcgcagcacaccacagacattcttacactgggtgtactgtatggaaaacttagacctactgggtcccactgacgtggatgccctaatgtcaatgcttagatctttgtcaagagtagacctacagcgccaagtgcaaaccctaatgggccttcacctttccggcccatcacactcccaacactatcgccatacaccactcgagaccgatttctacgactacaaggacgacgatgacaagactagtggctccggcgagggcagaggaagtctactaacctgcggagatgtggaagaaaatcctggcccacatatgaccgagtacaagcccacggtgcgcctcgccacccgcgacgacgtccccagggccgtacgcaccctcgccgccgcgttcgccgactaccccgccacgcgccacaccgtcgatccggaccgccacatcgagcgggtcaccgagctgcaagaactcttcctcacgcgcgtcgggctcgacatcggcaaggtgtgggtcgcggacgacggcgccgcggtggcggtctggaccacgccggagagcgtcgaagcgggggcggtgttcgccgagatcggcccgcgcatggccgagttgagcggttcccggctggccgcgcagcaacagatggaaggcctcctggcgccgcaccggcccaaggagcccgcgtggttcctggccaccgtcggcgtctcgcccgaccaccagggcaagggtctgggcagcgccgtcgtgctccccggagtggaggcggccgagcgcgccggggtgcccgccttcctggagacctccgcgccccgcaacctccccttctacgagcggctcggcttcaccgtcaccgccgacgtcgaggtgcccgaaggaccgcgcacctggtgcatgacccgcaagcccggtgcctga

SEQ ID NO: 972 - DNA, 2757 bp, Artificial Sequence
  Synthetic Polynucleotides
atggccttaccagtgaccgccttgctcctgccgctggccttgctgctccacgccgccaggccgcagatcgtgctgtctcagtctcctgccatcctgagcgcttccccaggcgagaaagtgaccatgacctgtagagccagcagcagcgtgtcctacatgcactggtatcagcagaagcccggcagcagccctaagccttggatctacgccaccagcaatctggcctctggcgtgccagccagattttctggctctggcagcggcaccagctacagcttcacaatcagcagagtggaagccgaggacgccgccacctactattgtcagcagtggaccttcaatcctcctaccttcggcggaggcacccggctggaaatcaaaagaacagtggctgctggcggaggcggaagtggaggcggaggatctggcggcggaggctctcaggcttatctgcaacagagcggagccgaactcgtcagacctggcgcttctgtgaagatgagctgcaaggccagcggctacaccttcaccagctataatatgcactgggtcaagcagacccctcggcagggactcgaatggatcggcggaatctatcccggcaacggcgacacctcctacaaccagaagttcaagggcaaagccacactgaccgtgggcaagagcagcagcaccgcctatatgcagctcagcagcctgaccagcgaggacagcgccgtgtacttctgcgccagatacgactacaactacgctatggactactggggccagggcaccagcgtgacagttagctctgccagcacgcgtgagcagaaactgatctcggaagaggatctggcgaagcccaccacgacgccagcgccgcgaccaccaacaccggcgcccaccatcgcgtcgcagcccctgtccctgcgcccagaggcgtgccggccagcggcggggggcgcagtgcacacgagggggctggacttcgcctgtgacatctacatctgggcgcccttggccgggacttgtggggtccttctcctgtcactggttatcaccctttactgcgggcgcgccagagtgaagttcagcaggagcgcagacgcccccgcgtaccagcagggccagaaccagctctataacgagctgaatctaggacgaagagaggagtacgatgttttggacaagagacgtggccgggaccctgagatggggggaaagccgagaaggaagaaccctcaggaaggcctgtacaatgaactgcagaaagataagatggcggaggcctacagtgagattgggatgaaaggcgagcgccggaggggcaaggggcacgatggcctttaccagggtctcagtacagccaccaaggacacctacgacgcccttcacatgcaggccctgccccctcgctctagaggatctggagcaacaaacttctcactactcaaacaagcaggtgacgtggaggagaatcccgggcctgggatccacatggccacttacgaggttctctgtgaggtggcgcggaaactgggcacggatgacagggaagtggtattgttcctcctaaacgtgttcatacctcaacccacactggcccaattaattggagctcttagagctttaaaggaggagggcaggttaacgtttcccctgttagcggaatgtctgtttcgtgcaggtcgcagagacctcttgcgcgacctgcttcacttagacccgcgttttttagagcgccacctagcgggcacaatgagttatttcagcccttatcagctcactgttctccacgtagacggggagctgtgtgcgagggatattaggtctttgatatttttaagcaaggacactatagggtctcgcagcacaccacagacattcttacactgggtgtactgtatggaaaacttagacctactgggtcccactgacgtggatgccctaatgtcaatgcttagatctttgtcaagagtagacctacagcgccaagtgcaaaccctaatgggccttcacctttccggcccatcacactcccaacactatcgccatacaccactcgagaccgatttctacgactacaaggacgacgatgacaagactagtggctccggcgagggcagaggaagtctactaacctgcggagatgtggaagaaaatcctggcccacatatgaccgagtacaagcccacggtgcgcctcgccacccgcgacgacgtccccagggccgtacgcaccctcgccgccgcgttcgccgactaccccgccacgcgccacaccgtcgatccggaccgccacatcgagcgggtcaccgagctgcaagaactcttcctcacgcgcgtcgggctcgacatcggcaaggtgtgggtcgcggacgacggcgccgcggtggcggtctggaccacgccggagagcgtcgaagcgggggcggtgttcgccgagatcggcccgcgcatggccgagttgagcggttcccggctggccgcgcagcaacagatggaaggcctcctggcgccgcaccggcccaaggagcccgcgtggttcctggccaccgtcggcgtctcgcccgaccaccagggcaagggtctgggcagcgccgtcgtgctccccggagtggaggcggccgagcgcgccggggtgcccgccttcctggagacctccgcgccccgcaacctccccttctacgagcggctcggcttcaccgtcaccgccgacgtcgaggtgcccgaaggaccgcgcacctggtgcatgacccgcaagcccggtgcctga

SEQ ID NO: 973 - DNA, 2751 bp, Artificial Sequence; identical to SEQ ID NO: 969
  Synthetic Polynucleotides

SEQ ID NO: 974 - DNA, 2748 bp, Artificial Sequence
  Synthetic Polynucleotides
atggccttaccagtgaccgccttgctcctgccgctggccttgctgctccacgccgccaggccggagatcgtgctgacacagagcccttctagcctgtctgccagcgtgggcgacagagtgaccatcacatgtagagccagcagcagcctgagcttcatgcactggtatcagcagaagcccggcaaggcccctaagccttggatctacgccaccagcaatctggcctctggcgtgccaagcagattttctggcagcggctctggcaccgactacaccctgacaatatccagcctccagcctgaggacttcgccacctacttttgccaccagtggtccagcaatcctctgacctttggcggaggcaccaaggtggaaatcaaaggcggaggcggaagtggaggcggaggatctggcggcggaggctctcaggtgcaactggtgcagtctggggccgaagtgaagaaacctggggcctctgtgaaggtgtcctgcaaggcttccggctacacctttaccagctacaatatgcactgggtccgacaggctcccggccagagacttgaatggatcggagccatctatcccggcaacggcgacacctcctacaaccagaaattcaagggccgcgtgaccgtgaccagagacacatctgccaacaccgcctacatggaactgtctagcctgaagtccgaggacaccgccgtgtactactgtgccagaagccactacggcagcaactacgtggactacttcgactactggggccagggcacactggtcacagtctcttctacgcgtgagcagaaactgatctcggaagaggatctggcgaagcccaccacgacgccagcgccgcgaccaccaacaccggcgcccaccatcgcgtcgcagcccctgtccctgcgcccagaggcgtgccggccagcggcggggggcgcagtgcacacgagggggctggacttcgcctgtgacatctacatctgggcgcccttggccgggacttgtggggtccttctcctgtcactggttatcaccctttactgcgggcgcgccagagtgaagttcagcaggagcgcagacgcccccgcgtaccagcagggccagaaccagctctataacgagctgaatctaggacgaagagaggagtacgatgttttggacaagagacgtggccgggaccctgagatggggggaaagccgagaaggaagaaccctcaggaaggcctgtacaatgaactgcagaaagataagatggcggaggcctacagtgagattgggatgaaaggcgagcgccggaggggcaaggggcacgatggcctttaccagggtctcagtacagccaccaaggacacctacgacgcccttcacatgcaggccctgccccctcgctctagaggatctggagcaacaaacttctcactactcaaacaagcaggtgacgtggaggagaatcccgggcctgggatccacatggccacttacgaggttctctgtgaggtggcgcggaaactgggcacggatgacagggaagtggtattgttcctcctaaacgtgttcatacctcaacccacactggcccaattaattggagctcttagagctttaaaggaggagggcaggttaacgtttcccctgttagcggaatgtctgtttcgtgcaggtcgcagagacctcttgcgcgacctgcttcacttagacccgcgttttttagagcgccacctagcgggcacaatgagttatttcagcccttatcagctcactgttctccacgtagacggggagctgtgtgcgagggatattaggtctttgatatttttaagcaaggacactatagggtctcgcagcacaccacagacattcttacactgggtgtactgtatggaaaacttagacctactgggtcccactgacgtggatgccctaatgtcaatgcttagatctttgtcaagagtagacctacagcgccaagtgcaaaccctaatgggccttcacctttccggcccatcacactcccaacactatcgccatacaccactcgagaccgatttctacgactacaaggacgacgatgacaagactagtggctccggcgagggcagaggaagtctactaacctgcggagatgtggaagaaaatcctggcccacatatgaccgagtacaagcccacggtgcgcctcgccacccgcgacgacgtccccagggccgtacgcaccctcgccgccgcgttcgccgactaccccgccacgcgccacaccgtcgatccggaccgccacatcgagcgggtcaccgagctgcaagaactcttcctcacgcgcgtcgggctcgacatcggcaaggtgtgggtcgcggacgacggcgccgcggtggcggtctggaccacgccggagagcgtcgaagcgggggcggtgttcgccgagatcggcccgcgcatggccgagttgagcggttcccggctggccgcgcagcaacagatggaaggcctcctggcgccgcaccggcccaaggagcccgcgtggttcctggccaccgtcggcgtctcgcccgaccaccagggcaagggtctgggcagcgccgtcgtgctccccggagtggaggcggccgagcgcgccggggtgcccgccttcctggagacctccgcgccccgcaacctccccttctacgagcggctcggcttcaccgtcaccgccgacgtcgaggtgcccgaaggaccgcgcacctggtgcatgacccgcaagcccggtgcctga

SEQ ID NO: 975 - DNA, 2754 bp, Artificial Sequence
  Synthetic Polynucleotides
atggccttaccagtgaccgccttgctcctgccgctggccttgctgctccacgccgccaggccggacgagatcgtgctgacacagagccctgccaccctgtctctgagccctggcgaaagagccaccctgagctgtagagccagccagagcgtgtccagctacctggcctggtatcagcagaagcccggccaggctccccggctgctgatctacgatgccagcaatagagccaccggcatccccgccagattttccggctctggcagcggcaccgacttcaccctgaccatcagctccctggaacccgaggacttcgccgtgtactactgccagcagcggagcaactggcccatcacattcggccagggcacccggctggaaatcaaaggcggaggcggaagtggaggcggaggatctggcggcggaggctctgaggtgcagcttgttgagtctggcggaggactggtgcagcccgatagaagcctgagactgtcttgtgccgccagcggcttcaccttccacgattatgccatgcactgggtccgacaggcccctggcaaaggacttgaatgggtgtccaccatctcttggaacagcggcacaatcggctacgccgactctgtgaagggcagattcaccatcagccgggacaacgccaagaacagcctgtacctccagatgaactccctgagagccgaggacacagccctgtactactgcgccaaggacatccagtacggcaactactactacggcatggacgtgtggggccagggcacaacagtgacagtctcttctacgcgtgagcagaaactgatctcggaagaggatctggcgaagcccaccacgacgccagcgccgcgaccaccaacaccggcgcccaccatcgcgtcgcagcccctgtccctgcgcccagaggcgtgccggccagcggcggggggcgcagtgcacacgagggggctggacttcgcctgtgacatctacatctgggcgcccttggccgggacttgtggggtccttctcctgtcactggttatcaccctttactgcgggcgcgccagagtgaagttcagcaggagcgcagacgcccccgcgtaccagcagggccagaaccagctctataacgagctgaatctaggacgaagagaggagtacgatgttttggacaagagacgtggccgggaccctgagatggggggaaagccgagaaggaagaaccctcaggaaggcctgtacaatgaactgcagaaagataagatggcggaggcctacagtgagattgggatgaaaggcgagcgccggaggggcaaggggcacgatggcctttaccagggtctcagtacagccaccaaggacacctacgacgcccttcacatgcaggccctgccccctcgctctagaggatctggagcaacaaacttctcactactcaaacaagcaggtgacgtggaggagaatcccgggcctgggatccacatggccacttacgaggttctctgtgaggtggcgcggaaactgggcacggatgacagggaagtggtattgttcctcctaaacgtgttcatacctcaacccacactggcccaattaattggagctcttagagctttaaaggaggagggcaggttaacgtttcccctgttagcggaatgtctgtttcgtgcaggtcgcagagacctcttgcgcgacctgcttcacttagacccgcgttttttagagcgccacctagcgggcacaatgagttatttcagcccttatcagctcactgttctccacgtagacggggagctgtgtgcgagggatattaggtctttgatatttttaagcaaggacactatagggtctcgcagcacaccacagacattcttacactgggtgtactgtatggaaaacttagacctactgggtcccactgacgtggatgccctaatgtcaatgcttagatctttgtcaagagtagacctacagcgccaagtgcaaaccctaatgggccttcacctttccggcccatcacactcccaacactatcgccatacaccactcgagaccgatttctacgactacaaggacgacgatgacaagactagtggctccggcgagggcagaggaagtctactaacctgcggagatgtggaagaaaatcctggcccacatatgaccgagtacaagcccacggtgcgcctcgccacccgcgacgacgtccccagggccgtacgcaccctcgccgccgcgttcgccgactaccccgccacgcgccacaccgtcgatccggaccgccacatcgagcgggtcaccgagctgcaagaactcttcctcacgcgcgtcgggctcgacatcggcaaggtgtgggtcgcggacgacggcgccgcggtggcggtctggaccacgccggagagcgtcgaagcgggggcggtgttcgccgagatcggcccgcgcatggccgagttgagcggttcccggctggccgcgcagcaacagatggaaggcctcctggcgccgcaccggcccaaggagcccgcgtggttcctggccaccgtcggcgtctcgcccgaccaccagggcaagggtctgggcagcgccgtcgtgctccccggagtggaggcggccgagcgcgccggggtgcccgccttcctggagacctccgcgccccgcaacctccccttctacgagcggctcggcttcaccgtcaccgccgacgtcgaggtgcccgaaggaccgcgcacctggtgcatgacccgcaagcccggtgcctga

SEQ ID NO: 976 - DNA, 2748 bp, Artificial Sequence
  Synthetic Polynucleotides
atggccttaccagtgaccgccttgctcctgccgctggccttgctgctccacgccgccaggccggagatcgtgctgacacagagccctggcacactgtcactgtctccaggcgaaagagccacactgagctgtagagccagcagcagcgtgccctacatccactggtatcagcagaagcctggacaggcccctcggctgctgatctatgccacatctgctctggcctctggcatccccgatagattttctggcagcggctccggcaccgacttcaccctgacaatcagcagactggaacccgaggacttcgccgtgtactactgtcagcagtggctgagcaaccctcctacattcggccagggcaccaagctggaactgaaaagaggcggaggcggaagtggaggcggaggatctggcggcggaggctctgaagttcagctggttcagagcggagccgaagtgaagaagccaggcgagagcctgaagctgagctgcaaaggcagcggcagaaccttcaccagctacaacatgcactgggtccgacagatgcccggcaaaggactggaatggatgggcgctatctaccctctgaccggcgacacctcctacaaccagaaaagcaagctgcaagtgaccatcagcgccgacaagagcatcagcacagcctacctccagtggtcctctctgaaggccagcgacaccgccatgtactattgtgccagaagcacctacgtcggcggcgactggcagtttgatgtgtggggcaagggcaccaccgtgaccgtttcttctacgcgtgagcagaaactgatctcggaagaggatctggcgaagcccaccacgacgccagcgccgcgaccaccaacaccggcgcccaccatcgcgtcgcagcccctgtccctgcgcccagaggcgtgccggccagcggcggggggcgcagtgcacacgagggggctggacttcgcctgtgacatctacatctgggcgcccttggccgggacttgtggggtccttctcctgtcactggttatcaccctttactgcgggcgcgccagagtgaagttcagcaggagcgcagacgcccccgcgtaccagcagggccagaaccagctctataacgagctgaatctaggacgaagagaggagtacgatgttttggacaagagacgtggccgggaccctgagatggggggaaagccgagaaggaagaaccctcaggaaggcctgtacaatgaactgcagaaagataagatggcggaggcctacagtgagattgggatgaaaggcgagcgccggaggggcaaggggcacgatggcctttaccagggtctcagtacagccaccaaggacacctacgacgcccttcacatgcaggccctgccccctcgctctagaggatctggagcaacaaacttctcactactcaaacaagcaggtgacgtggaggagaatcccgggcctgggatccacatggccacttacgaggttctctgtgaggtggcgcggaaactgggcacggatgacagggaagtggtattgttcctcctaaacgtgttcatacctcaacccacactggcccaattaattggagctcttagagctttaaaggaggagggcaggttaacgtttcccctgttagcggaatgtctgtttcgtgcaggtcgcagagacctcttgcgcgacctgcttcacttagacccgcgttttttagagcgccacctagcgggcacaatgagttatttcagcccttatcagctcactgttctccacgtagacggggagctgtgtgcgagggatattaggtctttgatatttttaagcaaggacactatagggtctcgcagcacaccacagacattcttacactgggtgtactgtatggaaaacttagacctactgggtcccactgacgtggatgccctaatgtcaatgcttagatctttgtcaagagtagacctacagcgccaagtgcaaaccctaatgggccttcacctttccggcccatcacactcccaacactatcgccatacaccactcgagaccgatttctacgactacaaggacgacgatgacaagactagtggctccggcgagggcagaggaagtctactaacctgcggagatgtggaagaaaatcctggcccacatatgaccgagtacaagcccacggtgcgcctcgccacccgcgacgacgtccccagggccgtacgcaccctcgccgccgcgttcgccgactaccccgccacgcgccacaccgtcgatccggaccgccacatcgagcgggtcaccgagctgcaagaactcttcctcacgcgcgtcgggctcgacatcggcaaggtgtgggtcgcggacgacggcgccgcggtggcggtctggaccacgccggagagcgtcgaagcgggggcggtgttcgccgagatcggcccgcgcatggccgagttgagcggttcccggctggccgcgcagcaacagatggaaggcctcctggcgccgcaccggcccaaggagcccgcgtggttcctggccaccgtcggcgtctcgcccgaccaccagggcaagggtctgggcagcgccgtcgtgctccccggagtggaggcggccgagcgcgccggggtgcccgccttcctggagacctccgcgccccgcaacctccccttctacgagcggctcggcttcaccgtcaccgccgacgtcgaggtgcccgaaggaccgcgcacctggtgcatgacccgcaagcccggtgcctga

SEQ ID NO: 977 - DNA, 2763 bp, Artificial Sequence
  Synthetic Polynucleotides
atggccttaccagtgaccgccttgctcctgccgctggccttgctgctccacgccgccaggccggacatccagatgacccagagccccagcagcctgtctgccagcgtgggcgacagagtgaccatcacctgtcggagcagccagagcatcgtgcactccgtgggcaacaccttcctggaatggtatcagcagaagcccggcaaggcccccaagctgctgatctacaaggtgtccaacagattcagcggcgtgcccagcaggtttagcggctctggcagcggcaccgacttcaccctgaccatctctagcctccagcccgaggacttcgccacctactactgttttcaaggcagccagttcccctacaccttcggccagggaacaaaggtggaaatcaagcggggcggaggcggaagtggaggcggaggatctggcggcggaggctctgaagtgcaactggtggaaagcggaggcggcctggtgcagcctggcggatctctgagactgagctgtgccgccagcggctacgagttcagccggtcctggatgaactgggtgcgccaggcccctggcaagggactggaatgggtgggaagaatctaccccggcgacggcgacaccaactacagcggcaagttcaagggccggttcaccatcagcgccgacaccagcaagaacaccgcctacctccagatgaacagcctgcgggccgaggataccgccgtgtactactgtgccagagatggcagctcctgggactggtacttcgacgtgtggggacagggaacccttgtgaccgtgtccagcacgcgtgagcagaaactgatctcggaagaggatctggcgaagcccaccacgacgccagcgccgcgaccaccaacaccggcgcccaccatcgcgtcgcagcccctgtccctgcgcccagaggcgtgccggccagcggcggggggcgcagtgcacacgagggggctggacttcgcctgtgacatctacatctgggcgcccttggccgggacttgtggggtccttctcctgtcactggttatcaccctttactgcgggcgcgccagagtgaagttcagcaggagcgcagacgcccccgcgtaccagcagggccagaaccagctctataacgagctgaatctaggacgaagagaggagtacgatgttttggacaagagacgtggccgggaccctgagatggggggaaagccgagaaggaagaaccctcaggaaggcctgtacaatgaactgcagaaagataagatggcggaggcctacagtgagattgggatgaaaggcgagcgccggaggggcaaggggcacgatggcctttaccagggtctcagtacagccaccaaggacacctacgacgcccttcacatgcaggccctgccccctcgctctagaggatctggagcaacaaacttctcactactcaaacaagcaggtgacgtggaggagaatcccgggcctgggatccacatggccacttacgaggttctctgtgaggtggcgcggaaactgggcacggatgacagggaagtggtattgttcctcctaaacgtgttcatacctcaacccacactggcccaattaattggagctcttagagctttaaaggaggagggcaggttaacgtttcccctgttagcggaatgtctgtttcgtgcaggtcgcagagacctcttgcgcgacctgcttcacttagacccgcgttttttagagcgccacctagcgggcacaatgagttatttcagcccttatcagctcactgttctccacgtagacggggagctgtgtgcgagggatattaggtctttgatatttttaagcaaggacactatagggtctcgcagcacaccacagacattcttacactgggtgtactgtatggaaaacttagacctactgggtcccactgacgtggatgccctaatgtcaatgcttagatctttgtcaagagtagacctacagcgccaagtgcaaaccctaatgggccttcacctttccggcccatcacactcccaacactatcgccatacaccactcgagaccgatttctacgactacaaggacgacgatgacaagactagtggctccggcgagggcagaggaagtctactaacctgcggagatgtggaagaaaatcctggcccacatatgaccgagtacaagcccacggtgcgcctcgccacccgcgacgacgtccccagggccgtacgcaccctcgccgccgcgttcgccgactaccccgccacgcgccacaccgtcgatccggaccgccacatcgagcgggtcaccgagctgcaagaactcttcctcacgcgcgtcgggctcgacatcggcaaggtgtgggtcgcggacgacggcgccgcggtggcggtctggaccacgccggagagcgtcgaagcgggggcggtgttcgccgagatcggcccgcgcatggccgagttgagcggttcccggctggccgcgcagcaacagatggaaggcctcctggcgccgcaccggcccaaggagcccgcgtggttcctggccaccgtcggcgtctcgcccgaccaccagggcaagggtctgggcagcgccgtcgtgctccccggagtggaggcggccgagcgcgccggggtgcccgccttcctggagacctccgcgccccgcaacctccccttctacgagcggctcggcttcaccgtcaccgccgacgtcgaggtgcccgaaggaccgcgcacctggtgcatgacccgcaagcccggtgcctga

SEQ ID NO: 978 - DNA, 2739 bp, Artificial Sequence
  Synthetic Polynucleotides
atggccttaccagtgaccgccttgctcctgccgctggccttgctgctccacgccgccaggccggacatcgtgatgacccagagccccagcagcctgtctgccagcgtgggcgacagagtgaccatcacatgcaaggccagccagagcgtgaccaacgacgtggcctggtatcagcagaagcccggcaaggcccccaagctgctgatctactacgccagcaacagatacaccggcgtgcccagcagattcagcggctctggcagcggcaccgacttcaccctgaccatctctagcctccagcccgaggacttcgccacctactactgtcagcaggactacagaagcccctggaccttcggcggaggcaccaaggtggaaatcaagcggggcggaggcggaagtggaggcggaggatctggcggcggaggctctcaggtgcaactggaagaaagcgggggaggcgtcgtgcggcctggaagaagtctgagactgagctgtgccgccagcggcttcaccttcagcgactacggcgtgaactggatcagacaggcccctggcaagggcctggaatgggtcacaatcatctggggcgacggcagaaccgactacaacagcgccctgaagtcccggttcaccgtgtcccggaacaacagcaacaacaccctgagcctccagatgaacagcctgaccaccgaggacaccgccgtgtactactgtgtgcgggctcccggcaaccgggctatggaatattggggacagggcgtactcgtgaccgtgtcctctacgcgtgagcagaaactgatctcggaagaggatctggcgaagcccaccacgacgccagcgccgcgaccaccaacaccggcgcccaccatcgcgtcgcagcccctgtccctgcgcccagaggcgtgccggccagcggcggggggcgcagtgcacacgagggggctggacttcgcctgtgacatctacatctgggcgcccttggccgggacttgtggggtccttctcctgtcactggttatcaccctttactgcgggcgcgccagagtgaagttcagcaggagcgcagacgcccccgcgtaccagcagggccagaaccagctctataacgagctgaatctaggacgaagagaggagtacgatgttttggacaagagacgtggccgggaccctgagatggggggaaagccgagaaggaagaaccctcaggaaggcctgtacaatgaactgcagaaagataagatggcggaggcctacagtgagattgggatgaaaggcgagcgccggaggggcaaggggcacgatggcctttaccagggtctcagtacagccaccaaggacacctacgacgcccttcacatgcaggccctgccccctcgctctagaggatctggagcaacaaacttctcactactcaaacaagcaggtgacgtggaggagaatcccgggcctgggatccacatggccacttacgaggttctctgtgaggtggcgcggaaactgggcacggatgacagggaagtggtattgttcctcctaaacgtgttcatacctcaacccacactggcccaattaattggagctcttagagctttaaaggaggagggcaggttaacgtttcccctgttagcggaatgtctgtttcgtgcaggtcgcagagacctcttgcgcgacctgcttcacttagacccgcgttttttagagcgccacctagcgggcacaatgagttatttcagcccttatcagctcactgttctccacgtagacggggagctgtgtgcgagggatattaggtctttgatatttttaagcaaggacactatagggtctcgcagcacaccacagacattcttacactgggtgtactgtatggaaaacttagacctactgggtcccactgacgtggatgccctaatgtcaatgcttagatctttgtcaagagtagacctacagcgccaagtgcaaaccctaatgggccttcacctttccggcccatcacactcccaacactatcgccatacaccactcgagaccgatttctacgactacaaggacgacgatgacaagactagtggctccggcgagggcagaggaagtctactaacctgcggagatgtggaagaaaatcctggcccacatatgaccgagtacaagcccacggtgcgcctcgccacccgcgacgacgtccccagggccgtacgcaccctcgccgccgcgttcgccgactaccccgccacgcgccacaccgtcgatccggaccgccacatcgagcgggtcaccgagctgcaagaactcttcctcacgcgcgtcgggctcgacatcggcaaggtgtgggtcgcggacgacggcgccgcggtggcggtctggaccacgccggagagcgtcgaagcgggggcggtgttcgccgagatcggcccgcgcatggccgagttgagcggttcccggctggccgcgcagcaacagatggaaggcctcctggcgccgcaccggcccaaggagcccgcgtggttcctggccaccgtcggcgtctcgcccgaccaccagggcaagggtctgggcagcgccgtcgtgctccccggagtggaggcggccgagcgcgccggggtgcccgccttcctggagacctccgcgccccgcaacctccccttctacgagcggctcggcttcaccgtcaccgccgacgtcgaggtgcccgaaggaccgcgcacctggtgcatgacccgcaagcccggtgcctga

SEQ ID NO: 979 - DNA, 2757 bp, Artificial Sequence
  Synthetic Polynucleotides
atggccttaccagtgaccgccttgctcctgccgctggccttgctgctccacgccgccaggccggacatccagatgacccagagccccagcagcctgtctgccagcgtgggcgacagagtgaccatcacctgtagagccagccagaccatctggtcctacctgaactggtatcagcagaggcccggcaaggcccccaacctgctgatctatgccgccagctctctccagagcggcgtgcccagcagattttccggcagaggcagcggcaccgacttcaccctgaccatcagttccttgcaggccgaggacttcgccacctactactgccagcagagctacagcatcccccagattttcggccagggcaccaagctggaaatcaagggcggaggcggaagtggaggcggaggatctggcggcggaggctctcaggtgcagctccagcagtctggacccggcctcgtgaagcctagccagacactgagcctgacctgcgccatcagcggcgatagcgtgtccagcaatagcgccgcctggaactggatcagacagtccccctctcggggcctggaatggctgggccggacctactaccgcagcaagtggtacaacgactacgccgtgtccgtgaagtcccggatcaccatcaaccccgacaccagcaagaaccagttctccttgcaactgaacagcgtgacccccgaggacaccgccgtgtactactgcgccagagaagtgaccggcgacctggaagatgccttcgacatctggggccagggaacaatggtcacagtgtccagcacgcgtgagcagaaactgatctcggaagaggatctggcgaagcccaccacgacgccagcgccgcgaccaccaacaccggcgcccaccatcgcgtcgcagcccctgtccctgcgcccagaggcgtgccggccagcggcggggggcgcagtgcacacgagggggctggacttcgcctgtgacatctacatctgggcgcccttggccgggacttgtggggtccttctcctgtcactggttatcaccctttactgcgggcgcgccagagtgaagttcagcaggagcgcagacgcccccgcgtaccagcagggccagaaccagctctataacgagctgaatctaggacgaagagaggagtacgatgttttggacaagagacgtggccgggaccctgagatggggggaaagccgagaaggaagaaccctcaggaaggcctgtacaatgaactgcagaaagataagatggcggaggcctacagtgagattgggatgaaaggcgagcgccggaggggcaaggggcacgatggcctttaccagggtctcagtacagccaccaaggacacctacgacgcccttcacatgcaggccctgccccctcgctctagaggatctggagcaacaaacttctcactactcaaacaagcaggtgacgtggaggagaatcccgggcctgggatccacatggccacttacgaggttctctgtgaggtggcgcggaaactgggcacggatgacagggaagtggtattgttcctcctaaacgtgttcatacctcaacccacactggcccaattaattggagctcttagagctttaaaggaggagggcaggttaacgtttcccctgttagcggaatgtctgtttcgtgcaggtcgcagagacctcttgcgcgacctgcttcacttagacccgcgttttttagagcgccacctagcgggcacaatgagttatttcagcccttatcagctcactgttctccacgtagacggggagctgtgtgcgagggatattaggtctttgatatttttaagcaaggacactatagggtctcgcagcacaccacagacattcttacactgggtgtactgtatggaaaacttagacctactgggtcccactgacgtggatgccctaatgtcaatgcttagatctttgtcaagagtagacctacagcgccaagtgcaaaccctaatgggccttcacctttccggcccatcacactcccaacactatcgccatacaccactcgagaccgatttctacgactacaaggacgacgatgacaagactagtggctccggcgagggcagaggaagtctactaacctgcggagatgtggaagaaaatcctggcccacatatgaccgagtacaagcccacggtgcgcctcgccacccgcgacgacgtccccagggccgtacgcaccctcgccgccgcgttcgccgactaccccgccacgcgccacaccgtcgatccggaccgccacatcgagcgggtcaccgagctgcaagaactcttcctcacgcgcgtcgggctcgacatcggcaaggtgtgggtcgcggacgacggcgccgcggtggcggtctggaccacgccggagagcgtcgaagcgggggcggtgttcgccgagatcggcccgcgcatggccgagttgagcggttcccggctggccgcgcagcaacagatggaaggcctcctggcgccgcaccggcccaaggagcccgcgtggttcctggccaccgtcggcgtctcgcccgaccaccagggcaagggtctgggcagcgccgtcgtgctccccggagtggaggcggccgagcgcgccggggtgcccgccttcctggagacctccgcgccccgcaacctccccttctacgagcggctcggcttcaccgtcaccgccgacgtcgaggtgcccgaaggaccgcgcacctggtgcatgacccgcaagcccggtgcctga

SEQ ID NO: 980 - DNA, 2757 bp, Artificial Sequence
  Synthetic Polynucleotides
atggccttaccagtgaccgccttgctcctgccgctggccttgctgctccacgccgccaggccgcaggtgcagctccagcagtctggacccggcctcgtgaagcctagccagacactgagcctgacctgcgccatcagcggcgatagcgtgtccagcaatagcgccgcctggaactggatcagacagtccccctctcggggcctggaatggctgggccggacctactaccgcagcaagtggtacaacgactacgccgtgtccgtgaagtcccggatcaccatcaaccccgacaccagcaagaaccagttctccttgcaactgaacagcgtgacccccgaggacaccgccgtgtactactgcgccagagaagtgaccggcgacctggaagatgccttcgacatctggggccagggaacaatggtcacagtgtccagcggcggaggcggaagtggaggcggaggatctggcggcggaggctctgacatccagatgacccagagccccagcagcctgtctgccagcgtgggcgacagagtgaccatcacctgtagagccagccagaccatctggtcctacctgaactggtatcagcagaggcccggcaaggcccccaacctgctgatctatgccgccagctctctccagagcggcgtgcccagcagattttccggcagaggcagcggcaccgacttcaccctgaccatcagttccttgcaggccgaggacttcgccacctactactgccagcagagctacagcatcccccagattttcggccagggcaccaagctggaaatcaagacgcgtgagcagaaactgatctcggaagaggatctggcgaagcccaccacgacgccagcgccgcgaccaccaacaccggcgcccaccatcgcgtcgcagcccctgtccctgcgcccagaggcgtgccggccagcggcggggggcgcagtgcacacgagggggctggacttcgcctgtgacatctacatctgggcgcccttggccgggacttgtggggtccttctcctgtcactggttatcaccctttactgcgggcgcgccagagtgaagttcagcaggagcgcagacgcccccgcgtaccagcagggccagaaccagctctataacgagctgaatctaggacgaagagaggagtacgatgttttggacaagagacgtggccgggaccctgagatggggggaaagccgagaaggaagaaccctcaggaaggcctgtacaatgaactgcagaaagataagatggcggaggcctacagtgagattgggatgaaaggcgagcgccggaggggcaaggggcacgatggcctttaccagggtctcagtacagccaccaaggacacctacgacgcccttcacatgcaggccctgccccctcgctctagaggatctggagcaacaaacttctcactactcaaacaagcaggtgacgtggaggagaatcccgggcctgggatccacatggccacttacgaggttctctgtgaggtggcgcggaaactgggcacggatgacagggaagtggtattgttcctcctaaacgtgttcatacctcaacccacactggcccaattaattggagctcttagagctttaaaggaggagggcaggttaacgtttcccctgttagcggaatgtctgtttcgtgcaggtcgcagagacctcttgcgcgacctgcttcacttagacccgcgttttttagagcgccacctagcgggcacaatgagttatttcagcccttatcagctcactgttctccacgtagacggggagctgtgtgcgagggatattaggtctttgatatttttaagcaaggacactatagggtctcgcagcacaccacagacattcttacactgggtgtactgtatggaaaacttagacctactgggtcccactgacgtggatgccctaatgtcaatgcttagatctttgtcaagagtagacctacagcgccaagtgcaaaccctaatgggccttcacctttccggcccatcacactcccaacactatcgccatacaccactcgagaccgatttctacgactacaaggacgacgatgacaagactagtggctccggcgagggcagaggaagtctactaacctgcggagatgtggaagaaaatcctggcccacatatgaccgagtacaagcccacggtgcgcctcgccacccgcgacgacgtccccagggccgtacgcaccctcgccgccgcgttcgccgactaccccgccacgcgccacaccgtcgatccggaccgccacatcgagcgggtcaccgagctgcaagaactcttcctcacgcgcgtcgggctcgacatcggcaaggtgtgggtcgcggacgacggcgccgcggtggcggtctggaccacgccggagagcgtcgaagcgggggcggtgttcgccgagatcggcccgcgcatggccgagttgagcggttcccggctggccgcgcagcaacagatggaaggcctcctggcgccgcaccggcccaaggagcccgcgtggttcctggccaccgtcggcgtctcgcccgaccaccagggcaagggtctgggcagcgccgtcgtgctccccggagtggaggcggccgagcgcgccggggtgcccgccttcctggagacctccgcgccccgcaacctccccttctacgagcggctcggcttcaccgtcaccgccgacgtcgaggtgcccgaaggaccgcgcacctggtgcatgacccgcaagcccggtgcctga

SEQ ID NO: 981 - DNA, 2736 bp, Artificial Sequence
  Synthetic Polynucleotides
atggccttaccagtgaccgccttgctcctgccgctggccttgctgctccacgccgccaggccggacatccagatgacccagagccccgccaccatcgagaacacaagcctgtctgccagcgtgggcgacagagtgaccatcacctgtagagccagccagggcatcagctcttggctgacctggtatcagcagaagcccgagaaggcccccaagagcctgatctacgccgccagctctctgcagtctggcgtgcccagcagattttccggcagcggctctggcaccgacttcaccctgacaatcagcagcctgcagcccgaggacttcgccacctactactgccagcagtacgacagctaccccatcaccttcggccagggcacccggctggaaatcaagggcggaggcggaagtggaggcggaggatctggcggcggaggctctcaggtgcaactgcagcagtggggagccggactgctgaagcctagcgagacactgagcctgacctgcgccgtgtacggcggcagcttcagcgcctactattggagctggatcagacagccccctggcaagggcctggaatggatcggcgacatcaatcacggcggaggcaccaactacaaccccagcctgaagtcccgcgtgaccatctccgtggacaccagcaagaaccagttctccctgaagctgaacagcgtgacagccgccgacacagccgtgtactactgtgccagcctgaccgcctattggggccagggatctcttgtgaccgtgtccagcacgcgtgagcagaaactgatctcggaagaggatctggcgaagcccaccacgacgccagcgccgcgaccaccaacaccggcgcccaccatcgcgtcgcagcccctgtccctgcgcccagaggcgtgccggccagcggcggggggcgcagtgcacacgagggggctggacttcgcctgtgacatctacatctgggcgcccttggccgggacttgtggggtccttctcctgtcactggttatcaccctttactgcgggcgcgccagagtgaagttcagcaggagcgcagacgcccccgcgtaccagcagggccagaaccagctctataacgagctgaatctaggacgaagagaggagtacgatgttttggacaagagacgtggccgggaccctgagatggggggaaagccgagaaggaagaaccctcaggaaggcctgtacaatgaactgcagaaagataagatggcggaggcctacagtgagattgggatgaaaggcgagcgccggaggggcaaggggcacgatggcctttaccagggtctcagtacagccaccaaggacacctacgacgcccttcacatgcaggccctgccccctcgctctagaggatctggagcaacaaacttctcactactcaaacaagcaggtgacgtggaggagaatcccgggcctgggatccacatggccacttacgaggttctctgtgaggtggcgcggaaactgggcacggatgacagggaagtggtattgttcctcctaaacgtgttcatacctcaacccacactggcccaattaattggagctcttagagctttaaaggaggagggcaggttaacgtttcccctgttagcggaatgtctgtttcgtgcaggtcgcagagacctcttgcgcgacctgcttcacttagacccgcgttttttagagcgccacctagcgggcacaatgagttatttcagcccttatcagctcactgttctccacgtagacggggagctgtgtgcgagggatattaggtctttgatatttttaagcaaggacactatagggtctcgcagcacaccacagacattcttacactgggtgtactgtatggaaaacttagacctactgggtcccactgacgtggatgccctaatgtcaatgcttagatctttgtcaagagtagacctacagcgccaagtgcaaaccctaatgggccttcacctttccggcccatcacactcccaacactatcgccatacaccactcgagaccgatttctacgactacaaggacgacgatgacaagactagtggctccggcgagggcagaggaagtctactaacctgcggagatgtggaagaaaatcctggcccacatatgaccgagtacaagcccacggtgcgcctcgccacccgcgacgacgtccccagggccgtacgcaccctcgccgccgcgttcgccgactaccccgccacgcgccacaccgtcgatccggaccgccacatcgagcgggtcaccgagctgcaagaactcttcctcacgcgcgtcgggctcgacatcggcaaggtgtgggtcgcggacgacggcgccgcggtggcggtctggaccacgccggagagcgtcgaagcgggggcggtgttcgccgagatcggcccgcgcatggccgagttgagcggttcccggctggccgcgcagcaacagatggaaggcctcctggcgccgcaccggcccaaggagcccgcgtggttcctggccaccgtcggcgtctcgcccgaccaccagggcaagggtctgggcagcgccgtcgtgctccccggagtggaggcggccgagcgcgccggggtgcccgccttcctggagacctccgcgccccgcaacctccccttctacgagcggctcggcttcaccgtcaccgccgacgtcgaggtgcccgaaggaccgcgcacctggtgcatgacccgcaagcccggtgcctga

SEQ ID NO: 982 - DNA, 2751 bp, Artificial Sequence
  Synthetic Polynucleotides
atggccttaccagtgaccgccttgctcctgccgctggccttgctgctccacgccgccaggccggacgagatcgtgctgacccagagccctgatagcctggccgtgtctctgggcgagagagccaccatcaactgcaaggccagccagagcgtggacttcgacggcgacagctacctgaactggtatcagcagaagcccggccagccccccaaggtgctgatctatgccgccagcacactgcagagcggcgtgcccagcagattttctggcagcggctccggcaccgacttcaccctgaccatcaacagcctggaagccgaggacgccgccacctactactgccagcagagcaacgaggacccctggacctttggcggcggaacaaaggtggaaatcaagggcggaggcggaagtggaggcggaggatctggcggcggaggctctcaggtgcaactggtgcagtccggcgctgaagtgaagaaacctggggccagcgtgaaggtgtcctgcaaggtgtccggctacacctttaccgactactacattacctgggtgcgccaggcccctggacaggccctggaatggatgggctggatctaccccggcagcggcaacaccaagtacagccagaagttccagggcagattcgtgttcagcgtggacaccagcgccagcaccgcctacctgcaactgtctagcctgaaggccgaagataccgccgtgtactactgcgccaactacggcaactattggttcgcctattggggccagggaacccttgtgaccgtgtcctctacgcgtgagcagaaactgatctcggaagaggatctggcgaagcccaccacgacgccagcgccgcgaccaccaacaccggcgcccaccatcgcgtcgcagcccctgtccctgcgcccagaggcgtgccggccagcggcggggggcgcagtgcacacgagggggctggacttcgcctgtgacatctacatctgggcgcccttggccgggacttgtggggtccttctcctgtcactggttatcaccctttactgcgggcgcgccagagtgaagttcagcaggagcgcagacgcccccgcgtaccagcagggccagaaccagctctataacgagctgaatctaggacgaagagaggagtacgatgttttggacaagagacgtggccgggaccctgagatggggggaaagccgagaaggaagaaccctcaggaaggcctgtacaatgaactgcagaaagataagatggcggaggcctacagtgagattgggatgaaaggcgagcgccggaggggcaaggggcacgatggcctttaccagggtctcagtacagccaccaaggacacctacgacgcccttcacatgcaggccctgccccctcgctctagaggatctggagcaacaaacttctcactactcaaacaagcaggtgacgtggaggagaatcccgggcctgggatccacatggccacttacgaggttctctgtgaggtggcgcggaaactgggcacggatgacagggaagtggtattgttcctcctaaacgtgttcatacctcaacccacactggcccaattaattggagctcttagagctttaaaggaggagggcaggttaacgtttcccctgttagcggaatgtctgtttcgtgcaggtcgcagagacctcttgcgcgacctgcttcacttagacccgcgttttttagagcgccacctagcgggcacaatgagttatttcagcccttatcagctcactgttctccacgtagacggggagctgtgtgcgagggatattaggtctttgatatttttaagcaaggacactatagggtctcgcagcacaccacagacattcttacactgggtgtactgtatggaaaacttagacctactgggtcccactgacgtggatgccctaatgtcaatgcttagatctttgtcaagagtagacctacagcgccaagtgcaaaccctaatgggccttcacctttccggcccatcacactcccaacactatcgccatacaccactcgagaccgatttctacgactacaaggacgacgatgacaagactagtggctccggcgagggcagaggaagtctactaacctgcggagatgtggaagaaaatcctggcccacatatgaccgagtacaagcccacggtgcgcctcgccacccgcgacgacgtccccagggccgtacgcaccctcgccgccgcgttcgccgactaccccgccacgcgccacaccgtcgatccggaccgccacatcgagcgggtcaccgagctgcaagaactcttcctcacgcgcgtcgggctcgacatcggcaaggtgtgggtcgcggacgacggcgccgcggtggcggtctggaccacgccggagagcgtcgaagcgggggcggtgttcgccgagatcggcccgcgcatggccgagttgagcggttcccggctggccgcgcagcaacagatggaaggcctcctggcgccgcaccggcccaaggagcccgcgtggttcctggccaccgtcggcgtctcgcccgaccaccagggcaagggtctgggcagcgccgtcgtgctccccggagtggaggcggccgagcgcgccggggtgcccgccttcctggagacctccgcgccccgcaacctccccttctacgagcggctcggcttcaccgtcaccgccgacgtcgaggtgcccgaaggaccgcgcacctggtgcatgacccgcaagcccggtgcctga

SEQ ID NO: 983 - DNA, 2742 bp, Artificial Sequence
  Synthetic Polynucleotides
atggccttaccagtgaccgccttgctcctgccgctggccttgctgctccacgccgccaggccggacatccagatgacccagagccccagcagcctgtctgccagcgtgggcgacagagtgaccatcacctgtagagccagccagggcatcagctcttggctggcctggtatcagcagaagcccgagaaggcccccaagagcctgatctacgccgcctctagtctccagagcggcgtgcccagcagattttctggcagcggctccggcaccgacttcaccctgacaatcagctccctccagcccgaggacttcgccacctactactgccagcagtacaacagctaccctcccacctttggcggaggcaccaaggtggaaatcaagggcggaggcggaagtggaggcggaggatctggcggcggaggctctgaagtgcaactggtgcagtctggcggagggctggtgcatcctgggggaagcctgagactgagctgtgccggctctggcttcgccttcagcagcagcaccatgcactggatcagacaggcccctggcaagggcctggaatggatcagcctgatcggaagcggagggggcatctactacggcgacagcgtgaagggccggttcaccatcagccgggacaacgccaagaacagcctgtacctccagatgaactccctgcgggccgaggacatggccgtgtactattgtgtgcggggctacttcgactgggtggactacttcgattactggggccagggcaccctcgtgaccgtgtcatctacgcgtgagcagaaactgatctcggaagaggatctggcgaagcccaccacgacgccagcgccgcgaccaccaacaccggcgcccaccatcgcgtcgcagcccctgtccctgcgcccagaggcgtgccggccagcggcggggggcgcagtgcacacgagggggctggacttcgcctgtgacatctacatctgggcgcccttggccgggacttgtggggtccttctcctgtcactggttatcaccctttactgcgggcgcgccagagtgaagttcagcaggagcgcagacgcccccgcgtaccagcagggccagaaccagctctataacgagctgaatctaggacgaagagaggagtacgatgttttggacaagagacgtggccgggaccctgagatggggggaaagccgagaaggaagaaccctcaggaaggcctgtacaatgaactgcagaaagataagatggcggaggcctacagtgagattgggatgaaaggcgagcgccggaggggcaaggggcacgatggcctttaccagggtctcagtacagccaccaaggacacctacgacgcccttcacatgcaggccctgccccctcgctctagaggatctggagcaacaaacttctcactactcaaacaagcaggtgacgtggaggagaatcccgggcctgggatccacatggccacttacgaggttctctgtgaggtggcgcggaaactgggcacggatgacagggaagtggtattgttcctcctaaacgtgttcatacctcaacccacactggcccaattaattggagctcttagagctttaaaggaggagggcaggttaacgtttcccctgttagcggaatgtctgtttcgtgcaggtcgcagagacctcttgcgcgacctgcttcacttagacccgcgttttttagagcgccacctagcgggcacaatgagttatttcagcccttatcagctcactgttctccacgtagacggggagctgtgtgcgagggatattaggtctttgatatttttaagcaaggacactatagggtctcgcagcacaccacagacattcttacactgggtgtactgtatggaaaacttagacctactgggtcccactgacgtggatgccctaatgtcaatgcttagatctttgtcaagagtagacctacagcgccaagtgcaaaccctaatgggccttcacctttccggcccatcacactcccaacactatcgccatacaccactcgagaccgatttctacgactacaaggacgacgatgacaagactagtggctccggcgagggcagaggaagtctactaacctgcggagatgtggaagaaaatcctggcccacatatgaccgagtacaagcccacggtgcgcctcgccacccgcgacgacgtccccagggccgtacgcaccctcgccgccgcgttcgccgactaccccgccacgcgccacaccgtcgatccggaccgccacatcgagcgggtcaccgagctgcaagaactcttcctcacgcgcgtcgggctcgacatcggcaaggtgtgggtcgcggacgacggcgccgcggtggcggtctggaccacgccggagagcgtcgaagcgggggcggtgttcgccgagatcggcccgcgcatggccgagttgagcggttcccggctggccgcgcagcaacagatggaaggcctcctggcgccgcaccggcccaaggagcccgcgtggttcctggccaccgtcggcgtctcgcccgaccaccagggcaagggtctgggcagcgccgtcgtgctccccggagtggaggcggccgagcgcgccggggtgcccgccttcctggagacctccgcgccccgcaacctccccttctacgagcggctcggcttcaccgtcaccgccgacgtcgaggtgcccgaaggaccgcgcacctggtgcatgacccgcaagcccggtgcctga

SEQ ID NO: 984 - DNA, 2772 bp, Artificial Sequence
  Synthetic Polynucleotides
atggccttaccagtgaccgccttgctcctgccgctggccttgctgctccacgccgccaggccggacgacatcgtgatgacacagtcaccagatagcctcaccgtctccctgggggagcggaccaccattaattgtaaatccagccaaagcgtgctggactcaagcaagaacaagaatagcctcgcctggtatcagcagaagcccggtcagcctccaaagctgctgctttcttgggcctccaccagagagtccgggattcctgataggtttagtggttcaggctccggcacagattttactctgaccattgattctctccagccagaggattctgcaacttattactgccagcaaagcgcccactttcctataacttttggccagggaacccgacttgaaatcaagggcggaggcggaagtggaggcggaggatctggcggcggaggctctcaggtgcagctggtgcagagcggtgccgaagtgaagaaaccaggtgcatccgttaaagtttcatgtaaggctagtggatataccttcaccaattacggaatgaactgggtgaaacaggcccctggccagggactgaagtggatggggtggattaacacctacaccggggagccgacttatgcagacgactttaaggggcgggtcacgatgacctccgacacctccaccagtaccgcctacctggagctgcacaaccttaggtcagacgataccgccgtgtattactgtgcccgatggtcttggtccgacggatactatgtctacttcgactattggggccaggggaccacagttaccgtgtcctctacgcgtgagcagaaactgatctcggaagaggatctggcgaagcccaccacgacgccagcgccgcgaccaccaacaccggcgcccaccatcgcgtcgcagcccctgtccctgcgcccagaggcgtgccggccagcggcggggggcgcagtgcacacgagggggctggacttcgcctgtgacatctacatctgggcgcccttggccgggacttgtggggtccttctcctgtcactggttatcaccctttactgcgggcgcgccagagtgaagttcagcaggagcgcagacgcccccgcgtaccagcagggccagaaccagctctataacgagctgaatctaggacgaagagaggagtacgatgttttggacaagagacgtggccgggaccctgagatggggggaaagccgagaaggaagaaccctcaggaaggcctgtacaatgaactgcagaaagataagatggcggaggcctacagtgagattgggatgaaaggcgagcgccggaggggcaaggggcacgatggcctttaccagggtctcagtacagccaccaaggacacctacgacgcccttcacatgcaggccctgccccctcgctctagaggatctggagcaacaaacttctcactactcaaacaagcaggtgacgtggaggagaatcccgggcctgggatccacatggccacttacgaggttctctgtgaggtggcgcggaaactgggcacggatgacagggaagtggtattgttcctcctaaacgtgttcatacctcaacccacactggcccaattaattggagctcttagagctttaaaggaggagggcaggttaacgtttcccctgttagcggaatgtctgtttcgtgcaggtcgcagagacctcttgcgcgacctgcttcacttagacccgcgttttttagagcgccacctagcgggcacaatgagttatttcagcccttatcagctcactgttctccacgtagacggggagctgtgtgcgagggatattaggtctttgatatttttaagcaaggacactatagggtctcgcagcacaccacagacattcttacactgggtgtactgtatggaaaacttagacctactgggtcccactgacgtggatgccctaatgtcaatgcttagatctttgtcaagagtagacctacagcgccaagtgcaaaccctaatgggccttcacctttccggcccatcacactcccaacactatcgccatacaccactcgagaccgatttctacgactacaaggacgacgatgacaagactagtggctccggcgagggcagaggaagtctactaacctgcggagatgtggaagaaaatcctggcccacatatgaccgagtacaagcccacggtgcgcctcgccacccgcgacgacgtccccagggccgtacgcaccctcgccgccgcgttcgccgactaccccgccacgcgccacaccgtcgatccggaccgccacatcgagcgggtcaccgagctgcaagaactcttcctcacgcgcgtcgggctcgacatcggcaaggtgtgggtcgcggacgacggcgccgcggtggcggtctggaccacgccggagagcgtcgaagcgggggcggtgttcgccgagatcggcccgcgcatggccgagttgagcggttcccggctggccgcgcagcaacagatggaaggcctcctggcgccgcaccggcccaaggagcccgcgtggttcctggccaccgtcggcgtctcgcccgaccaccagggcaagggtctgggcagcgccgtcgtgctccccggagtggaggcggccgagcgcgccggggtgcccgccttcctggagacctccgcgccccgcaacctccccttctacgagcggctcggcttcaccgtcaccgccgacgtcgaggtgcccgaaggaccgcgcacctggtgcatgacccgcaagcccggtgcctga

SEQ ID NO: 985 - DNA, 2760 bp, Artificial Sequence
  Synthetic Polynucleotides
atggccttaccagtgaccgccttgctcctgccgctggccttgctgctccacgccgccaggccggacgagatcgtgctgacacagagccctggaagcctggccgtgtctcctggcgagcgcgtgacaatgagctgcaagagcagccagagcgtgttcttcagcagctcccagaagaactacctggcctggtatcagcagatccccggccagagccccagactgctgatctactgggccagcaccagagaaagcggcgtgcccgatagattcaccggcagcggctctggcaccgacttcaccctgacaatcagcagcgtgcagcccgaggacctggctatctactactgccaccagtacctgagcagccggaccttcggccagggcaccaagctggaaatcaagagaggcggaggcggaagtggaggcggaggatctggcggcggaggctctcaggtgcaactgcagcagcctggcgctgaggtcgtgaagccaggcgcttccgtgaagatgtcctgcaaggccagcggctacaccttcaccagctactacatccactggatcaagcagacccctggacagggcctggaatgggtgggagtgatctaccccggcaacgacgacatcagctacaaccagaagttccagggcaaggccaccctgaccgccgacaagtctagcaccaccgcctacatgcaactgtccagcctgaccagcgaggacagcgccgtgtactactgcgccagagaagtgcggctgcggtacttcgatgtgtggggccagggaaccaccgtgaccgtgtcatctacgcgtgagcagaaactgatctcggaagaggatctggcgaagcccaccacgacgccagcgccgcgaccaccaacaccggcgcccaccatcgcgtcgcagcccctgtccctgcgcccagaggcgtgccggccagcggcggggggcgcagtgcacacgagggggctggacttcgcctgtgacatctacatctgggcgcccttggccgggacttgtggggtccttctcctgtcactggttatcaccctttactgcgggcgcgccagagtgaagttcagcaggagcgcagacgcccccgcgtaccagcagggccagaaccagctctataacgagctgaatctaggacgaagagaggagtacgatgttttggacaagagacgtggccgggaccctgagatggggggaaagccgagaaggaagaaccctcaggaaggcctgtacaatgaactgcagaaagataagatggcggaggcctacagtgagattgggatgaaaggcgagcgccggaggggcaaggggcacgatggcctttaccagggtctcagtacagccaccaaggacacctacgacgcccttcacatgcaggccctgccccctcgctctagaggatctggagcaacaaacttctcactactcaaacaagcaggtgacgtggaggagaatcccgggcctgggatccacatggccacttacgaggttctctgtgaggtggcgcggaaactgggcacggatgacagggaagtggtattgttcctcctaaacgtgttcatacctcaacccacactggcccaattaattggagctcttagagctttaaaggaggagggcaggttaacgtttcccctgttagcggaatgtctgtttcgtgcaggtcgcagagacctcttgcgcgacctgcttcacttagacccgcgttttttagagcgccacctagcgggcacaatgagttatttcagcccttatcagctcactgttctccacgtagacggggagctgtgtgcgagggatattaggtctttgatatttttaagcaaggacactatagggtctcgcagcacaccacagacattcttacactgggtgtactgtatggaaaacttagacctactgggtcccactgacgtggatgccctaatgtcaatgcttagatctttgtcaagagtagacctacagcgccaagtgcaaaccctaatgggccttcacctttccggcccatcacactcccaacactatcgccatacaccactcgagaccgatttctacgactacaaggacgacgatgacaagactagtggctccggcgagggcagaggaagtctactaacctgcggagatgtggaagaaaatcctggcccacatatgaccgagtacaagcccacggtgcgcctcgccacccgcgacgacgtccccagggccgtacgcaccctcgccgccgcgttcgccgactaccccgccacgcgccacaccgtcgatccggaccgccacatcgagcgggtcaccgagctgcaagaactcttcctcacgcgcgtcgggctcgacatcggcaaggtgtgggtcgcggacgacggcgccgcggtggcggtctggaccacgccggagagcgtcgaagcgggggcggtgttcgccgagatcggcccgcgcatggccgagttgagcggttcccggctggccgcgcagcaacagatggaaggcctcctggcgccgcaccggcccaaggagcccgcgtggttcctggccaccgtcggcgtctcgcccgaccaccagggcaagggtctgggcagcgccgtcgtgctccccggagtggaggcggccgagcgcgccggggtgcccgccttcctggagacctccgcgccccgcaacctccccttctacgagcggctcggcttcaccgtcaccgccgacgtcgaggtgcccgaaggaccgcgcacctggtgcatgacccgcaagcccggtgcctga

SEQ ID NO: 986 - DNA, 2838 bp, Artificial Sequence
  Synthetic Polynucleotides
atggccttaccagtgaccgccttgctcctgccgctggccttgctgctccacgccgccaggccgtacatcaacatctacaacgccgagcctgccaatcctagcgagaagaacagccccacacagtacgcctacggcagcggagaattcgacatccagctgacacagagcccttctagcctgtctgccagcgtgggcgacagagtgaccatcacatgtagagccagccagggcatcagctctgtgctggcttggtatcagcagaagcctggcaaggcccctaagctgctgatctacgatgccagcagcctggaaagcggcgtgccaagcagattttctggcagcggctctggcaccgacttcaccctgacaatatccagcctccagcctgaggacttcgccacctactactgccagcagttcaacagcagcatcaccttcggccagggcaccaagctggaaatcaagagaacagtggcagccggcggaggcggaagtggaggcggaggatctggcggcggaggctctcaagttcagctggttcagtctggggccgaagtgaagaaacctggcagcagcgtgaaggtgtcctgcaaagcaagcggcggcaccttcagcgattacgccatctcttgggtccgacaggcccctggacaaggactggaatggatgggcagaatcatccccatcctgggcgtcgccaattacgcccagaaattccagggccgcgtgacaatcaccgccgacaagtctaccagaaccgcctacatggaactgagcagcctgagaagcgaggacaccgccgtgtactactgcgccagaaattgggccgacgccttcgacatttggggccagggaacaatggtcaccgtgtctagcgcctccacgcgtgagcagaaactgatctcggaagaggatctggcgaagcccaccacgacgccagcgccgcgaccaccaacaccggcgcccaccatcgcgtcgcagcccctgtccctgcgcccagaggcgtgccggccagcggcggggggcgcagtgcacacgagggggctggacttcgcctgtgacatctacatctgggcgcccttggccgggacttgtggggtccttctcctgtcactggttatcaccctttactgcgggcgcgccagagtgaagttcagcaggagcgcagacgcccccgcgtaccagcagggccagaaccagctctataacgagctgaatctaggacgaagagaggagtacgatgttttggacaagagacgtggccgggaccctgagatggggggaaagccgagaaggaagaaccctcaggaaggcctgtacaatgaactgcagaaagataagatggcggaggcctacagtgagattgggatgaaaggcgagcgccggaggggcaaggggcacgatggcctttaccagggtctcagtacagccaccaaggacacctacgacgcccttcacatgcaggccctgccccctcgctctagaggatctggagcaacaaacttctcactactcaaacaagcaggtgacgtggaggagaatcccgggcctgggatccacatggccacttacgaggttctctgtgaggtggcgcggaaactgggcacggatgacagggaagtggtattgttcctcctaaacgtgttcatacctcaacccacactggcccaattaattggagctcttagagctttaaaggaggagggcaggttaacgtttcccctgttagcggaatgtctgtttcgtgcaggtcgcagagacctcttgcgcgacctgcttcacttagacccgcgttttttagagcgccacctagcgggcacaatgagttatttcagcccttatcagctcactgttctccacgtagacggggagctgtgtgcgagggatattaggtctttgatatttttaagcaaggacactatagggtctcgcagcacaccacagacattcttacactgggtgtactgtatggaaaacttagacctactgggtcccactgacgtggatgccctaatgtcaatgcttagatctttgtcaagagtagacctacagcgccaagtgcaaaccctaatgggccttcacctttccggcccatcacactcccaacactatcgccatacaccactcgagaccgatttctacgactacaaggacgacgatgacaagactagtggctccggcgagggcagaggaagtctactaacctgcggagatgtggaagaaaatcctggcccacatatgaccgagtacaagcccacggtgcgcctcgccacccgcgacgacgtccccagggccgtacgcaccctcgccgccgcgttcgccgactaccccgccacgcgccacaccgtcgatccggaccgccacatcgagcgggtcaccgagctgcaagaactcttcctcacgcgcgtcgggctcgacatcggcaaggtgtgggtcgcggacgacggcgccgcggtggcggtctggaccacgccggagagcgtcgaagcgggggcggtgttcgccgagatcggcccgcgcatggccgagttgagcggttcccggctggccgcgcagcaacagatggaaggcctcctggcgccgcaccggcccaaggagcccgcgtggttcctggccaccgtcggcgtctcgcccgaccaccagggcaagggtctgggcagcgccgtcgtgctccccggagtggaggcggccgagcgcgccggggtgcccgccttcctggagacctccgcgccccgcaacctccccttctacgagcggctcggcttcaccgtcaccgccgacgtcgaggtgcccgaaggaccgcgcacctggtgcatgacccgcaagcccggtgcctga

SEQ ID NO: 987 - DNA, 2835 bp, Artificial Sequence
  Synthetic Polynucleotides
atggccttaccagtgaccgccttgctcctgccgctggccttgctgctccacgccgccaggccgtacatcaacatctacaacgccgagcctgccaatcctagcgagaagaacagccccacacagtacgcctacggcagcggagaattcgacatcgtgatgacacagagccctagcagcctgtctgcctctctcggcggcaaagtgaccatcacatgcaaggccagccaggacatcaacaagtatatcgcctggtatcagcacaagcccggcaagggacctagactgctgatccactacaccagcacactccagcctggcatccccagcagattttctggcagcggctccggcagagactacagcttcagcatcagcaacctggaacctgaggacattgccacctactactgcctccagtacgacaacctgctgacctttggagccggcaccaagctggaactgaaaagaggcggaggcggaagtggaggcggaggatctggcggcggaggctctgaagtgaaactccagcagagcggccctgagctggttaagcctggcaccagcgtgaaggtgtcctgtaaagccagcggctactccttcaccgactacaacatgtactgggtcaagcagagccacggcaagagcctggaatggatcggctacatcgacccctacaaaggcggcaccatctacaaccagaagttcaagggcaaagccacactgaccgtggacaagagcagcagcaccgccttcatgcacctgaacagcctgaccagcgaggacagcgccgtgtactattgcgccagagagatgattaccgcctactacttcgactactggggccagggaagcagcgtgaccgttagctctctggaaagaacgcgtgagcagaaactgatctcggaagaggatctggcgaagcccaccacgacgccagcgccgcgaccaccaacaccggcgcccaccatcgcgtcgcagcccctgtccctgcgcccagaggcgtgccggccagcggcggggggcgcagtgcacacgagggggctggacttcgcctgtgacatctacatctgggcgcccttggccgggacttgtggggtccttctcctgtcactggttatcaccctttactgcgggcgcgccagagtgaagttcagcaggagcgcagacgcccccgcgtaccagcagggccagaaccagctctataacgagctgaatctaggacgaagagaggagtacgatgttttggacaagagacgtggccgggaccctgagatggggggaaagccgagaaggaagaaccctcaggaaggcctgtacaatgaactgcagaaagataagatggcggaggcctacagtgagattgggatgaaaggcgagcgccggaggggcaaggggcacgatggcctttaccagggtctcagtacagccaccaaggacacctacgacgcccttcacatgcaggccctgccccctcgctctagaggatctggagcaacaaacttctcactactcaaacaagcaggtgacgtggaggagaatcccgggcctgggatccacatggccacttacgaggttctctgtgaggtggcgcggaaactgggcacggatgacagggaagtggtattgttcctcctaaacgtgttcatacctcaacccacactggcccaattaattggagctcttagagctttaaaggaggagggcaggttaacgtttcccctgttagcggaatgtctgtttcgtgcaggtcgcagagacctcttgcgcgacctgcttcacttagacccgcgttttttagagcgccacctagcgggcacaatgagttatttcagcccttatcagctcactgttctccacgtagacggggagctgtgtgcgagggatattaggtctttgatatttttaagcaaggacactatagggtctcgcagcacaccacagacattcttacactgggtgtactgtatggaaaacttagacctactgggtcccactgacgtggatgccctaatgtcaatgcttagatctttgtcaagagtagacctacagcgccaagtgcaaaccctaatgggccttcacctttccggcccatcacactcccaacactatcgccatacaccactcgagaccgatttctacgactacaaggacgacgatgacaagactagtggctccggcgagggcagaggaagtctactaacctgcggagatgtggaagaaaatcctggcccacatatgaccgagtacaagcccacggtgcgcctcgccacccgcgacgacgtccccagggccgtacgcaccctcgccgccgcgttcgccgactaccccgccacgcgccacaccgtcgatccggaccgccacatcgagcgggtcaccgagctgcaagaactcttcctcacgcgcgtcgggctcgacatcggcaaggtgtgggtcgcggacgacggcgccgcggtggcggtctggaccacgccggagagcgtcgaagcgggggcggtgttcgccgagatcggcccgcgcatggccgagttgagcggttcccggctggccgcgcagcaacagatggaaggcctcctggcgccgcaccggcccaaggagcccgcgtggttcctggccaccgtcggcgtctcgcccgaccaccagggcaagggtctgggcagcgccgtcgtgctccccggagtggaggcggccgagcgcgccggggtgcccgccttcctggagacctccgcgccccgcaacctccccttctacgagcggctcggcttcaccgtcaccgccgacgtcgaggtgcccgaaggaccgcgcacctggtgcatgacccgcaagcccggtgcctga

SEQ ID NO: 988 - DNA, 2883 bp, Artificial Sequence
  Synthetic Polynucleotides
atggccttaccagtgaccgccttgctcctgccgctggccttgctgctccacgccgccaggccggacatccagatgacacagagccctagcagcctgtctgccagcgtgggagatagagtgaccatcaactgcaaggccagccaggacatcaacagctacctgagctggttccagcagaagcctggcaaggcccctaagacactgatctaccgggccaacagactggtggatggcgtgccaagcagattttctggcagcggcagcggccaggattacaccctgacaatatccagcctccagcctgaggacttcgccacctactactgcctccagtacgacgagttccctctgacctttggcggaggcaccaaggtggaaatcaaaggcggaggcggaagtggaggcggaggatctggcggcggaggctctcaggtgcaactggtgcagtctggggccgaagtgaagaaacctggggcctctgtgaaggtgtcctgcaaagccagcggctacacctttaccaactacgacatcaactgggtccgacaggctccaggccaaggactggaatggatcggctggatctatcctggcgacggcagcaccaagtacaacgagaagttcaaggccaaggccacactgaccgccgataccagcacaagcaccgcctacatggaactgcggagcctgagaagcgacgacaccgccgtgtactattgtgcctccggctacgaggacgctatggactattggggccagggcaccaccgtgacagtgtctagtgccaagcctaccaccacaccagctccaagacctccaactcctgctcctacaatcgccagccagcctctgtctctcagacccgaagcctgtagacctgctgctggcggagctgtgcataccagaggactggatttcgcctgcgacatcacgcgtgagcagaaactgatctcggaagaggatctggcgaagcccaccacgacgccagcgccgcgaccaccaacaccggcgcccaccatcgcgtcgcagcccctgtccctgcgcccagaggcgtgccggccagcggcggggggcgcagtgcacacgagggggctggacttcgcctgtgacatctacatctgggcgcccttggccgggacttgtggggtccttctcctgtcactggttatcaccctttactgcgggcgcgccagagtgaagttcagcaggagcgcagacgcccccgcgtaccagcagggccagaaccagctctataacgagctgaatctaggacgaagagaggagtacgatgttttggacaagagacgtggccgggaccctgagatggggggaaagccgagaaggaagaaccctcaggaaggcctgtacaatgaactgcagaaagataagatggcggaggcctacagtgagattgggatgaaaggcgagcgccggaggggcaaggggcacgatggcctttaccagggtctcagtacagccaccaaggacacctacgacgcccttcacatgcaggccctgccccctcgctctagaggatctggagcaacaaacttctcactactcaaacaagcaggtgacgtggaggagaatcccgggcctgggatccacatggccacttacgaggttctctgtgaggtggcgcggaaactgggcacggatgacagggaagtggtattgttcctcctaaacgtgttcatacctcaacccacactggcccaattaattggagctcttagagctttaaaggaggagggcaggttaacgtttcccctgttagcggaatgtctgtttcgtgcaggtcgcagagacctcttgcgcgacctgcttcacttagacccgcgttttttagagcgccacctagcgggcacaatgagttatttcagcccttatcagctcactgttctccacgtagacggggagctgtgtgcgagggatattaggtctttgatatttttaagcaaggacactatagggtctcgcagcacaccacagacattcttacactgggtgtactgtatggaaaacttagacctactgggtcccactgacgtggatgccctaatgtcaatgcttagatctttgtcaagagtagacctacagcgccaagtgcaaaccctaatgggccttcacctttccggcccatcacactcccaacactatcgccatacaccactcgagaccgatttctacgactacaaggacgacgatgacaagactagtggctccggcgagggcagaggaagtctactaacctgcggagatgtggaagaaaatcctggcccacatatgaccgagtacaagcccacggtgcgcctcgccacccgcgacgacgtccccagggccgtacgcaccctcgccgccgcgttcgccgactaccccgccacgcgccacaccgtcgatccggaccgccacatcgagcgggtcaccgagctgcaagaactcttcctcacgcgcgtcgggctcgacatcggcaaggtgtgggtcgcggacgacggcgccgcggtggcggtctggaccacgccggagagcgtcgaagcgggggcggtgttcgccgagatcggcccgcgcatggccgagttgagcggttcccggctggccgcgcagcaacagatggaaggcctcctggcgccgcaccggcccaaggagcccgcgtggttcctggccaccgtcggcgtctcgcccgaccaccagggcaagggtctgggcagcgccgtcgtgctccccggagtggaggcggccgagcgcgccggggtgcccgccttcctggagacctccgcgccccgcaacctccccttctacgagcggctcggcttcaccgtcaccgccgacgtcgaggtgcccgaaggaccgcgcacctggtgcatgacccgcaagcccggtgcctga

SEQ ID NO: 989 - DNA, 2751 bp, Artificial Sequence
  Synthetic Polynucleotides
atggccttaccagtgaccgccttgctcctgccgctggccttgctgctccacgccgccaggccggagatcgtgctgacacagagccctctgagcctgcctgttacacctggcgagcctgccagcatctcctgtagaagctctcagagcctgctgcacagcaacggctacaactacctggactggtatctccagaagcctggacagagcccacagctcctgatctacctgggcgtgaactctgtgtccggcgtgcccgatagattttctggcagcggctctggcaccgacttcaccctgaagatcagcagagtggaagccgaggacgtgggcgtgtactactgtatgcaggccctccagacaccttggacattcggccagggcaccaaggtggaaatcaaaggcggcggaggatctggcggaggtggaagtggcggaggcggatctcaagtgcaactggttcagagcggagccgaagtgaagaaacctggcagcagcgtgaaggtgtcctgcaaagcctctggcggcatcttcagcaaccacgccatctcttgggtccgacaggctcctggacaaggactggaatggatgggcggcatcatccccatcttcggcacagccaattacgcccagaaattccagggcagagtgaccatcaccgccgacgagtctaccagcaccgccttcatggaactgagcagcctgagaagcgaggacaccgccgtgtactattgcgccagagaatgggccgacgtgttcgacatttggggccagggaacaatggtcaccgtgtcctctacgcgtgagcagaaactgatctcggaagaggatctggcgaagcccaccacgacgccagcgccgcgaccaccaacaccggcgcccaccatcgcgtcgcagcccctgtccctgcgcccagaggcgtgccggccagcggcggggggcgcagtgcacacgagggggctggacttcgcctgtgacatctacatctgggcgcccttggccgggacttgtggggtccttctcctgtcactggttatcaccctttactgcgggcgcgccagagtgaagttcagcaggagcgcagacgcccccgcgtaccagcagggccagaaccagctctataacgagctgaatctaggacgaagagaggagtacgatgttttggacaagagacgtggccgggaccctgagatggggggaaagccgagaaggaagaaccctcaggaaggcctgtacaatgaactgcagaaagataagatggcggaggcctacagtgagattgggatgaaaggcgagcgccggaggggcaaggggcacgatggcctttaccagggtctcagtacagccaccaaggacacctacgacgcccttcacatgcaggccctgccccctcgctctagaggatctggagcaacaaacttctcactactcaaacaagcaggtgacgtggaggagaatcccgggcctgggatccacatggccacttacgaggttctctgtgaggtggcgcggaaactgggcacggatgacagggaagtggtattgttcctcctaaacgtgttcatacctcaacccacactggcccaattaattggagctcttagagctttaaaggaggagggcaggttaacgtttcccctgttagcggaatgtctgtttcgtgcaggtcgcagagacctcttgcgcgacctgcttcacttagacccgcgttttttagagcgccacctagcgggcacaatgagttatttcagcccttatcagctcactgttctccacgtagacggggagctgtgtgcgagggatattaggtctttgatatttttaagcaaggacactatagggtctcgcagcacaccacagacattcttacactgggtgtactgtatggaaaacttagacctactgggtcccactgacgtggatgccctaatgtcaatgcttagatctttgtcaagagtagacctacagcgccaagtgcaaaccctaatgggccttcacctttccggcccatcacactcccaacactatcgccatacaccactcgagaccgatttctacgactacaaggacgacgatgacaagactagtggctccggcgagggcagaggaagtctactaacctgcggagatgtggaagaaaatcctggcccacatatgaccgagtacaagcccacggtgcgcctcgccacccgcgacgacgtccccagggccgtacgcaccctcgccgccgcgttcgccgactaccccgccacgcgccacaccgtcgatccggaccgccacatcgagcgggtcaccgagctgcaagaactcttcctcacgcgcgtcgggctcgacatcggcaaggtgtgggtcgcggacgacggcgccgcggtggcggtctggaccacgccggagagcgtcgaagcgggggcggtgttcgccgagatcggcccgcgcatggccgagttgagcggttcccggctggccgcgcagcaacagatggaaggcctcctggcgccgcaccggcccaaggagcccgcgtggttcctggccaccgtcggcgtctcgcccgaccaccagggcaagggtctgggcagcgccgtcgtgctccccggagtggaggcggccgagcgcgccggggtgcccgccttcctggagacctccgcgccccgcaacctccccttctacgagcggctcggcttcaccgtcaccgccgacgtcgaggtgcccgaaggaccgcgcacctggtgcatgacccgcaagcccggtgcctga

SEQ ID NO: 990 - DNA, 2748 bp, Artificial Sequence
  Synthetic Polynucleotides
atggccttaccagtgaccgccttgctcctgccgctggccttgctgctccacgccgccaggccggacatccagatgacacagtctccagccagcctgaccgtgtcactgggacagagagccaccatctcttgcagagccagcgagagcgtggacagctacggcaatagctacctgcactggtatcagcagaagcccggccagcctcctcagctcctgatctacctggcctccaatctggaaagcggcgtgccagccagattttctggcagcggcagcagaaccgacttcaccctgaccattgatcccgtggaagccgatgatgccgccacctactactgccagcagaacaacgaggacccctggacatttggcggaggcaccaaggtggaaatcaaaggcggcggaggatctggcggaggtggaagtggcggaggcggatctgaagttcagctccagcagagcggagccgagcttgtgaaacctggcgcttccgtgaagatgagctgcaaagccttcggctacaccttcaccacctttccaatcgagtggatgaagcagagccacggcaagagcctggaatggatcggcaactttcacccctacaacgaccagaccaagtacaacgaagagttcaagggcagagccaagctgaccatcgacagatccagcagcaccgtgtacctggaactgggcagactgacctccgatgacagcgccgtgtactactgtgccagaggctactactacgccttcgacttttggggccagggcaccacactgacagtgtctagcacgcgtgagcagaaactgatctcggaagaggatctggcgaagcccaccacgacgccagcgccgcgaccaccaacaccggcgcccaccatcgcgtcgcagcccctgtccctgcgcccagaggcgtgccggccagcggcggggggcgcagtgcacacgagggggctggacttcgcctgtgacatctacatctgggcgcccttggccgggacttgtggggtccttctcctgtcactggttatcaccctttactgcgggcgcgccagagtgaagttcagcaggagcgcagacgcccccgcgtaccagcagggccagaaccagctctataacgagctgaatctaggacgaagagaggagtacgatgttttggacaagagacgtggccgggaccctgagatggggggaaagccgagaaggaagaaccctcaggaaggcctgtacaatgaactgcagaaagataagatggcggaggcctacagtgagattgggatgaaaggcgagcgccggaggggcaaggggcacgatggcctttaccagggtctcagtacagccaccaaggacacctacgacgcccttcacatgcaggccctgccccctcgctctagaggatctggagcaacaaacttctcactactcaaacaagcaggtgacgtggaggagaatcccgggcctgggatccacatggccacttacgaggttctctgtgaggtggcgcggaaactgggcacggatgacagggaagtggtattgttcctcctaaacgtgttcatacctcaacccacactggcccaattaattggagctcttagagctttaaaggaggagggcaggttaacgtttcccctgttagcggaatgtctgtttcgtgcaggtcgcagagacctcttgcgcgacctgcttcacttagacccgcgttttttagagcgccacctagcgggcacaatgagttatttcagcccttatcagctcactgttctccacgtagacggggagctgtgtgcgagggatattaggtctttgatatttttaagcaaggacactatagggtctcgcagcacaccacagacattcttacactgggtgtactgtatggaaaacttagacctactgggtcccactgacgtggatgccctaatgtcaatgcttagatctttgtcaagagtagacctacagcgccaagtgcaaaccctaatgggccttcacctttccggcccatcacactcccaacactatcgccatacaccactcgagaccgatttctacgactacaaggacgacgatgacaagactagtggctccggcgagggcagaggaagtctactaacctgcggagatgtggaagaaaatcctggcccacatatgaccgagtacaagcccacggtgcgcctcgccacccgcgacgacgtccccagggccgtacgcaccctcgccgccgcgttcgccgactaccccgccacgcgccacaccgtcgatccggaccgccacatcgagcgggtcaccgagctgcaagaactcttcctcacgcgcgtcgggctcgacatcggcaaggtgtgggtcgcggacgacggcgccgcggtggcggtctggaccacgccggagagcgtcgaagcgggggcggtgttcgccgagatcggcccgcgcatggccgagttgagcggttcccggctggccgcgcagcaacagatggaaggcctcctggcgccgcaccggcccaaggagcccgcgtggttcctggccaccgtcggcgtctcgcccgaccaccagggcaagggtctgggcagcgccgtcgtgctccccggagtggaggcggccgagcgcgccggggtgcccgccttcctggagacctccgcgccccgcaacctccccttctacgagcggctcggcttcaccgtcaccgccgacgtcgaggtgcccgaaggaccgcgcacctggtgcatgacccgcaagcccggtgcctga

SEQ ID NO: 991 - DNA, 2739 bp, Artificial Sequence
  Synthetic Polynucleotides
atggccttaccagtgaccgccttgctcctgccgctggccttgctgctccacgccgccaggccggacatccagatgacacagagccctagcagcctgtctgccagcgtgggagacagagtgaccatcacctgtagagccagccagggcatcagaaacgacctcggctggtatcagcagaagcctggcaaggcccctaagcggctgatctatgccgcttcctctctgcaatctggcgtgcccagcagattttctggcagcggctctggcaccgagttcaccctgacaatatccagcctccagcctgaggacttcgccacctactactgcctccagcacaacagctacccctggacctttggacagggcaccaagctggaaatcaaaggcggaggcggaagtggaggcggaggatctggcggcggaggctctgaagtgcaactggttgaatctggcggcgctctgattcagcctggcggatctctgagactgagctgtgtggcctccggctttaccatcagcggcaactacatgagctgggtccgacaggcccctggcaaaggacttgaatgggtgtccctgatctacagcggcgacagcacctattacgccgacagcgtgaagggcagattcaccatcagccgggacatcagcaagaacaccgtgtacctccagatgaactccctgagagtggaagataccgccgtgtactactgcgtccgcgacggctactacgtgtccgatatggttgtgtggggcaagggcaccaccgtgacagtctcttctacgcgtgagcagaaactgatctcggaagaggatctggcgaagcccaccacgacgccagcgccgcgaccaccaacaccggcgcccaccatcgcgtcgcagcccctgtccctgcgcccagaggcgtgccggccagcggcggggggcgcagtgcacacgagggggctggacttcgcctgtgacatctacatctgggcgcccttggccgggacttgtggggtccttctcctgtcactggttatcaccctttactgcgggcgcgccagagtgaagttcagcaggagcgcagacgcccccgcgtaccagcagggccagaaccagctctataacgagctgaatctaggacgaagagaggagtacgatgttttggacaagagacgtggccgggaccctgagatggggggaaagccgagaaggaagaaccctcaggaaggcctgtacaatgaactgcagaaagataagatggcggaggcctacagtgagattgggatgaaaggcgagcgccggaggggcaaggggcacgatggcctttaccagggtctcagtacagccaccaaggacacctacgacgcccttcacatgcaggccctgccccctcgctctagaggatctggagcaacaaacttctcactactcaaacaagcaggtgacgtggaggagaatcccgggcctgggatccacatggccacttacgaggttctctgtgaggtggcgcggaaactgggcacggatgacagggaagtggtattgttcctcctaaacgtgttcatacctcaacccacactggcccaattaattggagctcttagagctttaaaggaggagggcaggttaacgtttcccctgttagcggaatgtctgtttcgtgcaggtcgcagagacctcttgcgcgacctgcttcacttagacccgcgttttttagagcgccacctagcgggcacaatgagttatttcagcccttatcagctcactgttctccacgtagacggggagctgtgtgcgagggatattaggtctttgatatttttaagcaaggacactatagggtctcgcagcacaccacagacattcttacactgggtgtactgtatggaaaacttagacctactgggtcccactgacgtggatgccctaatgtcaatgcttagatctttgtcaagagtagacctacagcgccaagtgcaaaccctaatgggccttcacctttccggcccatcacactcccaacactatcgccatacaccactcgagaccgatttctacgactacaaggacgacgatgacaagactagtggctccggcgagggcagaggaagtctactaacctgcggagatgtggaagaaaatcctggcccacatatgaccgagtacaagcccacggtgcgcctcgccacccgcgacgacgtccccagggccgtacgcaccctcgccgccgcgttcgccgactaccccgccacgcgccacaccgtcgatccggaccgccacatcgagcgggtcaccgagctgcaagaactcttcctcacgcgcgtcgggctcgacatcggcaaggtgtgggtcgcggacgacggcgccgcggtggcggtctggaccacgccggagagcgtcgaagcgggggcggtgttcgccgagatcggcccgcgcatggccgagttgagcggttcccggctggccgcgcagcaacagatggaaggcctcctggcgccgcaccggcccaaggagcccgcgtggttcctggccaccgtcggcgtctcgcccgaccaccagggcaagggtctgggcagcgccgtcgtgctccccggagtggaggcggccgagcgcgccggggtgcccgccttcctggagacctccgcgccccgcaacctccccttctacgagcggctcggcttcaccgtcaccgccgacgtcgaggtgcccgaaggaccgcgcacctggtgcatgacccgcaagcccggtgcctga

SEQ ID NO: 992 - DNA, 2769 bp, Artificial Sequence
  Synthetic Polynucleotides
atggccttaccagtgaccgccttgctcctgccgctggccttgctgctccacgccgccaggccggatgtgctgctgacccagagccctctgagcctgcctgtgacactgggacagcctgccagcatctcctgtcggagcagccagaccatcgtgcacagcaacggcaacacctacctggaatggttccagcagcggccaggccagagccccagactgctgatctaccaggtgtccaacagattcagcggcgtgcccgacagattctccggcagcggctctggcaccgacttcaccctgaagatcagccgggtggaagccgaggacgtgggcgtgtactactgttttcaaggcagccacgtgccccggacctttggcggaggaacaaaggtggaaatcaagagaggcggaggcggaagtggaggcggaggatctggcggcggaggctctcagatccaactggtgcagagcggcagcgagctgaagaaacctggggccagcgtgaaggtgtcctgcaaggccagcggctacacctttaccaactacggcatgaactgggtgcgccaggcccctggacagggcctgaaatggatgggctggatcaacaccaacaccggcgagcctaagtacgccgaagagttcaagggcagattcgccctgagcctggacaccagcgtgtccacagcctacctccagatcaacagcctgaaggccgaggataccgccgtgtacttctgcgccagaggctacggcaactacgccagaggggcttggctggcctattggggccagggaacactcgtgaccgtgtcctctacgcgtgagcagaaactgatctcggaagaggatctggcgaagcccaccacgacgccagcgccgcgaccaccaacaccggcgcccaccatcgcgtcgcagcccctgtccctgcgcccagaggcgtgccggccagcggcggggggcgcagtgcacacgagggggctggacttcgcctgtgacatctacatctgggcgcccttggccgggacttgtggggtccttctcctgtcactggttatcaccctttactgcgggcgcgccagagtgaagttcagcaggagcgcagacgcccccgcgtaccagcagggccagaaccagctctataacgagctgaatctaggacgaagagaggagtacgatgttttggacaagagacgtggccgggaccctgagatggggggaaagccgagaaggaagaaccctcaggaaggcctgtacaatgaactgcagaaagataagatggcggaggcctacagtgagattgggatgaaaggcgagcgccggaggggcaaggggcacgatggcctttaccagggtctcagtacagccaccaaggacacctacgacgcccttcacatgcaggccctgccccctcgctctagaggatctggagcaacaaacttctcactactcaaacaagcaggtgacgtggaggagaatcccgggcctgggatccacatggccacttacgaggttctctgtgaggtggcgcggaaactgggcacggatgacagggaagtggtattgttcctcctaaacgtgttcatacctcaacccacactggcccaattaattggagctcttagagctttaaaggaggagggcaggttaacgtttcccctgttagcggaatgtctgtttcgtgcaggtcgcagagacctcttgcgcgacctgcttcacttagacccgcgttttttagagcgccacctagcgggcacaatgagttatttcagcccttatcagctcactgttctccacgtagacggggagctgtgtgcgagggatattaggtctttgatatttttaagcaaggacactatagggtctcgcagcacaccacagacattcttacactgggtgtactgtatggaaaacttagacctactgggtcccactgacgtggatgccctaatgtcaatgcttagatctttgtcaagagtagacctacagcgccaagtgcaaaccctaatgggccttcacctttccggcccatcacactcccaacactatcgccatacaccactcgagaccgatttctacgactacaaggacgacgatgacaagactagtggctccggcgagggcagaggaagtctactaacctgcggagatgtggaagaaaatcctggcccacatatgaccgagtacaagcccacggtgcgcctcgccacccgcgacgacgtccccagggccgtacgcaccctcgccgccgcgttcgccgactaccccgccacgcgccacaccgtcgatccggaccgccacatcgagcgggtcaccgagctgcaagaactcttcctcacgcgcgtcgggctcgacatcggcaaggtgtgggtcgcggacgacggcgccgcggtggcggtctggaccacgccggagagcgtcgaagcgggggcggtgttcgccgagatcggcccgcgcatggccgagttgagcggttcccggctggccgcgcagcaacagatggaaggcctcctggcgccgcaccggcccaaggagcccgcgtggttcctggccaccgtcggcgtctcgcccgaccaccagggcaagggtctgggcagcgccgtcgtgctccccggagtggaggcggccgagcgcgccggggtgcccgccttcctggagacctccgcgccccgcaacctccccttctacgagcggctcggcttcaccgtcaccgccgacgtcgaggtgcccgaaggaccgcgcacctggtgcatgacccgcaagcccggtgcctga

SEQ ID NO: 993 - DNA, 2730 bp, Artificial Sequence
  Synthetic Polynucleotides
atggccttaccagtgaccgccttgctcctgccgctggccttgctgctccacgccgccaggccggacgagatcgtgctgacacagagccctgccacactctctctgagccctggcgaaagagccaccctgagctgtagcgccagcagcagcatcaactacatctactggctccagcagaagcccggccaggcccccagaatcctgatctacctgaccagcaacctggcctccggcgtgccagccagattttctggcagcggctccggcaccgacttcaccctgacaatcagcagcctggaacccgaggacttcgccgtgtactactgcctccagtggtccagcaaccccctgacctttggcggaggcaccaaggtggaaatcaagggcggaggcggaagtggaggcggaggatctggcggcggaggctctttcgaagtgcaactggtggaaagcgggggaggacttgtgaagcctggcggctctctgagactgagctgtgccgcctctggcttcaccttcagcagctacgacatgagctgggtgcgccaggctcctggcaagggactggaatgggtgtccaccatcagcagcggcggcagctacacctactacctggacagcatcaagggccggttcaccatctccagagacaacgccaagaacagcctgtacctccagatgaactccctgcgggccgaggacacagccgtgtattattgcgccagacagggcctggattactggggcagaggcacccttgtgaccgtgtcctctacgcgtgagcagaaactgatctcggaagaggatctggcgaagcccaccacgacgccagcgccgcgaccaccaacaccggcgcccaccatcgcgtcgcagcccctgtccctgcgcccagaggcgtgccggccagcggcggggggcgcagtgcacacgagggggctggacttcgcctgtgacatctacatctgggcgcccttggccgggacttgtggggtccttctcctgtcactggttatcaccctttactgcgggcgcgccagagtgaagttcagcaggagcgcagacgcccccgcgtaccagcagggccagaaccagctctataacgagctgaatctaggacgaagagaggagtacgatgttttggacaagagacgtggccgggaccctgagatggggggaaagccgagaaggaagaaccctcaggaaggcctgtacaatgaactgcagaaagataagatggcggaggcctacagtgagattgggatgaaaggcgagcgccggaggggcaaggggcacgatggcctttaccagggtctcagtacagccaccaaggacacctacgacgcccttcacatgcaggccctgccccctcgctctagaggatctggagcaacaaacttctcactactcaaacaagcaggtgacgtggaggagaatcccgggcctgggatccacatggccacttacgaggttctctgtgaggtggcgcggaaactgggcacggatgacagggaagtggtattgttcctcctaaacgtgttcatacctcaacccacactggcccaattaattggagctcttagagctttaaaggaggagggcaggttaacgtttcccctgttagcggaatgtctgtttcgtgcaggtcgcagagacctcttgcgcgacctgcttcacttagacccgcgttttttagagcgccacctagcgggcacaatgagttatttcagcccttatcagctcactgttctccacgtagacggggagctgtgtgcgagggatattaggtctttgatatttttaagcaaggacactatagggtctcgcagcacaccacagacattcttacactgggtgtactgtatggaaaacttagacctactgggtcccactgacgtggatgccctaatgtcaatgcttagatctttgtcaagagtagacctacagcgccaagtgcaaaccctaatgggccttcacctttccggcccatcacactcccaacactatcgccatacaccactcgagaccgatttctacgactacaaggacgacgatgacaagactagtggctccggcgagggcagaggaagtctactaacctgcggagatgtggaagaaaatcctggcccacatatgaccgagtacaagcccacggtgcgcctcgccacccgcgacgacgtccccagggccgtacgcaccctcgccgccgcgttcgccgactaccccgccacgcgccacaccgtcgatccggaccgccacatcgagcgggtcaccgagctgcaagaactcttcctcacgcgcgtcgggctcgacatcggcaaggtgtgggtcgcggacgacggcgccgcggtggcggtctggaccacgccggagagcgtcgaagcgggggcggtgttcgccgagatcggcccgcgcatggccgagttgagcggttcccggctggccgcgcagcaacagatggaaggcctcctggcgccgcaccggcccaaggagcccgcgtggttcctggccaccgtcggcgtctcgcccgaccaccagggcaagggtctgggcagcgccgtcgtgctccccggagtggaggcggccgagcgcgccggggtgcccgccttcctggagacctccgcgccccgcaacctccccttctacgagcggctcggcttcaccgtcaccgccgacgtcgaggtgcccgaaggaccgcgcacctggtgcatgacccgcaagcccggtgcctga

SEQ ID NO: 994 - DNA, 2754 bp, Artificial Sequence
  Synthetic Polynucleotides
atggccttaccagtgaccgccttgctcctgccgctggccttgctgctccacgccgccaggccggacatcgtgatgacccagagccccgatagcctggccgtgtctctgggagagagagccaccatcaactgccgggccagcaagagcgtgtccaccagcggctacagcttcatgcactggtatcagcagaagcccggccagccccccaagctgctgatctacctggcctccaacctggaaagcggcgtgcccgatagattcagcggcagcggctctggcaccgacttcaccctgaccatcagttctcttcaggccgaggacgtggccgtgtactactgccagcacagcagagaggtgccctggacattcggccagggcacaaaggtggaaatcaagcggggcggaggcggaagtggaggcggaggatctggcggcggaggctctcaggtgcagctggtgcagtctggggccgaagtgaagaaacctggggccagcgtgaaggtgtcctgcaaggccagcggatacacctttaccaactacggcatgaactgggtgcgccaggcccctggacagggcctggaatggatgggctggatcaacacctacaccggcgagcccacatacgccgacgccttcaagggcagattcgccttcagcctggacaccagcacctccaccgcctacctccagatcaacagcctgcggagcgacgacaccgccgtgtattattgcgccagagattacggcgactacgggatggactattggggccagggaaccaccgtgaccgtgtcctctacgcgtgagcagaaactgatctcggaagaggatctggcgaagcccaccacgacgccagcgccgcgaccaccaacaccggcgcccaccatcgcgtcgcagcccctgtccctgcgcccagaggcgtgccggccagcggcggggggcgcagtgcacacgagggggctggacttcgcctgtgacatctacatctgggcgcccttggccgggacttgtggggtccttctcctgtcactggttatcaccctttactgcgggcgcgccagagtgaagttcagcaggagcgcagacgcccccgcgtaccagcagggccagaaccagctctataacgagctgaatctaggacgaagagaggagtacgatgttttggacaagagacgtggccgggaccctgagatggggggaaagccgagaaggaagaaccctcaggaaggcctgtacaatgaactgcagaaagataagatggcggaggcctacagtgagattgggatgaaaggcgagcgccggaggggcaaggggcacgatggcctttaccagggtctcagtacagccaccaaggacacctacgacgcccttcacatgcaggccctgccccctcgctctagaggatctggagcaacaaacttctcactactcaaacaagcaggtgacgtggaggagaatcccgggcctgggatccacatggccacttacgaggttctctgtgaggtggcgcggaaactgggcacggatgacagggaagtggtattgttcctcctaaacgtgttcatacctcaacccacactggcccaattaattggagctcttagagctttaaaggaggagggcaggttaacgtttcccctgttagcggaatgtctgtttcgtgcaggtcgcagagacctcttgcgcgacctgcttcacttagacccgcgttttttagagcgccacctagcgggcacaatgagttatttcagcccttatcagctcactgttctccacgtagacggggagctgtgtgcgagggatattaggtctttgatatttttaagcaaggacactatagggtctcgcagcacaccacagacattcttacactgggtgtactgtatggaaaacttagacctactgggtcccactgacgtggatgccctaatgtcaatgcttagatctttgtcaagagtagacctacagcgccaagtgcaaaccctaatgggccttcacctttccggcccatcacactcccaacactatcgccatacaccactcgagaccgatttctacgactacaaggacgacgatgacaagactagtggctccggcgagggcagaggaagtctactaacctgcggagatgtggaagaaaatcctggcccacatatgaccgagtacaagcccacggtgcgcctcgccacccgcgacgacgtccccagggccgtacgcaccctcgccgccgcgttcgccgactaccccgccacgcgccacaccgtcgatccggaccgccacatcgagcgggtcaccgagctgcaagaactcttcctcacgcgcgtcgggctcgacatcggcaaggtgtgggtcgcggacgacggcgccgcggtggcggtctggaccacgccggagagcgtcgaagcgggggcggtgttcgccgagatcggcccgcgcatggccgagttgagcggttcccggctggccgcgcagcaacagatggaaggcctcctggcgccgcaccggcccaaggagcccgcgtggttcctggccaccgtcggcgtctcgcccgaccaccagggcaagggtctgggcagcgccgtcgtgctccccggagtggaggcggccgagcgcgccggggtgcccgccttcctggagacctccgcgccccgcaacctccccttctacgagcggctcggcttcaccgtcaccgccgacgtcgaggtgcccgaaggaccgcgcacctggtgcatgacccgcaagcccggtgcctga

SEQ ID NO: 995 - DNA, 2742 bp, Artificial Sequence
  Synthetic Polynucleotides
atggccttaccagtgaccgccttgctcctgccgctggccttgctgctccacgccgccaggccggacatcgtgatgacccagacccccctgaccctgagcgtgacaatcggacagcctgccagcatctcctgcaagagcagccagagcctgctggacagcgacggcaagacctacctgaactggctgctgcagaggccaggccagagccccgagagactgatctacctggtgtccaagctggactccggcgtgcccgatagattcacaggcagcggctccggcaccgacttcaccctgaagatcagccgggtggaagccgaggacctgggcgtgtactgttgttggcagggcacccacttcccttacaccttcggcggagggaccaaggtggaaatcaagggcggcggaggcggaagtggaggcggaggatctggcggcggaggctctcaggtgcaactgcagcagcctggcgctgaacttgtgcggccaggcgcctctgtgaagctgagctgtaaagccagcggctacaccttcaccagctactggatgaactgggtcaagcagcgcccaggccagggcctggaatggatcggaatgatcgaccccagcgacagcgagacacactacaaccacatcttcaaggacaaggccaccctgaccgtggacaagtccagcagcacagcctacctgcaactgtccagcctgaccagcgaggacagcgccgtgtactactgcgcccggaacctgtatctgtggggccagggaacaagcgtgaccgtgtctagcacgcgtgagcagaaactgatctcggaagaggatctggcgaagcccaccacgacgccagcgccgcgaccaccaacaccggcgcccaccatcgcgtcgcagcccctgtccctgcgcccagaggcgtgccggccagcggcggggggcgcagtgcacacgagggggctggacttcgcctgtgacatctacatctgggcgcccttggccgggacttgtggggtccttctcctgtcactggttatcaccctttactgcgggcgcgccagagtgaagttcagcaggagcgcagacgcccccgcgtaccagcagggccagaaccagctctataacgagctgaatctaggacgaagagaggagtacgatgttttggacaagagacgtggccgggaccctgagatggggggaaagccgagaaggaagaaccctcaggaaggcctgtacaatgaactgcagaaagataagatggcggaggcctacagtgagattgggatgaaaggcgagcgccggaggggcaaggggcacgatggcctttaccagggtctcagtacagccaccaaggacacctacgacgcccttcacatgcaggccctgccccctcgctctagaggatctggagcaacaaacttctcactactcaaacaagcaggtgacgtggaggagaatcccgggcctgggatccacatggccacttacgaggttctctgtgaggtggcgcggaaactgggcacggatgacagggaagtggtattgttcctcctaaacgtgttcatacctcaacccacactggcccaattaattggagctcttagagctttaaaggaggagggcaggttaacgtttcccctgttagcggaatgtctgtttcgtgcaggtcgcagagacctcttgcgcgacctgcttcacttagacccgcgttttttagagcgccacctagcgggcacaatgagttatttcagcccttatcagctcactgttctccacgtagacggggagctgtgtgcgagggatattaggtctttgatatttttaagcaaggacactatagggtctcgcagcacaccacagacattcttacactgggtgtactgtatggaaaacttagacctactgggtcccactgacgtggatgccctaatgtcaatgcttagatctttgtcaagagtagacctacagcgccaagtgcaaaccctaatgggccttcacctttccggcccatcacactcccaacactatcgccatacaccactcgagaccgatttctacgactacaaggacgacgatgacaagactagtggctccggcgagggcagaggaagtctactaacctgcggagatgtggaagaaaatcctggcccacatatgaccgagtacaagcccacggtgcgcctcgccacccgcgacgacgtccccagggccgtacgcaccctcgccgccgcgttcgccgactaccccgccacgcgccacaccgtcgatccggaccgccacatcgagcgggtcaccgagctgcaagaactcttcctcacgcgcgtcgggctcgacatcggcaaggtgtgggtcgcggacgacggcgccgcggtggcggtctggaccacgccggagagcgtcgaagcgggggcggtgttcgccgagatcggcccgcgcatggccgagttgagcggttcccggctggccgcgcagcaacagatggaaggcctcctggcgccgcaccggcccaaggagcccgcgtggttcctggccaccgtcggcgtctcgcccgaccaccagggcaagggtctgggcagcgccgtcgtgctccccggagtggaggcggccgagcgcgccggggtgcccgccttcctggagacctccgcgccccgcaacctccccttctacgagcggctcggcttcaccgtcaccgccgacgtcgaggtgcccgaaggaccgcgcacctggtgcatgacccgcaagcccggtgcctga

SEQ ID NO: 996 - DNA, 2754 bp, Artificial Sequence
  Synthetic Polynucleotides
atggccttaccagtgaccgccttgctcctgccgctggccttgctgctccacgccgccaggccggacgacatccagttgacccagtcccccagctcactcagcgccagtgtgggggaccgggtgaccattacctgtaaagccagtcagagtgtggactatgagggggatagcttcctgaattggtatcagcagaagcctggcaaagccccaaagctgctgatctacgctgcatctaatctggagtcaggcgtgccttctaggttctccggtagtgggtctgggaccgatttcacattgaccatttcatccctccaacccgaggatttcgctacatattactgtcagcagtccaatgaggaccctctcacctttggccagggcaccaaagttgaaattaagagaggcggaggcggaagtggaggcggaggatctggcggcggaggctctgaagtccaacttgtggagtctggagggggcctggtgcagcccggcggctctctcagactgtcttgtgcggcaagcggctacaccttcagctcttactggatagaatgggtgaggcaggcacctggaaagggactggagtggattggagagattctgccaggagggggagatacaaattacaatgaaatcttcaaggggcgggccaccttttcagcggataccagcaagaatacagcttacctgcagatgaatagcctccgggcagaagataccgctgtttattattgcacgagacgggtgccaataagactggactattgggggcaagggactcttgtcaccgtcagttcaacgcgtgagcagaaactgatctcggaagaggatctggcgaagcccaccacgacgccagcgccgcgaccaccaacaccggcgcccaccatcgcgtcgcagcccctgtccctgcgcccagaggcgtgccggccagcggcggggggcgcagtgcacacgagggggctggacttcgcctgtgacatctacatctgggcgcccttggccgggacttgtggggtccttctcctgtcactggttatcaccctttactgcgggcgcgccagagtgaagttcagcaggagcgcagacgcccccgcgtaccagcagggccagaaccagctctataacgagctgaatctaggacgaagagaggagtacgatgttttggacaagagacgtggccgggaccctgagatggggggaaagccgagaaggaagaaccctcaggaaggcctgtacaatgaactgcagaaagataagatggcggaggcctacagtgagattgggatgaaaggcgagcgccggaggggcaaggggcacgatggcctttaccagggtctcagtacagccaccaaggacacctacgacgcccttcacatgcaggccctgccccctcgctctagaggatctggagcaacaaacttctcactactcaaacaagcaggtgacgtggaggagaatcccgggcctgggatccacatggccacttacgaggttctctgtgaggtggcgcggaaactgggcacggatgacagggaagtggtattgttcctcctaaacgtgttcatacctcaacccacactggcccaattaattggagctcttagagctttaaaggaggagggcaggttaacgtttcccctgttagcggaatgtctgtttcgtgcaggtcgcagagacctcttgcgcgacctgcttcacttagacccgcgttttttagagcgccacctagcgggcacaatgagttatttcagcccttatcagctcactgttctccacgtagacggggagctgtgtgcgagggatattaggtctttgatatttttaagcaaggacactatagggtctcgcagcacaccacagacattcttacactgggtgtactgtatggaaaacttagacctactgggtcccactgacgtggatgccctaatgtcaatgcttagatctttgtcaagagtagacctacagcgccaagtgcaaaccctaatgggccttcacctttccggcccatcacactcccaacactatcgccatacaccactcgagaccgatttctacgactacaaggacgacgatgacaagactagtggctccggcgagggcagaggaagtctactaacctgcggagatgtggaagaaaatcctggcccacatatgaccgagtacaagcccacggtgcgcctcgccacccgcgacgacgtccccagggccgtacgcaccctcgccgccgcgttcgccgactaccccgccacgcgccacaccgtcgatccggaccgccacatcgagcgggtcaccgagctgcaagaactcttcctcacgcgcgtcgggctcgacatcggcaaggtgtgggtcgcggacgacggcgccgcggtggcggtctggaccacgccggagagcgtcgaagcgggggcggtgttcgccgagatcggcccgcgcatggccgagttgagcggttcccggctggccgcgcagcaacagatggaaggcctcctggcgccgcaccggcccaaggagcccgcgtggttcctggccaccgtcggcgtctcgcccgaccaccagggcaagggtctgggcagcgccgtcgtgctccccggagtggaggcggccgagcgcgccggggtgcccgccttcctggagacctccgcgccccgcaacctccccttctacgagcggctcggcttcaccgtcaccgccgacgtcgaggtgcccgaaggaccgcgcacctggtgcatgacccgcaagcccggtgcctga

SEQ ID NO: 997 - DNA, 2742 bp, Artificial Sequence
  Synthetic Polynucleotides
atggccttaccagtgaccgccttgctcctgccgctggccttgctgctccacgccgccaggccggacatcgtgatgacccagacacctctgagcctgagcgtgacacctggacagcctgccagcattagctgcaagagcagccagtctctgctggacggcgacggcaagacctacctgaattggctgctccagaagcctggacagagccctcagcggctgatctacctggtgtccaagctggatagcggcgtgcccgatagattttctggcagcggctctggcaccgacttcaccctgaagatcagcagagtggaagccgaggacgtgggcgtgtactactgttggcagggcacacacttccccagaacattcggccagggcacaaagctggaaatcaaaggcggaggcggaagtggaggcggaggatctggcggcggaggctctcaagtgcaactggttcagagcggagccgaagtgaagaaacctggggcctctgtgaaggtgtcctgcaaggccagcggctacaccttcaaggacacctacatccactgggtccgacaggcccctggacaaggacttgagtggatgggcagaatcgaccccgccaacggcaacaccaaatacgaccccaagttccagggcagagtgaccatgaccagagacaccagcatcagcaccgcctacatggaactgagccggctgagatccgatgacaccgccgtgtactattgcgctagaagaggcggagtggattggggccagggaacactggttaccgtgtctagtacgcgtgagcagaaactgatctcggaagaggatctggcgaagcccaccacgacgccagcgccgcgaccaccaacaccggcgcccaccatcgcgtcgcagcccctgtccctgcgcccagaggcgtgccggccagcggcggggggcgcagtgcacacgagggggctggacttcgcctgtgacatctacatctgggcgcccttggccgggacttgtggggtccttctcctgtcactggttatcaccctttactgcgggcgcgccagagtgaagttcagcaggagcgcagacgcccccgcgtaccagcagggccagaaccagctctataacgagctgaatctaggacgaagagaggagtacgatgttttggacaagagacgtggccgggaccctgagatggggggaaagccgagaaggaagaaccctcaggaaggcctgtacaatgaactgcagaaagataagatggcggaggcctacagtgagattgggatgaaaggcgagcgccggaggggcaaggggcacgatggcctttaccagggtctcagtacagccaccaaggacacctacgacgcccttcacatgcaggccctgccccctcgctctagaggatctggagcaacaaacttctcactactcaaacaagcaggtgacgtggaggagaatcccgggcctgggatccacatggccacttacgaggttctctgtgaggtggcgcggaaactgggcacggatgacagggaagtggtattgttcctcctaaacgtgttcatacctcaacccacactggcccaattaattggagctcttagagctttaaaggaggagggcaggttaacgtttcccctgttagcggaatgtctgtttcgtgcaggtcgcagagacctcttgcgcgacctgcttcacttagacccgcgttttttagagcgccacctagcgggcacaatgagttatttcagcccttatcagctcactgttctccacgtagacggggagctgtgtgcgagggatattaggtctttgatatttttaagcaaggacactatagggtctcgcagcacaccacagacattcttacactgggtgtactgtatggaaaacttagacctactgggtcccactgacgtggatgccctaatgtcaatgcttagatctttgtcaagagtagacctacagcgccaagtgcaaaccctaatgggccttcacctttccggcccatcacactcccaacactatcgccatacaccactcgagaccgatttctacgactacaaggacgacgatgacaagactagtggctccggcgagggcagaggaagtctactaacctgcggagatgtggaagaaaatcctggcccacatatgaccgagtacaagcccacggtgcgcctcgccacccgcgacgacgtccccagggccgtacgcaccctcgccgccgcgttcgccgactaccccgccacgcgccacaccgtcgatccggaccgccacatcgagcgggtcaccgagctgcaagaactcttcctcacgcgcgtcgggctcgacatcggcaaggtgtgggtcgcggacgacggcgccgcggtggcggtctggaccacgccggagagcgtcgaagcgggggcggtgttcgccgagatcggcccgcgcatggccgagttgagcggttcccggctggccgcgcagcaacagatggaaggcctcctggcgccgcaccggcccaaggagcccgcgtggttcctggccaccgtcggcgtctcgcccgaccaccagggcaagggtctgggcagcgccgtcgtgctccccggagtggaggcggccgagcgcgccggggtgcccgccttcctggagacctccgcgccccgcaacctccccttctacgagcggctcggcttcaccgtcaccgccgacgtcgaggtgcccgaaggaccgcgcacctggtgcatgacccgcaagcccggtgcctga

SEQ ID NO: 998 - DNA, 2766 bp, Artificial Sequence
  Synthetic Polynucleotides
atggccttaccagtgaccgccttgctcctgccgctggccttgctgctccacgccgccaggccggacatcgtgatgacccagagccccgatagcctggccgtgtctctgggagagagagccaccatcaactgcgagagcagccagagcctgctgaacagcggcaaccagaagaactacctgacctggtatcagcagaagcccggccagccccccaagcccctgatctattgggccagcaccagagaaagcggcgtgcccgatagattcagcggcagcggaagcggcaccgacttcaccctgaccatcagttctcttcaggccgaggacgtggccgtgtactactgccagaacgactacagctacccctacaccttcggccagggcaccaagctggaaatcaagagaggcggaggcggaagtggaggcggaggatctggcggcggaggctctgaagtgcagctggtgcagtctggggccgaagtgaagaagcctggcgagagcctgaagatcagctgcaagggcagcggctacagcttcaccgactactacatgaagtgggccagacagatgcccggcaagggcctggaatggatgggcgacatcatccccagcaacggggccaccttctacaaccagaaattcaagggccaagtgaccatctccgccgacaagagcatcagcaccacctacctccagtggtccagcctgaaggccagcgacaccgccatgtactattgcgccagaagccatctgctgcgggccagttggttcgcctattggggccagggaacaatggtcacagtgtccagcacgcgtgagcagaaactgatctcggaagaggatctggcgaagcccaccacgacgccagcgccgcgaccaccaacaccggcgcccaccatcgcgtcgcagcccctgtccctgcgcccagaggcgtgccggccagcggcggggggcgcagtgcacacgagggggctggacttcgcctgtgacatctacatctgggcgcccttggccgggacttgtggggtccttctcctgtcactggttatcaccctttactgcgggcgcgccagagtgaagttcagcaggagcgcagacgcccccgcgtaccagcagggccagaaccagctctataacgagctgaatctaggacgaagagaggagtacgatgttttggacaagagacgtggccgggaccctgagatggggggaaagccgagaaggaagaaccctcaggaaggcctgtacaatgaactgcagaaagataagatggcggaggcctacagtgagattgggatgaaaggcgagcgccggaggggcaaggggcacgatggcctttaccagggtctcagtacagccaccaaggacacctacgacgcccttcacatgcaggccctgccccctcgctctagaggatctggagcaacaaacttctcactactcaaacaagcaggtgacgtggaggagaatcccgggcctgggatccacatggccacttacgaggttctctgtgaggtggcgcggaaactgggcacggatgacagggaagtggtattgttcctcctaaacgtgttcatacctcaacccacactggcccaattaattggagctcttagagctttaaaggaggagggcaggttaacgtttcccctgttagcggaatgtctgtttcgtgcaggtcgcagagacctcttgcgcgacctgcttcacttagacccgcgttttttagagcgccacctagcgggcacaatgagttatttcagcccttatcagctcactgttctccacgtagacggggagctgtgtgcgagggatattaggtctttgatatttttaagcaaggacactatagggtctcgcagcacaccacagacattcttacactgggtgtactgtatggaaaacttagacctactgggtcccactgacgtggatgccctaatgtcaatgcttagatctttgtcaagagtagacctacagcgccaagtgcaaaccctaatgggccttcacctttccggcccatcacactcccaacactatcgccatacaccactcgagaccgatttctacgactacaaggacgacgatgacaagactagtggctccggcgagggcagaggaagtctactaacctgcggagatgtggaagaaaatcctggcccacatatgaccgagtacaagcccacggtgcgcctcgccacccgcgacgacgtccccagggccgtacgcaccctcgccgccgcgttcgccgactaccccgccacgcgccacaccgtcgatccggaccgccacatcgagcgggtcaccgagctgcaagaactcttcctcacgcgcgtcgggctcgacatcggcaaggtgtgggtcgcggacgacggcgccgcggtggcggtctggaccacgccggagagcgtcgaagcgggggcggtgttcgccgagatcggcccgcgcatggccgagttgagcggttcccggctggccgcgcagcaacagatggaaggcctcctggcgccgcaccggcccaaggagcccgcgtggttcctggccaccgtcggcgtctcgcccgaccaccagggcaagggtctgggcagcgccgtcgtgctccccggagtggaggcggccgagcgcgccggggtgcccgccttcctggagacctccgcgccccgcaacctccccttctacgagcggctcggcttcaccgtcaccgccgacgtcgaggtgcccgaaggaccgcgcacctggtgcatgacccgcaagcccggtgcctga

SEQ ID NO: 999 - DNA, 2751 bp, Artificial Sequence
  Synthetic Polynucleotides
atggccttaccagtgaccgccttgctcctgccgctggccttgctgctccacgccgccaggccggacatcgtgctgacacagagccctgcttctctggccgtgtctctgggacagagagccaccatcagctgtagagccagcgagagcgtggacaactacggcaacaccttcatgcactggtatcagcagaagcccggccagcctcctaagctgctgatctacagagccagcaacctggaaagcggcatccccgccagattttctggcagcggcagcagaaccgacttcaccctgaccatcaatcccgtggaagccgacgacgtggcaacctactactgccagcagagcaacgaggaccctcctacatttggagccggcaccaagctggaactgaaaggcggaggcggaagtggaggcggaggatctggcggcggaggctctcagattcagctggtgcagtctggccccgagctgaagaaacctggcgagacagtgaagatcagctgcaaggccagcggctacatcttcaccaattacggcatgaactgggtcaagcaggcccctggcaagagcttcaagtggatgggctggatcaacacctacaccggcgagagcacatacagcgccgacttcaagggcagattcgccttcagcctggaaaccagcgccagcacagcctacctgcacatcaacgacctgaagaacgaggacaccgccacctacttttgcgccagaagcggcggctacgaccctatggattattggggccagggcaccagcgtgaccgtttcttctacgcgtgagcagaaactgatctcggaagaggatctggcgaagcccaccacgacgccagcgccgcgaccaccaacaccggcgcccaccatcgcgtcgcagcccctgtccctgcgcccagaggcgtgccggccagcggcggggggcgcagtgcacacgagggggctggacttcgcctgtgacatctacatctgggcgcccttggccgggacttgtggggtccttctcctgtcactggttatcaccctttactgcgggcgcgccagagtgaagttcagcaggagcgcagacgcccccgcgtaccagcagggccagaaccagctctataacgagctgaatctaggacgaagagaggagtacgatgttttggacaagagacgtggccgggaccctgagatggggggaaagccgagaaggaagaaccctcaggaaggcctgtacaatgaactgcagaaagataagatggcggaggcctacagtgagattgggatgaaaggcgagcgccggaggggcaaggggcacgatggcctttaccagggtctcagtacagccaccaaggacacctacgacgcccttcacatgcaggccctgccccctcgctctagaggatctggagcaacaaacttctcactactcaaacaagcaggtgacgtggaggagaatcccgggcctgggatccacatggccacttacgaggttctctgtgaggtggcgcggaaactgggcacggatgacagggaagtggtattgttcctcctaaacgtgttcatacctcaacccacactggcccaattaattggagctcttagagctttaaaggaggagggcaggttaacgtttcccctgttagcggaatgtctgtttcgtgcaggtcgcagagacctcttgcgcgacctgcttcacttagacccgcgttttttagagcgccacctagcgggcacaatgagttatttcagcccttatcagctcactgttctccacgtagacggggagctgtgtgcgagggatattaggtctttgatatttttaagcaaggacactatagggtctcgcagcacaccacagacattcttacactgggtgtactgtatggaaaacttagacctactgggtcccactgacgtggatgccctaatgtcaatgcttagatctttgtcaagagtagacctacagcgccaagtgcaaaccctaatgggccttcacctttccggcccatcacactcccaacactatcgccatacaccactcgagaccgatttctacgactacaaggacgacgatgacaagactagtggctccggcgagggcagaggaagtctactaacctgcggagatgtggaagaaaatcctggcccacatatgaccgagtacaagcccacggtgcgcctcgccacccgcgacgacgtccccagggccgtacgcaccctcgccgccgcgttcgccgactaccccgccacgcgccacaccgtcgatccggaccgccacatcgagcgggtcaccgagctgcaagaactcttcctcacgcgcgtcgggctcgacatcggcaaggtgtgggtcgcggacgacggcgccgcggtggcggtctggaccacgccggagagcgtcgaagcgggggcggtgttcgccgagatcggcccgcgcatggccgagttgagcggttcccggctggccgcgcagcaacagatggaaggcctcctggcgccgcaccggcccaaggagcccgcgtggttcctggccaccgtcggcgtctcgcccgaccaccagggcaagggtctgggcagcgccgtcgtgctccccggagtggaggcggccgagcgcgccggggtgcccgccttcctggagacctccgcgccccgcaacctccccttctacgagcggctcggcttcaccgtcaccgccgacgtcgaggtgcccgaaggaccgcgcacctggtgcatgacccgcaagcccggtgcctga

SEQ ID NO: 1000 - DNA, 2763 bp, Artificial Sequence
  Synthetic Polynucleotides
atggccttaccagtgaccgccttgctcctgccgctggccttgctgctccacgccgccaggccggacttcgtgatgacacagagccctgatagcctggccgtgtctctcggcgagcgagtgaccatgagctgcaagtctagccagagcctgctgaacagcggcaaccagaagaactacctgacctggtatcagcagaagcccggccagcctcctaagctgctgatctactgggccagcaccagagaaagcggcgtgcccgatagattttctggctctggcagcggcaccgacttcaccctgacaatttctagcctgcaagccgaggacgtggccgtgtactactgccagaacgactacagctacccctacaccttcggccagggcaccaagctggaaatcaaaggcggaggcggaagtggaggcggaggatctggcggcggaggctctgaagtgcaactggttcagagcggagccgagctgaagaaacctggggccagcgtgaaggtgtcctgtaaagccagcggctacacctttaccgactactacatgaaatgggtccgacaggccccaggccagggactcgaatggatcggcgatattatccccagcaacggggccaccttctacaaccagaaattcaagggccgcgtgaccatcaccgtggacaagagcacaagcaccgcctacatggaactgagcagcctgagaagcgaggacaccgccgtgtattattgcgccagaagccatctgctgcgggccagttggttcgcctattggggacagggaaccctggtcaccgttagctctacgcgtgagcagaaactgatctcggaagaggatctggcgaagcccaccacgacgccagcgccgcgaccaccaacaccggcgcccaccatcgcgtcgcagcccctgtccctgcgcccagaggcgtgccggccagcggcggggggcgcagtgcacacgagggggctggacttcgcctgtgacatctacatctgggcgcccttggccgggacttgtggggtccttctcctgtcactggttatcaccctttactgcgggcgcgccagagtgaagttcagcaggagcgcagacgcccccgcgtaccagcagggccagaaccagctctataacgagctgaatctaggacgaagagaggagtacgatgttttggacaagagacgtggccgggaccctgagatggggggaaagccgagaaggaagaaccctcaggaaggcctgtacaatgaactgcagaaagataagatggcggaggcctacagtgagattgggatgaaaggcgagcgccggaggggcaaggggcacgatggcctttaccagggtctcagtacagccaccaaggacacctacgacgcccttcacatgcaggccctgccccctcgctctagaggatctggagcaacaaacttctcactactcaaacaagcaggtgacgtggaggagaatcccgggcctgggatccacatggccacttacgaggttctctgtgaggtggcgcggaaactgggcacggatgacagggaagtggtattgttcctcctaaacgtgttcatacctcaacccacactggcccaattaattggagctcttagagctttaaaggaggagggcaggttaacgtttcccctgttagcggaatgtctgtttcgtgcaggtcgcagagacctcttgcgcgacctgcttcacttagacccgcgttttttagagcgccacctagcgggcacaatgagttatttcagcccttatcagctcactgttctccacgtagacggggagctgtgtgcgagggatattaggtctttgatatttttaagcaaggacactatagggtctcgcagcacaccacagacattcttacactgggtgtactgtatggaaaacttagacctactgggtcccactgacgtggatgccctaatgtcaatgcttagatctttgtcaagagtagacctacagcgccaagtgcaaaccctaatgggccttcacctttccggcccatcacactcccaacactatcgccatacaccactcgagaccgatttctacgactacaaggacgacgatgacaagactagtggctccggcgagggcagaggaagtctactaacctgcggagatgtggaagaaaatcctggcccacatatgaccgagtacaagcccacggtgcgcctcgccacccgcgacgacgtccccagggccgtacgcaccctcgccgccgcgttcgccgactaccccgccacgcgccacaccgtcgatccggaccgccacatcgagcgggtcaccgagctgcaagaactcttcctcacgcgcgtcgggctcgacatcggcaaggtgtgggtcgcggacgacggcgccgcggtggcggtctggaccacgccggagagcgtcgaagcgggggcggtgttcgccgagatcggcccgcgcatggccgagttgagcggttcccggctggccgcgcagcaacagatggaaggcctcctggcgccgcaccggcccaaggagcccgcgtggttcctggccaccgtcggcgtctcgcccgaccaccagggcaagggtctgggcagcgccgtcgtgctccccggagtggaggcggccgagcgcgccggggtgcccgccttcctggagacctccgcgccccgcaacctccccttctacgagcggctcggcttcaccgtcaccgccgacgtcgaggtgcccgaaggaccgcgcacctggtgcatgacccgcaagcccggtgcctga

SEQ ID NO: 1001 - DNA, 2763 bp, Artificial Sequence
  Synthetic Polynucleotides
atggccttaccagtgaccgccttgctcctgccgctggccttgctgctccacgccgccaggccggacttcgtgatgacacagagccctgatagcctggccgtgtctctcggcgagcgagtgaccatgagctgcaagtctagccagagcctgctgaacagcggcaaccagaagaactacctgacctggtatcagcagaagcccggccagcctcctaagctgctgatctactgggccagcaccagagaaagcggcgtgcccgatagattttctggctctggcagcggcaccgacttcaccctgacaatttctagcctgcaagccgaggacgtggccgtgtactactgccagaacgactacagctacccctacaccttcggccagggcaccaagctggaaatcaaaggcggaggcggaagtggaggcggaggatctggcggcggaggctctcaagtgcaactggttcagagcggagccgagctgaagaaacctggggccagcgtgaaggtgtcctgtaaagccagcggctacacctttaccgactactacatgaaatgggtccgacaggccccaggccagggactcgaatggatcggcgatattatccccagcaacggggccaccttctacaaccagaaattcaagggccgcgtgaccatcaccgtggacaagagcacaagcaccgcctacatggaactgagcagcctgagaagcgaggacaccgccgtgtattattgcgccagaagccatctgctgcgggccagttggttcgcctattggggacagggaaccctggtcaccgttagctctacgcgtgagcagaaactgatctcggaagaggatctggcgaagcccaccacgacgccagcgccgcgaccaccaacaccggcgcccaccatcgcgtcgcagcccctgtccctgcgcccagaggcgtgccggccagcggcggggggcgcagtgcacacgagggggctggacttcgcctgtgacatctacatctgggcgcccttggccgggacttgtggggtccttctcctgtcactggttatcaccctttactgcgggcgcgccagagtgaagttcagcaggagcgcagacgcccccgcgtaccagcagggccagaaccagctctataacgagctgaatctaggacgaagagaggagtacgatgttttggacaagagacgtggccgggaccctgagatggggggaaagccgagaaggaagaaccctcaggaaggcctgtacaatgaactgcagaaagataagatggcggaggcctacagtgagattgggatgaaaggcgagcgccggaggggcaaggggcacgatggcctttaccagggtctcagtacagccaccaaggacacctacgacgcccttcacatgcaggccctgccccctcgctctagaggatctggagcaacaaacttctcactactcaaacaagcaggtgacgtggaggagaatcccgggcctgggatccacatggccacttacgaggttctctgtgaggtggcgcggaaactgggcacggatgacagggaagtggtattgttcctcctaaacgtgttcatacctcaacccacactggcccaattaattggagctcttagagctttaaaggaggagggcaggttaacgtttcccctgttagcggaatgtctgtttcgtgcaggtcgcagagacctcttgcgcgacctgcttcacttagacccgcgttttttagagcgccacctagcgggcacaatgagttatttcagcccttatcagctcactgttctccacgtagacggggagctgtgtgcgagggatattaggtctttgatatttttaagcaaggacactatagggtctcgcagcacaccacagacattcttacactgggtgtactgtatggaaaacttagacctactgggtcccactgacgtggatgccctaatgtcaatgcttagatctttgtcaagagtagacctacagcgccaagtgcaaaccctaatgggccttcacctttccggcccatcacactcccaacactatcgccatacaccactcgagaccgatttctacgactacaaggacgacgatgacaagactagtggctccggcgagggcagaggaagtctactaacctgcggagatgtggaagaaaatcctggcccacatatgaccgagtacaagcccacggtgcgcctcgccacccgcgacgacgtccccagggccgtacgcaccctcgccgccgcgttcgccgactaccccgccacgcgccacaccgtcgatccggaccgccacatcgagcgggtcaccgagctgcaagaactcttcctcacgcgcgtcgggctcgacatcggcaaggtgtgggtcgcggacgacggcgccgcggtggcggtctggaccacgccggagagcgtcgaagcgggggcggtgttcgccgagatcggcccgcgcatggccgagttgagcggttcccggctggccgcgcagcaacagatggaaggcctcctggcgccgcaccggcccaaggagcccgcgtggttcctggccaccgtcggcgtctcgcccgaccaccagggcaagggtctgggcagcgccgtcgtgctccccggagtggaggcggccgagcgcgccggggtgcccgccttcctggagacctccgcgccccgcaacctccccttctacgagcggctcggcttcaccgtcaccgccgacgtcgaggtgcccgaaggaccgcgcacctggtgcatgacccgcaagcccggtgcctga

SEQ ID NO: 1002 - DNA, 2745 bp, Artificial Sequence
  Synthetic Polynucleotides
atggccttaccagtgaccgccttgctcctgccgctggccttgctgctccacgccgccaggccggagatcgtgctgacacagagccctggcacactgtcactgtctccaggcgaaagagccacactgagctgtagagccagccagagcgtgtccagctcttacctggcttggtatcagcagaagcccggacaggctcccagactgctgatctacggtgcctctagcagagccacaggcatccccgatagattttctggcagcggctccggcaccgacttcaccctgacaatcagcagactggaacccgaggacttcgccgtgtactactgccagcaggactacggcttcccttggacctttggacagggcaccaaggtggaaatcaagagaggcggaggcggaagtggaggcggaggatctggcggcggaggctctgaagttcaactggttcagagcggagccgaagtgaagaagcctggcgagagcctgaagattagctgcaaaggctccggctactccttcaccagctactggatctcttgggtccgacagatgcccggcaaaggactggaatggatgggcatcatcgaccccagcgacagcgacaccagatacagccctagcttccagggccaagtgaccatcagcgccgacaagagcatcagcacagcctacctccagtggtcctctctgaaggccagcgataccgccatgtactattgcgccagaggcgacggcagcaccgacctggattattggggacagggaaccctggtcaccgtgtctagtacgcgtgagcagaaactgatctcggaagaggatctggcgaagcccaccacgacgccagcgccgcgaccaccaacaccggcgcccaccatcgcgtcgcagcccctgtccctgcgcccagaggcgtgccggccagcggcggggggcgcagtgcacacgagggggctggacttcgcctgtgacatctacatctgggcgcccttggccgggacttgtggggtccttctcctgtcactggttatcaccctttactgcgggcgcgccagagtgaagttcagcaggagcgcagacgcccccgcgtaccagcagggccagaaccagctctataacgagctgaatctaggacgaagagaggagtacgatgttttggacaagagacgtggccgggaccctgagatggggggaaagccgagaaggaagaaccctcaggaaggcctgtacaatgaactgcagaaagataagatggcggaggcctacagtgagattgggatgaaaggcgagcgccggaggggcaaggggcacgatggcctttaccagggtctcagtacagccaccaaggacacctacgacgcccttcacatgcaggccctgccccctcgctctagaggatctggagcaacaaacttctcactactcaaacaagcaggtgacgtggaggagaatcccgggcctgggatccacatggccacttacgaggttctctgtgaggtggcgcggaaactgggcacggatgacagggaagtggtattgttcctcctaaacgtgttcatacctcaacccacactggcccaattaattggagctcttagagctttaaaggaggagggcaggttaacgtttcccctgttagcggaatgtctgtttcgtgcaggtcgcagagacctcttgcgcgacctgcttcacttagacccgcgttttttagagcgccacctagcgggcacaatgagttatttcagcccttatcagctcactgttctccacgtagacggggagctgtgtgcgagggatattaggtctttgatatttttaagcaaggacactatagggtctcgcagcacaccacagacattcttacactgggtgtactgtatggaaaacttagacctactgggtcccactgacgtggatgccctaatgtcaatgcttagatctttgtcaagagtagacctacagcgccaagtgcaaaccctaatgggccttcacctttccggcccatcacactcccaacactatcgccatacaccactcgagaccgatttctacgactacaaggacgacgatgacaagactagtggctccggcgagggcagaggaagtctactaacctgcggagatgtggaagaaaatcctggcccacatatgaccgagtacaagcccacggtgcgcctcgccacccgcgacgacgtccccagggccgtacgcaccctcgccgccgcgttcgccgactaccccgccacgcgccacaccgtcgatccggaccgccacatcgagcgggtcaccgagctgcaagaactcttcctcacgcgcgtcgggctcgacatcggcaaggtgtgggtcgcggacgacggcgccgcggtggcggtctggaccacgccggagagcgtcgaagcgggggcggtgttcgccgagatcggcccgcgcatggccgagttgagcggttcccggctggccgcgcagcaacagatggaaggcctcctggcgccgcaccggcccaaggagcccgcgtggttcctggccaccgtcggcgtctcgcccgaccaccagggcaagggtctgggcagcgccgtcgtgctccccggagtggaggcggccgagcgcgccggggtgcccgccttcctggagacctccgcgccccgcaacctccccttctacgagcggctcggcttcaccgtcaccgccgacgtcgaggtgcccgaaggaccgcgcacctggtgcatgacccgcaagcccggtgcctga

SEQ ID NO: 1003 - DNA, 2751 bp, Artificial Sequence
  Synthetic Polynucleotides
atggccttaccagtgaccgccttgctcctgccgctggccttgctgctccacgccgccaggccgcagttcgtgctgacacagcctccaagcgtgtccaccaatcctggcagcacagtgaagctgagctgcaagagaaacaccggcaacatcggcagcaactacgtgaactggtatcagcagaagcccggacagagccccaccaccatgatctacagagatgacaagaggcccgacggcgtgcccgatagattttccggctctatcgacagaagcagcaacagcgccctgctgaccatcaacaacgtgcagacagaggacgaggccgactacttctgccagagctacagcagcggcatcaacatcatcttcggcggaggcaccaagctgacagttcttggcggaggcggaagtggaggcggaggatctggcggcggaggctctcaagtgcagctccaagaatctggccctggcctggtcaagcctagcgagacactgagcctgacctgtaccgtgtccggctttagcctgaccacctacgacgtgcactgggtccgacaacctccaggcaaaggactggaatggatgggcagaatccagaacgccggcatcaccgactacaatagcgccctgaagtcccggctgattatctccagagacaccagcaagagccaggtgttcctgaagatgaacagcgtgaccaccgccgacaccgccatgtacttttgtgccaagaccggcagctacttctacgccttcgatcactggggccagggcacactggttaccgtttcttctacgcgtgagcagaaactgatctcggaagaggatctggcgaagcccaccacgacgccagcgccgcgaccaccaacaccggcgcccaccatcgcgtcgcagcccctgtccctgcgcccagaggcgtgccggccagcggcggggggcgcagtgcacacgagggggctggacttcgcctgtgacatctacatctgggcgcccttggccgggacttgtggggtccttctcctgtcactggttatcaccctttactgcgggcgcgccagagtgaagttcagcaggagcgcagacgcccccgcgtaccagcagggccagaaccagctctataacgagctgaatctaggacgaagagaggagtacgatgttttggacaagagacgtggccgggaccctgagatggggggaaagccgagaaggaagaaccctcaggaaggcctgtacaatgaactgcagaaagataagatggcggaggcctacagtgagattgggatgaaaggcgagcgccggaggggcaaggggcacgatggcctttaccagggtctcagtacagccaccaaggacacctacgacgcccttcacatgcaggccctgccccctcgctctagaggatctggagcaacaaacttctcactactcaaacaagcaggtgacgtggaggagaatcccgggcctgggatccacatggccacttacgaggttctctgtgaggtggcgcggaaactgggcacggatgacagggaagtggtattgttcctcctaaacgtgttcatacctcaacccacactggcccaattaattggagctcttagagctttaaaggaggagggcaggttaacgtttcccctgttagcggaatgtctgtttcgtgcaggtcgcagagacctcttgcgcgacctgcttcacttagacccgcgttttttagagcgccacctagcgggcacaatgagttatttcagcccttatcagctcactgttctccacgtagacggggagctgtgtgcgagggatattaggtctttgatatttttaagcaaggacactatagggtctcgcagcacaccacagacattcttacactgggtgtactgtatggaaaacttagacctactgggtcccactgacgtggatgccctaatgtcaatgcttagatctttgtcaagagtagacctacagcgccaagtgcaaaccctaatgggccttcacctttccggcccatcacactcccaacactatcgccatacaccactcgagaccgatttctacgactacaaggacgacgatgacaagactagtggctccggcgagggcagaggaagtctactaacctgcggagatgtggaagaaaatcctggcccacatatgaccgagtacaagcccacggtgcgcctcgccacccgcgacgacgtccccagggccgtacgcaccctcgccgccgcgttcgccgactaccccgccacgcgccacaccgtcgatccggaccgccacatcgagcgggtcaccgagctgcaagaactcttcctcacgcgcgtcgggctcgacatcggcaaggtgtgggtcgcggacgacggcgccgcggtggcggtctggaccacgccggagagcgtcgaagcgggggcggtgttcgccgagatcggcccgcgcatggccgagttgagcggttcccggctggccgcgcagcaacagatggaaggcctcctggcgccgcaccggcccaaggagcccgcgtggttcctggccaccgtcggcgtctcgcccgaccaccagggcaagggtctgggcagcgccgtcgtgctccccggagtggaggcggccgagcgcgccggggtgcccgccttcctggagacctccgcgccccgcaacctccccttctacgagcggctcggcttcaccgtcaccgccgacgtcgaggtgcccgaaggaccgcgcacctggtgcatgacccgcaagcccggtgcctga

SEQ ID NO: 1004 - DNA, 2742 bp, Artificial Sequence
  Synthetic Polynucleotides
atggccttaccagtgaccgccttgctcctgccgctggccttgctgctccacgccgccaggccggacatccagatgacacagtctccagccagcctgtctgcctctctgggagagacagtgaccatcgagtgcagacccagcgaggacatccacagcaacgtggcctggtatcagcagaagcccggcaattctccccagctgctgatctacgacgccagcaatctggctgatggcgtgcccagcagattttctggcagcggctctggcacacagtacagcctgaagatcaacagcctccagagcgaggacgtggcctcctacttctgccaccagtacaacatctacccctacaccttcggcagcggcaccaagctggaacttaaaggcggaggcggaagtggaggcggaggatctggcggcggaggctctcaagttcagctgcaagagtctggccccacactggtcaagcctggcgatagcgtgaagatgagctgcaaggccagcggctacacctttaccgactacatcatccactgggtcaagcagagccacggcaagagcctggaatggatcggctacatcaacccttacagcgacggcaccaactacaacgagaagttcaagagcaaggccacactgaccgtggacaagagcaccagcacagcctacatggaattttcccggctgacctccgaggacagcgccatctatttctgcgccctgaactacggcagctactacgctatggatgcctggggccagggcacaagcgtgacagtttcttctacgcgtgagcagaaactgatctcggaagaggatctggcgaagcccaccacgacgccagcgccgcgaccaccaacaccggcgcccaccatcgcgtcgcagcccctgtccctgcgcccagaggcgtgccggccagcggcggggggcgcagtgcacacgagggggctggacttcgcctgtgacatctacatctgggcgcccttggccgggacttgtggggtccttctcctgtcactggttatcaccctttactgcgggcgcgccagagtgaagttcagcaggagcgcagacgcccccgcgtaccagcagggccagaaccagctctataacgagctgaatctaggacgaagagaggagtacgatgttttggacaagagacgtggccgggaccctgagatggggggaaagccgagaaggaagaaccctcaggaaggcctgtacaatgaactgcagaaagataagatggcggaggcctacagtgagattgggatgaaaggcgagcgccggaggggcaaggggcacgatggcctttaccagggtctcagtacagccaccaaggacacctacgacgcccttcacatgcaggccctgccccctcgctctagaggatctggagcaacaaacttctcactactcaaacaagcaggtgacgtggaggagaatcccgggcctgggatccacatggccacttacgaggttctctgtgaggtggcgcggaaactgggcacggatgacagggaagtggtattgttcctcctaaacgtgttcatacctcaacccacactggcccaattaattggagctcttagagctttaaaggaggagggcaggttaacgtttcccctgttagcggaatgtctgtttcgtgcaggtcgcagagacctcttgcgcgacctgcttcacttagacccgcgttttttagagcgccacctagcgggcacaatgagttatttcagcccttatcagctcactgttctccacgtagacggggagctgtgtgcgagggatattaggtctttgatatttttaagcaaggacactatagggtctcgcagcacaccacagacattcttacactgggtgtactgtatggaaaacttagacctactgggtcccactgacgtggatgccctaatgtcaatgcttagatctttgtcaagagtagacctacagcgccaagtgcaaaccctaatgggccttcacctttccggcccatcacactcccaacactatcgccatacaccactcgagaccgatttctacgactacaaggacgacgatgacaagactagtggctccggcgagggcagaggaagtctactaacctgcggagatgtggaagaaaatcctggcccacatatgaccgagtacaagcccacggtgcgcctcgccacccgcgacgacgtccccagggccgtacgcaccctcgccgccgcgttcgccgactaccccgccacgcgccacaccgtcgatccggaccgccacatcgagcgggtcaccgagctgcaagaactcttcctcacgcgcgtcgggctcgacatcggcaaggtgtgggtcgcggacgacggcgccgcggtggcggtctggaccacgccggagagcgtcgaagcgggggcggtgttcgccgagatcggcccgcgcatggccgagttgagcggttcccggctggccgcgcagcaacagatggaaggcctcctggcgccgcaccggcccaaggagcccgcgtggttcctggccaccgtcggcgtctcgcccgaccaccagggcaagggtctgggcagcgccgtcgtgctccccggagtggaggcggccgagcgcgccggggtgcccgccttcctggagacctccgcgccccgcaacctccccttctacgagcggctcggcttcaccgtcaccgccgacgtcgaggtgcccgaaggaccgcgcacctggtgcatgacccgcaagcccggtgcctga

SEQ ID NO: 1005 - DNA, 2745 bp, Artificial Sequence
  Synthetic Polynucleotides
atggccttaccagtgaccgccttgctcctgccgctggccttgctgctccacgccgccaggccggagatcgtgctgacacagtctcccgccacactgtcactgtctccaggcgaaagagccacactgagctgtagagccagccagagcgtgtcctcttacctggcctggtatcagcagaagcctggacaggctccccggctgctgatctacgatgccagcaatagagccacaggcatccccgccagattttctggctctggcagcggcaccgatttcaccctgaccataagcagcctggaacctgaggacttcgccgtgtactactgccagcagagaagcaactggcccctgacctttggacagggcaccaaggtggaaatcaagagaggcggaggcggaagtggaggcggaggatctggcggcggaggctctgaagttcagctccttgagagtggtggcggcctggttcaacctggcggatctctgagactgtcttgtgccgccagcggcttcacctttagcggctattggatgcactgggtccgacaggcccctggcaaaggacttgaatgggtgtccgccatcagaagcgacggcagcagcaagtactacgccgactctgtgaagggcagattcaccatcagccgggacaacagcaagaacaccctgtacctccagatgaacagcctgagagccgaggacacagccgtgtattattgcgccaaggacggcgtgatcgaggacacctttgattactggggccagggcaccctggtcaccgtttcttctacgcgtgagcagaaactgatctcggaagaggatctggcgaagcccaccacgacgccagcgccgcgaccaccaacaccggcgcccaccatcgcgtcgcagcccctgtccctgcgcccagaggcgtgccggccagcggcggggggcgcagtgcacacgagggggctggacttcgcctgtgacatctacatctgggcgcccttggccgggacttgtggggtccttctcctgtcactggttatcaccctttactgcgggcgcgccagagtgaagttcagcaggagcgcagacgcccccgcgtaccagcagggccagaaccagctctataacgagctgaatctaggacgaagagaggagtacgatgttttggacaagagacgtggccgggaccctgagatggggggaaagccgagaaggaagaaccctcaggaaggcctgtacaatgaactgcagaaagataagatggcggaggcctacagtgagattgggatgaaaggcgagcgccggaggggcaaggggcacgatggcctttaccagggtctcagtacagccaccaaggacacctacgacgcccttcacatgcaggccctgccccctcgctctagaggatctggagcaacaaacttctcactactcaaacaagcaggtgacgtggaggagaatcccgggcctgggatccacatggccacttacgaggttctctgtgaggtggcgcggaaactgggcacggatgacagggaagtggtattgttcctcctaaacgtgttcatacctcaacccacactggcccaattaattggagctcttagagctttaaaggaggagggcaggttaacgtttcccctgttagcggaatgtctgtttcgtgcaggtcgcagagacctcttgcgcgacctgcttcacttagacccgcgttttttagagcgccacctagcgggcacaatgagttatttcagcccttatcagctcactgttctccacgtagacggggagctgtgtgcgagggatattaggtctttgatatttttaagcaaggacactatagggtctcgcagcacaccacagacattcttacactgggtgtactgtatggaaaacttagacctactgggtcccactgacgtggatgccctaatgtcaatgcttagatctttgtcaagagtagacctacagcgccaagtgcaaaccctaatgggccttcacctttccggcccatcacactcccaacactatcgccatacaccactcgagaccgatttctacgactacaaggacgacgatgacaagactagtggctccggcgagggcagaggaagtctactaacctgcggagatgtggaagaaaatcctggcccacatatgaccgagtacaagcccacggtgcgcctcgccacccgcgacgacgtccccagggccgtacgcaccctcgccgccgcgttcgccgactaccccgccacgcgccacaccgtcgatccggaccgccacatcgagcgggtcaccgagctgcaagaactcttcctcacgcgcgtcgggctcgacatcggcaaggtgtgggtcgcggacgacggcgccgcggtggcggtctggaccacgccggagagcgtcgaagcgggggcggtgttcgccgagatcggcccgcgcatggccgagttgagcggttcccggctggccgcgcagcaacagatggaaggcctcctggcgccgcaccggcccaaggagcccgcgtggttcctggccaccgtcggcgtctcgcccgaccaccagggcaagggtctgggcagcgccgtcgtgctccccggagtggaggcggccgagcgcgccggggtgcccgccttcctggagacctccgcgccccgcaacctccccttctacgagcggctcggcttcaccgtcaccgccgacgtcgaggtgcccgaaggaccgcgcacctggtgcatgacccgcaagcccggtgcctga

SEQ ID NO: 1006 - DNA, 2733 bp, Artificial Sequence
  Synthetic Polynucleotides
atggccttaccagtgaccgccttgctcctgccgctggccttgctgctccacgccgccaggccggacgtgcagatcacacagagccctagctacctggctgcctctcctggcgagacaatcaccatcaactgtcgggccagcaagagcatcagcaaggacctggcctggtatcaagagaagcccggcaagaccaacaagctgctgatctacagcggcagcacactccagtctggcatccccagcagattttccggctctggcagcggcaccgatttcaccctgaccataagcagcctggaacctgaggacttcgccatgtactactgccagcagcacaacaagtacccctacacctttggcggaggcaccaagctggaaatcaagagaggcggaggcggaagtggaggcggaggatctggcggcggaggctctcaagttcaactgcaacagcctggggccgagcttgttagacctggcgcttctgtgaagctgagctgcaaggccagcggctacaccttcaccagctactggatgaactgggtcaagcagcggcctgaccagggcctcgaatggatcggcagaatcgacccctacgacagcgagacacactacaaccagaagttcaaggacaaggccatcctgaccgtggacaagagcagctccaccgcctacatgcaactgagcagcctgacctctgaggatagcgccgtgtactattgcgccagaggcaactgggacgactattggggccagggcacaaccctgacagtgtctagtacgcgtgagcagaaactgatctcggaagaggatctggcgaagcccaccacgacgccagcgccgcgaccaccaacaccggcgcccaccatcgcgtcgcagcccctgtccctgcgcccagaggcgtgccggccagcggcggggggcgcagtgcacacgagggggctggacttcgcctgtgacatctacatctgggcgcccttggccgggacttgtggggtccttctcctgtcactggttatcaccctttactgcgggcgcgccagagtgaagttcagcaggagcgcagacgcccccgcgtaccagcagggccagaaccagctctataacgagctgaatctaggacgaagagaggagtacgatgttttggacaagagacgtggccgggaccctgagatggggggaaagccgagaaggaagaaccctcaggaaggcctgtacaatgaactgcagaaagataagatggcggaggcctacagtgagattgggatgaaaggcgagcgccggaggggcaaggggcacgatggcctttaccagggtctcagtacagccaccaaggacacctacgacgcccttcacatgcaggccctgccccctcgctctagaggatctggagcaacaaacttctcactactcaaacaagcaggtgacgtggaggagaatcccgggcctgggatccacatggccacttacgaggttctctgtgaggtggcgcggaaactgggcacggatgacagggaagtggtattgttcctcctaaacgtgttcatacctcaacccacactggcccaattaattggagctcttagagctttaaaggaggagggcaggttaacgtttcccctgttagcggaatgtctgtttcgtgcaggtcgcagagacctcttgcgcgacctgcttcacttagacccgcgttttttagagcgccacctagcgggcacaatgagttatttcagcccttatcagctcactgttctccacgtagacggggagctgtgtgcgagggatattaggtctttgatatttttaagcaaggacactatagggtctcgcagcacaccacagacattcttacactgggtgtactgtatggaaaacttagacctactgggtcccactgacgtggatgccctaatgtcaatgcttagatctttgtcaagagtagacctacagcgccaagtgcaaaccctaatgggccttcacctttccggcccatcacactcccaacactatcgccatacaccactcgagaccgatttctacgactacaaggacgacgatgacaagactagtggctccggcgagggcagaggaagtctactaacctgcggagatgtggaagaaaatcctggcccacatatgaccgagtacaagcccacggtgcgcctcgccacccgcgacgacgtccccagggccgtacgcaccctcgccgccgcgttcgccgactaccccgccacgcgccacaccgtcgatccggaccgccacatcgagcgggtcaccgagctgcaagaactcttcctcacgcgcgtcgggctcgacatcggcaaggtgtgggtcgcggacgacggcgccgcggtggcggtctggaccacgccggagagcgtcgaagcgggggcggtgttcgccgagatcggcccgcgcatggccgagttgagcggttcccggctggccgcgcagcaacagatggaaggcctcctggcgccgcaccggcccaaggagcccgcgtggttcctggccaccgtcggcgtctcgcccgaccaccagggcaagggtctgggcagcgccgtcgtgctccccggagtggaggcggccgagcgcgccggggtgcccgccttcctggagacctccgcgccccgcaacctccccttctacgagcggctcggcttcaccgtcaccgccgacgtcgaggtgcccgaaggaccgcgcacctggtgcatgacccgcaagcccggtgcctga

SEQ ID NO: 1007 - DNA, 2826 bp, Artificial Sequence
  Synthetic Polynucleotides
atggccttaccagtgaccgccttgctcctgccgctggccttgctgctccacgccgccaggccgtacatcaacatctacaacgccgagcctgccaatcctagcgagaagaacagccccacacagtacgcctacggcagcggagaattcgacatccagatgacacagtctccagccagcctgtctgcctctctgggagagacagtgaccatcgagtgccggaccagcaaggacatctacagcaacctggcctggttccagcaagagcccggcaattctcctcagctcctgatctacgacgccagcaatctggctgatggcgtgcccagcagattttctggcagcggctctggcacacagtacagcctccagatcaacaacctccagagcgaggacgtggcctcctacttctgccaccagtacaacaactacccctacaccttcggcaccggcaccaagctggaacttaaaggcggaggcggaagtggaggcggaggatctggcggcggaggctctcaagtgcagctccaagagtctggccccacactggtcaatcctggcgacagcgtgaagatgagctgcaaggccagcggctacacctttaccgaccacatcatccactgggtcaagcagagccacggcaagagcctggaatggatcggctacatcaacccctatagcggcggagccaactacaacggcaagttcaagagcaaggccacactgacaatcgacaagagcagcagcaccgcctacatggaattttccagactgaccagcggcgactccgccatctactactgcgccctgaattacggcagctactacgctatggatgcctggggccagggcacaagcgtgacagtttcttctacgcgtgagcagaaactgatctcggaagaggatctggcgaagcccaccacgacgccagcgccgcgaccaccaacaccggcgcccaccatcgcgtcgcagcccctgtccctgcgcccagaggcgtgccggccagcggcggggggcgcagtgcacacgagggggctggacttcgcctgtgacatctacatctgggcgcccttggccgggacttgtggggtccttctcctgtcactggttatcaccctttactgcgggcgcgccagagtgaagttcagcaggagcgcagacgcccccgcgtaccagcagggccagaaccagctctataacgagctgaatctaggacgaagagaggagtacgatgttttggacaagagacgtggccgggaccctgagatggggggaaagccgagaaggaagaaccctcaggaaggcctgtacaatgaactgcagaaagataagatggcggaggcctacagtgagattgggatgaaaggcgagcgccggaggggcaaggggcacgatggcctttaccagggtctcagtacagccaccaaggacacctacgacgcccttcacatgcaggccctgccccctcgctctagaggatctggagcaacaaacttctcactactcaaacaagcaggtgacgtggaggagaatcccgggcctgggatccacatggccacttacgaggttctctgtgaggtggcgcggaaactgggcacggatgacagggaagtggtattgttcctcctaaacgtgttcatacctcaacccacactggcccaattaattggagctcttagagctttaaaggaggagggcaggttaacgtttcccctgttagcggaatgtctgtttcgtgcaggtcgcagagacctcttgcgcgacctgcttcacttagacccgcgttttttagagcgccacctagcgggcacaatgagttatttcagcccttatcagctcactgttctccacgtagacggggagctgtgtgcgagggatattaggtctttgatatttttaagcaaggacactatagggtctcgcagcacaccacagacattcttacactgggtgtactgtatggaaaacttagacctactgggtcccactgacgtggatgccctaatgtcaatgcttagatctttgtcaagagtagacctacagcgccaagtgcaaaccctaatgggccttcacctttccggcccatcacactcccaacactatcgccatacaccactcgagaccgatttctacgactacaaggacgacgatgacaagactagtggctccggcgagggcagaggaagtctactaacctgcggagatgtggaagaaaatcctggcccacatatgaccgagtacaagcccacggtgcgcctcgccacccgcgacgacgtccccagggccgtacgcaccctcgccgccgcgttcgccgactaccccgccacgcgccacaccgtcgatccggaccgccacatcgagcgggtcaccgagctgcaagaactcttcctcacgcgcgtcgggctcgacatcggcaaggtgtgggtcgcggacgacggcgccgcggtggcggtctggaccacgccggagagcgtcgaagcgggggcggtgttcgccgagatcggcccgcgcatggccgagttgagcggttcccggctggccgcgcagcaacagatggaaggcctcctggcgccgcaccggcccaaggagcccgcgtggttcctggccaccgtcggcgtctcgcccgaccaccagggcaagggtctgggcagcgccgtcgtgctccccggagtggaggcggccgagcgcgccggggtgcccgccttcctggagacctccgcgccccgcaacctccccttctacgagcggctcggcttcaccgtcaccgccgacgtcgaggtgcccgaaggaccgcgcacctggtgcatgacccgcaagcccggtgcctga

SEQ ID NO: 1008 - DNA, 2739 bp, Artificial Sequence
  Synthetic Polynucleotides
atggccttaccagtgaccgccttgctcctgccgctggccttgctgctccacgccgccaggccggagatcgtgctgacacagagccctaccagcatgacagcctctccaggcgagcaagtgaccatcacctgtagagccagcagcagcatcaactacatgcactggtatcagcagaagcctggcgcaagccccagaccttggatctacgagacaagcaagctggcctccggcgtgcccgatagattttctggatctgccagcggcaccagctacagcctgaccatcaacaacatggaagccgaggacgccgccacctactactgccagcagtggaattacccctcctggacctttggcggaggcaccaagctggaacttaaaggcggaggcggaagtggaggcggaggatctggcggcggaggctctgaagtgcagctcgttgagtctggtggcggactggttcagcctggaagaagcctgaagctgagctgtgccgccagcggcttcaccttcagcgactacaatatggcctgggtccgacaggcccctaagaaaggactggaatgggtcgccaccatcctgtacgatggcggcagaacctactaccggggcagcgtgaagggcagattcaccatcagcagagacaacgccaagagcaccctgtacctgcggatggactctctgagaagcgaggataccgccacatattactgtgccacacacagccggggcaccgactactttgattattggggccagggcgtgatggttaccgtgtctagtacgcgtgagcagaaactgatctcggaagaggatctggcgaagcccaccacgacgccagcgccgcgaccaccaacaccggcgcccaccatcgcgtcgcagcccctgtccctgcgcccagaggcgtgccggccagcggcggggggcgcagtgcacacgagggggctggacttcgcctgtgacatctacatctgggcgcccttggccgggacttgtggggtccttctcctgtcactggttatcaccctttactgcgggcgcgccagagtgaagttcagcaggagcgcagacgcccccgcgtaccagcagggccagaaccagctctataacgagctgaatctaggacgaagagaggagtacgatgttttggacaagagacgtggccgggaccctgagatggggggaaagccgagaaggaagaaccctcaggaaggcctgtacaatgaactgcagaaagataagatggcggaggcctacagtgagattgggatgaaaggcgagcgccggaggggcaaggggcacgatggcctttaccagggtctcagtacagccaccaaggacacctacgacgcccttcacatgcaggccctgccccctcgctctagaggatctggagcaacaaacttctcactactcaaacaagcaggtgacgtggaggagaatcccgggcctgggatccacatggccacttacgaggttctctgtgaggtggcgcggaaactgggcacggatgacagggaagtggtattgttcctcctaaacgtgttcatacctcaacccacactggcccaattaattggagctcttagagctttaaaggaggagggcaggttaacgtttcccctgttagcggaatgtctgtttcgtgcaggtcgcagagacctcttgcgcgacctgcttcacttagacccgcgttttttagagcgccacctagcgggcacaatgagttatttcagcccttatcagctcactgttctccacgtagacggggagctgtgtgcgagggatattaggtctttgatatttttaagcaaggacactatagggtctcgcagcacaccacagacattcttacactgggtgtactgtatggaaaacttagacctactgggtcccactgacgtggatgccctaatgtcaatgcttagatctttgtcaagagtagacctacagcgccaagtgcaaaccctaatgggccttcacctttccggcccatcacactcccaacactatcgccatacaccactcgagaccgatttctacgactacaaggacgacgatgacaagactagtggctccggcgagggcagaggaagtctactaacctgcggagatgtggaagaaaatcctggcccacatatgaccgagtacaagcccacggtgcgcctcgccacccgcgacgacgtccccagggccgtacgcaccctcgccgccgcgttcgccgactaccccgccacgcgccacaccgtcgatccggaccgccacatcgagcgggtcaccgagctgcaagaactcttcctcacgcgcgtcgggctcgacatcggcaaggtgtgggtcgcggacgacggcgccgcggtggcggtctggaccacgccggagagcgtcgaagcgggggcggtgttcgccgagatcggcccgcgcatggccgagttgagcggttcccggctggccgcgcagcaacagatggaaggcctcctggcgccgcaccggcccaaggagcccgcgtggttcctggccaccgtcggcgtctcgcccgaccaccagggcaagggtctgggcagcgccgtcgtgctccccggagtggaggcggccgagcgcgccggggtgcccgccttcctggagacctccgcgccccgcaacctccccttctacgagcggctcggcttcaccgtcaccgccgacgtcgaggtgcccgaaggaccgcgcacctggtgcatgacccgcaagcccggtgcctga

SEQ ID NO: 1009 - DNA, 2766 bp, Artificial Sequence
  Synthetic Polynucleotides
atggccttaccagtgaccgccttgctcctgccgctggccttgctgctccacgccgccaggccggacatcgtgatgacacagagcccttctagcctggccgtgtctgagggcgagacagtgaccatcaactgcaagagcagccagagcttcctgtctagcggcgacggcaagaattacgtggcctggtatcagtacaagcccggacagagccccaagctgctgatctactgggccagcacaagacagagcggcgtgcccgatagattcatcggctctggcagcggcaccgacttcaccctgacaatctctacagtgcaggccgaggacctggctatctactactgccagcagtattacgacacccctctgacctttggctccggcaccaagctggaaatcaaaggcggaggcggaagtggaggcggaggatctggcggcggaggctctgaagtgaagctgcaagagtctggccccagcctggtgcagagtagccaaacactgagcctgacctgtaccgtgtccggctttagcctgaccagctaccacatccactgggtccgacagacccctggcaaaggactggaatggatgggcgtgatgtggagcgacggcgacaccagctataacagcgccctgaagtcccggctgagcatcagcagagatacaagccagagccaggtgttcctgaagatgaacagcctccagaccgaggacaccgccacctactattgtgccagaggctactacagcagctacctgtacctttggttcgcctattggggccagggcaccctggttacagtcagctctacgcgtgagcagaaactgatctcggaagaggatctggcgaagcccaccacgacgccagcgccgcgaccaccaacaccggcgcccaccatcgcgtcgcagcccctgtccctgcgcccagaggcgtgccggccagcggcggggggcgcagtgcacacgagggggctggacttcgcctgtgacatctacatctgggcgcccttggccgggacttgtggggtccttctcctgtcactggttatcaccctttactgcgggcgcgccagagtgaagttcagcaggagcgcagacgcccccgcgtaccagcagggccagaaccagctctataacgagctgaatctaggacgaagagaggagtacgatgttttggacaagagacgtggccgggaccctgagatggggggaaagccgagaaggaagaaccctcaggaaggcctgtacaatgaactgcagaaagataagatggcggaggcctacagtgagattgggatgaaaggcgagcgccggaggggcaaggggcacgatggcctttaccagggtctcagtacagccaccaaggacacctacgacgcccttcacatgcaggccctgccccctcgctctagaggatctggagcaacaaacttctcactactcaaacaagcaggtgacgtggaggagaatcccgggcctgggatccacatggccacttacgaggttctctgtgaggtggcgcggaaactgggcacggatgacagggaagtggtattgttcctcctaaacgtgttcatacctcaacccacactggcccaattaattggagctcttagagctttaaaggaggagggcaggttaacgtttcccctgttagcggaatgtctgtttcgtgcaggtcgcagagacctcttgcgcgacctgcttcacttagacccgcgttttttagagcgccacctagcgggcacaatgagttatttcagcccttatcagctcactgttctccacgtagacggggagctgtgtgcgagggatattaggtctttgatatttttaagcaaggacactatagggtctcgcagcacaccacagacattcttacactgggtgtactgtatggaaaacttagacctactgggtcccactgacgtggatgccctaatgtcaatgcttagatctttgtcaagagtagacctacagcgccaagtgcaaaccctaatgggccttcacctttccggcccatcacactcccaacactatcgccatacaccactcgagaccgatttctacgactacaaggacgacgatgacaagactagtggctccggcgagggcagaggaagtctactaacctgcggagatgtggaagaaaatcctggcccacatatgaccgagtacaagcccacggtgcgcctcgccacccgcgacgacgtccccagggccgtacgcaccctcgccgccgcgttcgccgactaccccgccacgcgccacaccgtcgatccggaccgccacatcgagcgggtcaccgagctgcaagaactcttcctcacgcgcgtcgggctcgacatcggcaaggtgtgggtcgcggacgacggcgccgcggtggcggtctggaccacgccggagagcgtcgaagcgggggcggtgttcgccgagatcggcccgcgcatggccgagttgagcggttcccggctggccgcgcagcaacagatggaaggcctcctggcgccgcaccggcccaaggagcccgcgtggttcctggccaccgtcggcgtctcgcccgaccaccagggcaagggtctgggcagcgccgtcgtgctccccggagtggaggcggccgagcgcgccggggtgcccgccttcctggagacctccgcgccccgcaacctccccttctacgagcggctcggcttcaccgtcaccgccgacgtcgaggtgcccgaaggaccgcgcacctggtgcatgacccgcaagcccggtgcctga

SEQ ID NO: 1010 - DNA, 2778 bp, Artificial Sequence
  Synthetic Polynucleotides
atggccttaccagtgaccgccttgctcctgccgctggccttgctgctccacgccgccaggccggacgtgctgatgacccagacacctgtgtctctgccagtgtctctcggaggccaggtgtccatctcctgtagaagcagccagagcctggtgcactccgacggcgatacctacctgcactggtatctccagaagcctggacagagccctcagctcctgatctaccgggtgtccaacagattcagcggcgtgcccgatagattttccggcagcggctctggcaccgacttcaccctgaagatcagcagagtggaacccgaggacctgggcctgtactactgtctccagaccacacacttcccaccttggacctttggcggaggcaccaagctggaaatgaaaggcggaggcggaagtggaggcggaggatctggcggcggaggctctcaggttcagctccagcagtctggacccgagcttagaaggccaggatctagcgtcagactgagctgcaaggccagcggctaccggatcaaggacttcctgatccactggattaagaacagacccgagcacggcctggaatggatcggatggattgaccctgaggacggcgagactaagtacgcccagaagttccagaccaaggccacactgaccgccgacacctctagcaacaccgcctacatgcaactgagcagcctgaccagcgaggacaccgccacctacttttgtgctagatggggcgacgtgtactacggcctgatgagaggccatgtgatggatgcctggggccagggaacaagcgtgacagtctcttctacgcgtgagcagaaactgatctcggaagaggatctggcgaagcccaccacgacgccagcgccgcgaccaccaacaccggcgcccaccatcgcgtcgcagcccctgtccctgcgcccagaggcgtgccggccagcggcggggggcgcagtgcacacgagggggctggacttcgcctgtgacatctacatctgggcgcccttggccgggacttgtggggtccttctcctgtcactggttatcaccctttactgcgggcgcgccagagtgaagttcagcaggagcgcagacgcccccgcgtaccagcagggccagaaccagctctataacgagctgaatctaggacgaagagaggagtacgatgttttggacaagagacgtggccgggaccctgagatggggggaaagccgagaaggaagaaccctcaggaaggcctgtacaatgaactgcagaaagataagatggcggaggcctacagtgagattgggatgaaaggcgagcgccggaggggcaaggggcacgatggcctttaccagggtctcagtacagccaccaaggacacctacgacgcccttcacatgcaggccctgccccctcgctctagaggatctggagcaacaaacttctcactactcaaacaagcaggtgacgtggaggagaatcccgggcctgggatccacatggccacttacgaggttctctgtgaggtggcgcggaaactgggcacggatgacagggaagtggtattgttcctcctaaacgtgttcatacctcaacccacactggcccaattaattggagctcttagagctttaaaggaggagggcaggttaacgtttcccctgttagcggaatgtctgtttcgtgcaggtcgcagagacctcttgcgcgacctgcttcacttagacccgcgttttttagagcgccacctagcgggcacaatgagttatttcagcccttatcagctcactgttctccacgtagacggggagctgtgtgcgagggatattaggtctttgatatttttaagcaaggacactatagggtctcgcagcacaccacagacattcttacactgggtgtactgtatggaaaacttagacctactgggtcccactgacgtggatgccctaatgtcaatgcttagatctttgtcaagagtagacctacagcgccaagtgcaaaccctaatgggccttcacctttccggcccatcacactcccaacactatcgccatacaccactcgagaccgatttctacgactacaaggacgacgatgacaagactagtggctccggcgagggcagaggaagtctactaacctgcggagatgtggaagaaaatcctggcccacatatgaccgagtacaagcccacggtgcgcctcgccacccgcgacgacgtccccagggccgtacgcaccctcgccgccgcgttcgccgactaccccgccacgcgccacaccgtcgatccggaccgccacatcgagcgggtcaccgagctgcaagaactcttcctcacgcgcgtcgggctcgacatcggcaaggtgtgggtcgcggacgacggcgccgcggtggcggtctggaccacgccggagagcgtcgaagcgggggcggtgttcgccgagatcggcccgcgcatggccgagttgagcggttcccggctggccgcgcagcaacagatggaaggcctcctggcgccgcaccggcccaaggagcccgcgtggttcctggccaccgtcggcgtctcgcccgaccaccagggcaagggtctgggcagcgccgtcgtgctccccggagtggaggcggccgagcgcgccggggtgcccgccttcctggagacctccgcgccccgcaacctccccttctacgagcggctcggcttcaccgtcaccgccgacgtcgaggtgcccgaaggaccgcgcacctggtgcatgacccgcaagcccggtgcctga

SEQ ID NO: 1011 - DNA, 2751 bp, Artificial Sequence
  Synthetic Polynucleotides
atggccttaccagtgaccgccttgctcctgccgctggccttgctgctccacgccgccaggccggacatccagatgacccagtctaccagttccctgagtgcatccctcggagacagggtgacgatcagttgcagcgcaagccaagggatcaataactatctgaactggtatcagcagaaaccggacggaacagtcgaactcctgatttattacaccagcacccttcagagtggcgtcccttcccggttcagtggctccggaagcgggaccgattactccctgaccatttctaatctggagccagaggacataggaacgtattattgccagcagtatagtaaactgccacgaacttttggaggggggacgaaactggagatcaaaggcggaggcggaagtggaggcggaggatctggcggcggaggctctcaggtgcaactccagcagtccggaagcgagcttatgatgccaggggcatcagtgaagatcagctgcaaggctactggctacaccttctctaattactggatagagtgggttaaacaaaggccagggcacggcctggaatggatcggcgagatcctgcctgggacaggccgaaccatttataacgagaagttcaaaggcaaggctactttcaccgcagatataagctctaatacagtgcaaatgcagctctcttccctgacaagtgaggatagtgccgtgtattattgcgcacgaagagattactatggaaatttttattacgctatggattattggggtcaaggaacaagtgtgaccgttagcagcacgcgtgagcagaaactgatctcggaagaggatctggcgaagcccaccacgacgccagcgccgcgaccaccaacaccggcgcccaccatcgcgtcgcagcccctgtccctgcgcccagaggcgtgccggccagcggcggggggcgcagtgcacacgagggggctggacttcgcctgtgacatctacatctgggcgcccttggccgggacttgtggggtccttctcctgtcactggttatcaccctttactgcgggcgcgccagagtgaagttcagcaggagcgcagacgcccccgcgtaccagcagggccagaaccagctctataacgagctgaatctaggacgaagagaggagtacgatgttttggacaagagacgtggccgggaccctgagatggggggaaagccgagaaggaagaaccctcaggaaggcctgtacaatgaactgcagaaagataagatggcggaggcctacagtgagattgggatgaaaggcgagcgccggaggggcaaggggcacgatggcctttaccagggtctcagtacagccaccaaggacacctacgacgcccttcacatgcaggccctgccccctcgctctagaggatctggagcaacaaacttctcactactcaaacaagcaggtgacgtggaggagaatcccgggcctgggatccacatggccacttacgaggttctctgtgaggtggcgcggaaactgggcacggatgacagggaagtggtattgttcctcctaaacgtgttcatacctcaacccacactggcccaattaattggagctcttagagctttaaaggaggagggcaggttaacgtttcccctgttagcggaatgtctgtttcgtgcaggtcgcagagacctcttgcgcgacctgcttcacttagacccgcgttttttagagcgccacctagcgggcacaatgagttatttcagcccttatcagctcactgttctccacgtagacggggagctgtgtgcgagggatattaggtctttgatatttttaagcaaggacactatagggtctcgcagcacaccacagacattcttacactgggtgtactgtatggaaaacttagacctactgggtcccactgacgtggatgccctaatgtcaatgcttagatctttgtcaagagtagacctacagcgccaagtgcaaaccctaatgggccttcacctttccggcccatcacactcccaacactatcgccatacaccactcgagaccgatttctacgactacaaggacgacgatgacaagactagtggctccggcgagggcagaggaagtctactaacctgcggagatgtggaagaaaatcctggcccacatatgaccgagtacaagcccacggtgcgcctcgccacccgcgacgacgtccccagggccgtacgcaccctcgccgccgcgttcgccgactaccccgccacgcgccacaccgtcgatccggaccgccacatcgagcgggtcaccgagctgcaagaactcttcctcacgcgcgtcgggctcgacatcggcaaggtgtgggtcgcggacgacggcgccgcggtggcggtctggaccacgccggagagcgtcgaagcgggggcggtgttcgccgagatcggcccgcgcatggccgagttgagcggttcccggctggccgcgcagcaacagatggaaggcctcctggcgccgcaccggcccaaggagcccgcgtggttcctggccaccgtcggcgtctcgcccgaccaccagggcaagggtctgggcagcgccgtcgtgctccccggagtggaggcggccgagcgcgccggggtgcccgccttcctggagacctccgcgccccgcaacctccccttctacgagcggctcggcttcaccgtcaccgccgacgtcgaggtgcccgaaggaccgcgcacctggtgcatgacccgcaagcccggtgcctga

SEQ ID NO: 1012 - DNA, 2736 bp, Artificial Sequence
  Synthetic Polynucleotides
atggccttaccagtgaccgccttgctcctgccgctggccttgctgctccacgccgccaggccggacatccagatgacccagagccctgccagcctgtccgtgtctgtgggcgagacagtgaccatcacctgtcgggccagcgagaacatctacagcaacctggcctggtatcagcagaagcagggcaagagcccccaactgctggtgtacgccgccaccaatctggccgatggcgtgcccagcagattttccggctctggcagcggcacccagtacagcctgaagatcaacagcctccagagcgaggacttcggcagctactactgccagcacttctggggcacctggacctttggaggaggcaccaccctggaaatcaagggcggaggcggaagtggaggcggaggatctggcggcggaggctctgaagtgcaactccagcagagcggccctgagcttgtgaagcctggcgcttccgtgaagatgagctgcaaggccagcggctacaccttcaccgactactacatgaagtggatgaagcagagccacggcaagtccctggaatggatcggcgacatcaaccccaacaacggcggcaccacctacaaccagaagttcaagggcaaggccaccctgaccgtggacaagagcagcagcaccgcctacatgcaactgaacagcctgaccagcgaggacagcgccgtgtactactgcgccagagactacggctacggctatttcgactactggggccagggcacaaccctgacagtgtcctctacgcgtgagcagaaactgatctcggaagaggatctggcgaagcccaccacgacgccagcgccgcgaccaccaacaccggcgcccaccatcgcgtcgcagcccctgtccctgcgcccagaggcgtgccggccagcggcggggggcgcagtgcacacgagggggctggacttcgcctgtgacatctacatctgggcgcccttggccgggacttgtggggtccttctcctgtcactggttatcaccctttactgcgggcgcgccagagtgaagttcagcaggagcgcagacgcccccgcgtaccagcagggccagaaccagctctataacgagctgaatctaggacgaagagaggagtacgatgttttggacaagagacgtggccgggaccctgagatggggggaaagccgagaaggaagaaccctcaggaaggcctgtacaatgaactgcagaaagataagatggcggaggcctacagtgagattgggatgaaaggcgagcgccggaggggcaaggggcacgatggcctttaccagggtctcagtacagccaccaaggacacctacgacgcccttcacatgcaggccctgccccctcgctctagaggatctggagcaacaaacttctcactactcaaacaagcaggtgacgtggaggagaatcccgggcctgggatccacatggccacttacgaggttctctgtgaggtggcgcggaaactgggcacggatgacagggaagtggtattgttcctcctaaacgtgttcatacctcaacccacactggcccaattaattggagctcttagagctttaaaggaggagggcaggttaacgtttcccctgttagcggaatgtctgtttcgtgcaggtcgcagagacctcttgcgcgacctgcttcacttagacccgcgttttttagagcgccacctagcgggcacaatgagttatttcagcccttatcagctcactgttctccacgtagacggggagctgtgtgcgagggatattaggtctttgatatttttaagcaaggacactatagggtctcgcagcacaccacagacattcttacactgggtgtactgtatggaaaacttagacctactgggtcccactgacgtggatgccctaatgtcaatgcttagatctttgtcaagagtagacctacagcgccaagtgcaaaccctaatgggccttcacctttccggcccatcacactcccaacactatcgccatacaccactcgagaccgatttctacgactacaaggacgacgatgacaagactagtggctccggcgagggcagaggaagtctactaacctgcggagatgtggaagaaaatcctggcccacatatgaccgagtacaagcccacggtgcgcctcgccacccgcgacgacgtccccagggccgtacgcaccctcgccgccgcgttcgccgactaccccgccacgcgccacaccgtcgatccggaccgccacatcgagcgggtcaccgagctgcaagaactcttcctcacgcgcgtcgggctcgacatcggcaaggtgtgggtcgcggacgacggcgccgcggtggcggtctggaccacgccggagagcgtcgaagcgggggcggtgttcgccgagatcggcccgcgcatggccgagttgagcggttcccggctggccgcgcagcaacagatggaaggcctcctggcgccgcaccggcccaaggagcccgcgtggttcctggccaccgtcggcgtctcgcccgaccaccagggcaagggtctgggcagcgccgtcgtgctccccggagtggaggcggccgagcgcgccggggtgcccgccttcctggagacctccgcgccccgcaacctccccttctacgagcggctcggcttcaccgtcaccgccgacgtcgaggtgcccgaaggaccgcgcacctggtgcatgacccgcaagcccggtgcctga

SEQ ID NO: 1013 - DNA, 2745 bp, Artificial Sequence
  Synthetic Polynucleotides
atggccttaccagtgaccgccttgctcctgccgctggccttgctgctccacgccgccaggccggagatcgtgctgacacagagccctggcaccctgagcctgtctccaggcgaaagagccacactgagctgtcgggcctctcagagcgtgggaggctacctggcttggtatcagcagaagccaggccaggcccccagactgctgatctacgacgccagcaatcgggccacaggcatccccgccagattttctggcagcggctccggcaccgacttcaccctgacaatcagcagcctggaacccgaggacttcgccgtgtactactgccagcagcggaacaactggccccccatgtacacattcggccagggcaccaagctggaaatcaagagaggcggaggcggaagtggaggcggaggatctggcggcggaggctctcaggtgcaactggtgcagagcggagccgaagtgaagaaacccggcagcagcgtgaaggtgtcctgcaaggcttccggcggcaccttcagcagctacgccatttcttgggtgcgccaggctcctggacagggcctggaatggatgggcggcatcatccctatcctgggcaccgccaactacgcccagaaattccagggcagagtgaccatcaccgccgacgagagcaccagcaccgcctacatggaactgagcagcctgcggagcgaggacacagccgtgtattattgcgccagatggggcggaggggccttcgacatttggggccagggaacaatggtcaccgtgtccagcacgcgtgagcagaaactgatctcggaagaggatctggcgaagcccaccacgacgccagcgccgcgaccaccaacaccggcgcccaccatcgcgtcgcagcccctgtccctgcgcccagaggcgtgccggccagcggcggggggcgcagtgcacacgagggggctggacttcgcctgtgacatctacatctgggcgcccttggccgggacttgtggggtccttctcctgtcactggttatcaccctttactgcgggcgcgccagagtgaagttcagcaggagcgcagacgcccccgcgtaccagcagggccagaaccagctctataacgagctgaatctaggacgaagagaggagtacgatgttttggacaagagacgtggccgggaccctgagatggggggaaagccgagaaggaagaaccctcaggaaggcctgtacaatgaactgcagaaagataagatggcggaggcctacagtgagattgggatgaaaggcgagcgccggaggggcaaggggcacgatggcctttaccagggtctcagtacagccaccaaggacacctacgacgcccttcacatgcaggccctgccccctcgctctagaggatctggagcaacaaacttctcactactcaaacaagcaggtgacgtggaggagaatcccgggcctgggatccacatggccacttacgaggttctctgtgaggtggcgcggaaactgggcacggatgacagggaagtggtattgttcctcctaaacgtgttcatacctcaacccacactggcccaattaattggagctcttagagctttaaaggaggagggcaggttaacgtttcccctgttagcggaatgtctgtttcgtgcaggtcgcagagacctcttgcgcgacctgcttcacttagacccgcgttttttagagcgccacctagcgggcacaatgagttatttcagcccttatcagctcactgttctccacgtagacggggagctgtgtgcgagggatattaggtctttgatatttttaagcaaggacactatagggtctcgcagcacaccacagacattcttacactgggtgtactgtatggaaaacttagacctactgggtcccactgacgtggatgccctaatgtcaatgcttagatctttgtcaagagtagacctacagcgccaagtgcaaaccctaatgggccttcacctttccggcccatcacactcccaacactatcgccatacaccactcgagaccgatttctacgactacaaggacgacgatgacaagactagtggctccggcgagggcagaggaagtctactaacctgcggagatgtggaagaaaatcctggcccacatatgaccgagtacaagcccacggtgcgcctcgccacccgcgacgacgtccccagggccgtacgcaccctcgccgccgcgttcgccgactaccccgccacgcgccacaccgtcgatccggaccgccacatcgagcgggtcaccgagctgcaagaactcttcctcacgcgcgtcgggctcgacatcggcaaggtgtgggtcgcggacgacggcgccgcggtggcggtctggaccacgccggagagcgtcgaagcgggggcggtgttcgccgagatcggcccgcgcatggccgagttgagcggttcccggctggccgcgcagcaacagatggaaggcctcctggcgccgcaccggcccaaggagcccgcgtggttcctggccaccgtcggcgtctcgcccgaccaccagggcaagggtctgggcagcgccgtcgtgctccccggagtggaggcggccgagcgcgccggggtgcccgccttcctggagacctccgcgccccgcaacctccccttctacgagcggctcggcttcaccgtcaccgccgacgtcgaggtgcccgaaggaccgcgcacctggtgcatgacccgcaagcccggtgcctga

SEQ ID NO: 1014 - DNA, 2730 bp, Artificial Sequence
  Synthetic Polynucleotides
atggccttaccagtgaccgccttgctcctgccgctggccttgctgctccacgccgccaggccgcagatcgtgctgacacagagccctgccctgatgagcgccagccctggcgagaaagtgaccatgacctgtagcgccagcagcagcgtgcgctacatgtactggtatcagcagaagcccagaagcagccccaagccctggattcacctgaccagcaatctggcctctggcgtgcccgctagattttccggctctggcagcggcaccagctacagcctgaccatcagcagcatggaagccgaggacgccgccacctactactgccagcagtggtccagccaccccttcacatttggctccggcaccaagctggaaatcaagggcggaggcggaagtggaggcggaggatctggcggcggaggctctgatgtgcaactccaggaaagcggccctggccttgtgaagcctagccagagcctgtccctgacctgtaccgtgaccggcttcagcatcaccagcgactactcttggaactggatcagacagttccctggcaacaaactggaatggatgggctacatcagctactccggccacacctcctacaaccccagcctggaaagccggatctccatcaccagagacaccagcaagaaccagttcttcttgcaactgaacagcgtgaccaccgaggataccgccacatattactgtaccagaggcaactgggacgtggtgtactggggccagggcacacttgtgaccgtgtctgctacgcgtgagcagaaactgatctcggaagaggatctggcgaagcccaccacgacgccagcgccgcgaccaccaacaccggcgcccaccatcgcgtcgcagcccctgtccctgcgcccagaggcgtgccggccagcggcggggggcgcagtgcacacgagggggctggacttcgcctgtgacatctacatctgggcgcccttggccgggacttgtggggtccttctcctgtcactggttatcaccctttactgcgggcgcgccagagtgaagttcagcaggagcgcagacgcccccgcgtaccagcagggccagaaccagctctataacgagctgaatctaggacgaagagaggagtacgatgttttggacaagagacgtggccgggaccctgagatggggggaaagccgagaaggaagaaccctcaggaaggcctgtacaatgaactgcagaaagataagatggcggaggcctacagtgagattgggatgaaaggcgagcgccggaggggcaaggggcacgatggcctttaccagggtctcagtacagccaccaaggacacctacgacgcccttcacatgcaggccctgccccctcgctctagaggatctggagcaacaaacttctcactactcaaacaagcaggtgacgtggaggagaatcccgggcctgggatccacatggccacttacgaggttctctgtgaggtggcgcggaaactgggcacggatgacagggaagtggtattgttcctcctaaacgtgttcatacctcaacccacactggcccaattaattggagctcttagagctttaaaggaggagggcaggttaacgtttcccctgttagcggaatgtctgtttcgtgcaggtcgcagagacctcttgcgcgacctgcttcacttagacccgcgttttttagagcgccacctagcgggcacaatgagttatttcagcccttatcagctcactgttctccacgtagacggggagctgtgtgcgagggatattaggtctttgatatttttaagcaaggacactatagggtctcgcagcacaccacagacattcttacactgggtgtactgtatggaaaacttagacctactgggtcccactgacgtggatgccctaatgtcaatgcttagatctttgtcaagagtagacctacagcgccaagtgcaaaccctaatgggccttcacctttccggcccatcacactcccaacactatcgccatacaccactcgagaccgatttctacgactacaaggacgacgatgacaagactagtggctccggcgagggcagaggaagtctactaacctgcggagatgtggaagaaaatcctggcccacatatgaccgagtacaagcccacggtgcgcctcgccacccgcgacgacgtccccagggccgtacgcaccctcgccgccgcgttcgccgactaccccgccacgcgccacaccgtcgatccggaccgccacatcgagcgggtcaccgagctgcaagaactcttcctcacgcgcgtcgggctcgacatcggcaaggtgtgggtcgcggacgacggcgccgcggtggcggtctggaccacgccggagagcgtcgaagcgggggcggtgttcgccgagatcggcccgcgcatggccgagttgagcggttcccggctggccgcgcagcaacagatggaaggcctcctggcgccgcaccggcccaaggagcccgcgtggttcctggccaccgtcggcgtctcgcccgaccaccagggcaagggtctgggcagcgccgtcgtgctccccggagtggaggcggccgagcgcgccggggtgcccgccttcctggagacctccgcgccccgcaacctccccttctacgagcggctcggcttcaccgtcaccgccgacgtcgaggtgcccgaaggaccgcgcacctggtgcatgacccgcaagcccggtgcctga

SEQ ID NO: 1015 - DNA, 2760 bp, Artificial Sequence
  Synthetic Polynucleotides
atggccttaccagtgaccgccttgctcctgccgctggccttgctgctccacgccgccaggccggacgtcgtgatgacccagagccctctgagcctgcctgtgacactgggacagcctgccagcatctcctgtcggagcagccagagcatcgtgcacagcgacggcaacacctacctggaatggtatcagcagcggccaggccagagccccagacggctgatctacaaggtgtccaacagattcagcggcgtgcccgacagattctccggcagcggctctggcaccgacttcaccctgaagatcagcagagtggaagccgaggacgtgggcgtgtactactgttttcaaggcagccacgccccctggacctttggcggaggaacaaaggtggaaatcaagggcggaggcggaagtggaggcggaggatctggcggcggaggctctgaagtgcaactggtggaatcaggcggcggactggtgcagcctggcggatctctgagactgagctgtgccgccagcggcttcaccttcagcagctacggaatgcactgggtgcgccaggcccctggcaaaggactggaatgggtggcctacatcaccaccagaagcagcaccatctactacgccgacagcgtgaagggccggttcaccatctccagagacaacgccaagaacagcctgtacctccagatgaactccctgcgggccgaggacaccgccgtgtactattgcaccagagagcccctgaccggctactacgctatggactattggggccagggcaccagcgtgaccgtgtctagtacgcgtgagcagaaactgatctcggaagaggatctggcgaagcccaccacgacgccagcgccgcgaccaccaacaccggcgcccaccatcgcgtcgcagcccctgtccctgcgcccagaggcgtgccggccagcggcggggggcgcagtgcacacgagggggctggacttcgcctgtgacatctacatctgggcgcccttggccgggacttgtggggtccttctcctgtcactggttatcaccctttactgcgggcgcgccagagtgaagttcagcaggagcgcagacgcccccgcgtaccagcagggccagaaccagctctataacgagctgaatctaggacgaagagaggagtacgatgttttggacaagagacgtggccgggaccctgagatggggggaaagccgagaaggaagaaccctcaggaaggcctgtacaatgaactgcagaaagataagatggcggaggcctacagtgagattgggatgaaaggcgagcgccggaggggcaaggggcacgatggcctttaccagggtctcagtacagccaccaaggacacctacgacgcccttcacatgcaggccctgccccctcgctctagaggatctggagcaacaaacttctcactactcaaacaagcaggtgacgtggaggagaatcccgggcctgggatccacatggccacttacgaggttctctgtgaggtggcgcggaaactgggcacggatgacagggaagtggtattgttcctcctaaacgtgttcatacctcaacccacactggcccaattaattggagctcttagagctttaaaggaggagggcaggttaacgtttcccctgttagcggaatgtctgtttcgtgcaggtcgcagagacctcttgcgcgacctgcttcacttagacccgcgttttttagagcgccacctagcgggcacaatgagttatttcagcccttatcagctcactgttctccacgtagacggggagctgtgtgcgagggatattaggtctttgatatttttaagcaaggacactatagggtctcgcagcacaccacagacattcttacactgggtgtactgtatggaaaacttagacctactgggtcccactgacgtggatgccctaatgtcaatgcttagatctttgtcaagagtagacctacagcgccaagtgcaaaccctaatgggccttcacctttccggcccatcacactcccaacactatcgccatacaccactcgagaccgatttctacgactacaaggacgacgatgacaagactagtggctccggcgagggcagaggaagtctactaacctgcggagatgtggaagaaaatcctggcccacatatgaccgagtacaagcccacggtgcgcctcgccacccgcgacgacgtccccagggccgtacgcaccctcgccgccgcgttcgccgactaccccgccacgcgccacaccgtcgatccggaccgccacatcgagcgggtcaccgagctgcaagaactcttcctcacgcgcgtcgggctcgacatcggcaaggtgtgggtcgcggacgacggcgccgcggtggcggtctggaccacgccggagagcgtcgaagcgggggcggtgttcgccgagatcggcccgcgcatggccgagttgagcggttcccggctggccgcgcagcaacagatggaaggcctcctggcgccgcaccggcccaaggagcccgcgtggttcctggccaccgtcggcgtctcgcccgaccaccagggcaagggtctgggcagcgccgtcgtgctccccggagtggaggcggccgagcgcgccggggtgcccgccttcctggagacctccgcgccccgcaacctccccttctacgagcggctcggcttcaccgtcaccgccgacgtcgaggtgcccgaaggaccgcgcacctggtgcatgacccgcaagcccggtgcctga

SEQ ID NO: 1016 - DNA, 2736 bp, Artificial Sequence
  Synthetic Polynucleotides
atggccttaccagtgaccgccttgctcctgccgctggccttgctgctccacgccgccaggccggacatccagatgacccagagccccagcagcctgtctgccagcgtgggcgacagagtgaccatcacctgtagagccagccagagcatcagcctgtggctgaactggtatcagcagaagcccggcaaggcccccaagctgctgatctacgccgccagcacactccagagcggcgtgccaagcagattttccggcagcggctccggcaccgacttcaccctgacaatcagctccctccagcccgaggacttcgccacctactactgccagcagtactacaccagcccctacaccttcggccagggcaccaaggtggaaatcaagagaggcggaggcggaagtggaggcggaggatctggcggcggaggctctcaggtgcaactgctggaatctggcggcggactggtgcagcctggcggatctctgagactgagctgtgccgccagcggcttcaccttcagcagctacgccatgagctgggtgcgccaggcccctggaaaaggactggaatgggtgtccgtgatccggtccagcggcagcagcacctattacgccgatagcgtgaagggccggttcaccatcagccgggacaacagcaagaacaccctgtacctccagatgaacagcctgcgggccgaggacaccgccgtgtactattgtgctaggggaggcggctacttcgactactggggccagggaacactcgtgaccgtgtcctctacgcgtgagcagaaactgatctcggaagaggatctggcgaagcccaccacgacgccagcgccgcgaccaccaacaccggcgcccaccatcgcgtcgcagcccctgtccctgcgcccagaggcgtgccggccagcggcggggggcgcagtgcacacgagggggctggacttcgcctgtgacatctacatctgggcgcccttggccgggacttgtggggtccttctcctgtcactggttatcaccctttactgcgggcgcgccagagtgaagttcagcaggagcgcagacgcccccgcgtaccagcagggccagaaccagctctataacgagctgaatctaggacgaagagaggagtacgatgttttggacaagagacgtggccgggaccctgagatggggggaaagccgagaaggaagaaccctcaggaaggcctgtacaatgaactgcagaaagataagatggcggaggcctacagtgagattgggatgaaaggcgagcgccggaggggcaaggggcacgatggcctttaccagggtctcagtacagccaccaaggacacctacgacgcccttcacatgcaggccctgccccctcgctctagaggatctggagcaacaaacttctcactactcaaacaagcaggtgacgtggaggagaatcccgggcctgggatccacatggccacttacgaggttctctgtgaggtggcgcggaaactgggcacggatgacagggaagtggtattgttcctcctaaacgtgttcatacctcaacccacactggcccaattaattggagctcttagagctttaaaggaggagggcaggttaacgtttcccctgttagcggaatgtctgtttcgtgcaggtcgcagagacctcttgcgcgacctgcttcacttagacccgcgttttttagagcgccacctagcgggcacaatgagttatttcagcccttatcagctcactgttctccacgtagacggggagctgtgtgcgagggatattaggtctttgatatttttaagcaaggacactatagggtctcgcagcacaccacagacattcttacactgggtgtactgtatggaaaacttagacctactgggtcccactgacgtggatgccctaatgtcaatgcttagatctttgtcaagagtagacctacagcgccaagtgcaaaccctaatgggccttcacctttccggcccatcacactcccaacactatcgccatacaccactcgagaccgatttctacgactacaaggacgacgatgacaagactagtggctccggcgagggcagaggaagtctactaacctgcggagatgtggaagaaaatcctggcccacatatgaccgagtacaagcccacggtgcgcctcgccacccgcgacgacgtccccagggccgtacgcaccctcgccgccgcgttcgccgactaccccgccacgcgccacaccgtcgatccggaccgccacatcgagcgggtcaccgagctgcaagaactcttcctcacgcgcgtcgggctcgacatcggcaaggtgtgggtcgcggacgacggcgccgcggtggcggtctggaccacgccggagagcgtcgaagcgggggcggtgttcgccgagatcggcccgcgcatggccgagttgagcggttcccggctggccgcgcagcaacagatggaaggcctcctggcgccgcaccggcccaaggagcccgcgtggttcctggccaccgtcggcgtctcgcccgaccaccagggcaagggtctgggcagcgccgtcgtgctccccggagtggaggcggccgagcgcgccggggtgcccgccttcctggagacctccgcgccccgcaacctccccttctacgagcggctcggcttcaccgtcaccgccgacgtcgaggtgcccgaaggaccgcgcacctggtgcatgacccgcaagcccggtgcctga

SEQ ID NO: 1017 - DNA, 2745 bp, Artificial Sequence
  Synthetic Polynucleotides
atggccttaccagtgaccgccttgctcctgccgctggccttgctgctccacgccgccaggccggacatccagatgacccagagccccagcagcctgtctgccagcgtgggcgacagagtgaccatcacctgtagagccagccagagcatcagcagctacctgaactggtatcagcagaagcccggcaaggcccccaaactgctgatctacgccgtgtccacactccagagcggcgtgcccagcagattttctggcagcggctccggcaccgacttcaccctgacaatcagctccctccagcccgaggacttcgccacctactactgtcagcagagcggcaccttccctcccaccacatttggacagggcaccaaggtggaaatcaagagaggcggaggcggaagtggaggcggaggatctggcggcggaggctctcaggtgcaactgctggaatctggcggcggactggtgcagcctggcggatctctgagactgagctgtgccgccagcggcttcaccttcagcagccacggaatgcactgggtgcgccaggcccctggaaagggactggaatgggtgtccgtgatctccggcagcggcagcaataccggctacgccgatagcgtgaagggccggttcaccatcagccgggacaacagcaagaacaccctgtacctccagatgaacagcctgcgggccgaggacaccgccgtgtactattgtgccagacagtggggcagctacgccttcgattcttggggccagggcaccctcgtgaccgtgtcatctacgcgtgagcagaaactgatctcggaagaggatctggcgaagcccaccacgacgccagcgccgcgaccaccaacaccggcgcccaccatcgcgtcgcagcccctgtccctgcgcccagaggcgtgccggccagcggcggggggcgcagtgcacacgagggggctggacttcgcctgtgacatctacatctgggcgcccttggccgggacttgtggggtccttctcctgtcactggttatcaccctttactgcgggcgcgccagagtgaagttcagcaggagcgcagacgcccccgcgtaccagcagggccagaaccagctctataacgagctgaatctaggacgaagagaggagtacgatgttttggacaagagacgtggccgggaccctgagatggggggaaagccgagaaggaagaaccctcaggaaggcctgtacaatgaactgcagaaagataagatggcggaggcctacagtgagattgggatgaaaggcgagcgccggaggggcaaggggcacgatggcctttaccagggtctcagtacagccaccaaggacacctacgacgcccttcacatgcaggccctgccccctcgctctagaggatctggagcaacaaacttctcactactcaaacaagcaggtgacgtggaggagaatcccgggcctgggatccacatggccacttacgaggttctctgtgaggtggcgcggaaactgggcacggatgacagggaagtggtattgttcctcctaaacgtgttcatacctcaacccacactggcccaattaattggagctcttagagctttaaaggaggagggcaggttaacgtttcccctgttagcggaatgtctgtttcgtgcaggtcgcagagacctcttgcgcgacctgcttcacttagacccgcgttttttagagcgccacctagcgggcacaatgagttatttcagcccttatcagctcactgttctccacgtagacggggagctgtgtgcgagggatattaggtctttgatatttttaagcaaggacactatagggtctcgcagcacaccacagacattcttacactgggtgtactgtatggaaaacttagacctactgggtcccactgacgtggatgccctaatgtcaatgcttagatctttgtcaagagtagacctacagcgccaagtgcaaaccctaatgggccttcacctttccggcccatcacactcccaacactatcgccatacaccactcgagaccgatttctacgactacaaggacgacgatgacaagactagtggctccggcgagggcagaggaagtctactaacctgcggagatgtggaagaaaatcctggcccacatatgaccgagtacaagcccacggtgcgcctcgccacccgcgacgacgtccccagggccgtacgcaccctcgccgccgcgttcgccgactaccccgccacgcgccacaccgtcgatccggaccgccacatcgagcgggtcaccgagctgcaagaactcttcctcacgcgcgtcgggctcgacatcggcaaggtgtgggtcgcggacgacggcgccgcggtggcggtctggaccacgccggagagcgtcgaagcgggggcggtgttcgccgagatcggcccgcgcatggccgagttgagcggttcccggctggccgcgcagcaacagatggaaggcctcctggcgccgcaccggcccaaggagcccgcgtggttcctggccaccgtcggcgtctcgcccgaccaccagggcaagggtctgggcagcgccgtcgtgctccccggagtggaggcggccgagcgcgccggggtgcccgccttcctggagacctccgcgccccgcaacctccccttctacgagcggctcggcttcaccgtcaccgccgacgtcgaggtgcccgaaggaccgcgcacctggtgcatgacccgcaagcccggtgcctga

SEQ ID NO: 1018 - DNA, 2775 bp, Artificial Sequence
  Synthetic Polynucleotides
atggccttaccagtgaccgccttgctcctgccgctggccttgctgctccacgccgccaggccggacatcgtgatgagccagagccctagcagcctggccgtgtccgtgggcgagaaagtgaccatgagctgcaagagcagccagtccctgctgcacagcagcaaccagaagaactacctggcctggtatcagcagaagcccggccagtcccccaaggtgctgatctactgggccagcaccagagaaagcggcgtgcccgatagattcaccggcagcggctctggcaccgacttcaccctgaccatcaccagcgtgaagtccgaggacctggctgtgtactactgccagcagtattacagctacccctggaccttcggcggaggcacccggctggaaatcaaaagaggcggaggcggaagtggaggcggaggatctggcggcggaggctctgaagtgcaactccagcagagcgtggccgagcttgtgaagcctggcgcttccgtgaagatgtcctgcaaggtgtccggctacaccctgacagaccacaccatccactggatgaagcagcggcctgagcagggcctggaatggatcggctacatctaccccagggacggcatcaccggctacaacgagaagttcaagggcaaggccacactgaccgccgacaccagcagcagcacagcctacatgcaactgaacagcctgaccagcgaggacagcgccgtgtacttctgtgccagatggggctacagctacagaaactacgcctactactacgactactggggccagggcacaaccctgaccgtgtctagtacgcgtgagcagaaactgatctcggaagaggatctggcgaagcccaccacgacgccagcgccgcgaccaccaacaccggcgcccaccatcgcgtcgcagcccctgtccctgcgcccagaggcgtgccggccagcggcggggggcgcagtgcacacgagggggctggacttcgcctgtgacatctacatctgggcgcccttggccgggacttgtggggtccttctcctgtcactggttatcaccctttactgcgggcgcgccagagtgaagttcagcaggagcgcagacgcccccgcgtaccagcagggccagaaccagctctataacgagctgaatctaggacgaagagaggagtacgatgttttggacaagagacgtggccgggaccctgagatggggggaaagccgagaaggaagaaccctcaggaaggcctgtacaatgaactgcagaaagataagatggcggaggcctacagtgagattgggatgaaaggcgagcgccggaggggcaaggggcacgatggcctttaccagggtctcagtacagccaccaaggacacctacgacgcccttcacatgcaggccctgccccctcgctctagaggatctggagcaacaaacttctcactactcaaacaagcaggtgacgtggaggagaatcccgggcctgggatccacatggccacttacgaggttctctgtgaggtggcgcggaaactgggcacggatgacagggaagtggtattgttcctcctaaacgtgttcatacctcaacccacactggcccaattaattggagctcttagagctttaaaggaggagggcaggttaacgtttcccctgttagcggaatgtctgtttcgtgcaggtcgcagagacctcttgcgcgacctgcttcacttagacccgcgttttttagagcgccacctagcgggcacaatgagttatttcagcccttatcagctcactgttctccacgtagacggggagctgtgtgcgagggatattaggtctttgatatttttaagcaaggacactatagggtctcgcagcacaccacagacattcttacactgggtgtactgtatggaaaacttagacctactgggtcccactgacgtggatgccctaatgtcaatgcttagatctttgtcaagagtagacctacagcgccaagtgcaaaccctaatgggccttcacctttccggcccatcacactcccaacactatcgccatacaccactcgagaccgatttctacgactacaaggacgacgatgacaagactagtggctccggcgagggcagaggaagtctactaacctgcggagatgtggaagaaaatcctggcccacatatgaccgagtacaagcccacggtgcgcctcgccacccgcgacgacgtccccagggccgtacgcaccctcgccgccgcgttcgccgactaccccgccacgcgccacaccgtcgatccggaccgccacatcgagcgggtcaccgagctgcaagaactcttcctcacgcgcgtcgggctcgacatcggcaaggtgtgggtcgcggacgacggcgccgcggtggcggtctggaccacgccggagagcgtcgaagcgggggcggtgttcgccgagatcggcccgcgcatggccgagttgagcggttcccggctggccgcgcagcaacagatggaaggcctcctggcgccgcaccggcccaaggagcccgcgtggttcctggccaccgtcggcgtctcgcccgaccaccagggcaagggtctgggcagcgccgtcgtgctccccggagtggaggcggccgagcgcgccggggtgcccgccttcctggagacctccgcgccccgcaacctccccttctacgagcggctcggcttcaccgtcaccgccgacgtcgaggtgcccgaaggaccgcgcacctggtgcatgacccgcaagcccggtgcctga

SEQ ID NO: 1019 - DNA, 2766 bp, Artificial Sequence
  Synthetic Polynucleotides
atggccttaccagtgaccgccttgctcctgccgctggccttgctgctccacgccgccaggccggagatcgtgctgacacagagccctggcaccctgagcctgtctccaggcgaaagagccacactgagctgtcgggccagccagagcgtgtccagctcttacctggcctggtatcagcagaagcccggccaggctccccggctgctgatctacggaacaagcagcagagccaccggcatccccgacagattttctggcagcggctccggcaccgacttcaccctgacaatcagcagactggaacccgaggacttcgccgtgtactactgccagcagtacggcagcagccccttcacctttggcggaggcaccaaggtggaaatcaagagaggcggaggcggaagtggaggcggaggatctggcggcggaggctctcaggtgcaactccaggaatctggccccggactggctaagcccagcgagacactgagcctgacctgtaccgtgtccggcgacagcatcaccagctactactggtcctggatcagacagccccctggcaagggcctggaatggatcggctacatctactacagcggcagcaccaactacaaccccagcctgaagtccagagtgaccatcagcgtggacaccagcaagaaccagttctccctgaagctgagcagcgtgacagccgccgacaccgccgtgtattattgcgccagagatcagcggagaatcgccgctgccggcacccacttttacggcatggatgtgtggggccagggcaccaccgtgaccgtgtcatctacgcgtgagcagaaactgatctcggaagaggatctggcgaagcccaccacgacgccagcgccgcgaccaccaacaccggcgcccaccatcgcgtcgcagcccctgtccctgcgcccagaggcgtgccggccagcggcggggggcgcagtgcacacgagggggctggacttcgcctgtgacatctacatctgggcgcccttggccgggacttgtggggtccttctcctgtcactggttatcaccctttactgcgggcgcgccagagtgaagttcagcaggagcgcagacgcccccgcgtaccagcagggccagaaccagctctataacgagctgaatctaggacgaagagaggagtacgatgttttggacaagagacgtggccgggaccctgagatggggggaaagccgagaaggaagaaccctcaggaaggcctgtacaatgaactgcagaaagataagatggcggaggcctacagtgagattgggatgaaaggcgagcgccggaggggcaaggggcacgatggcctttaccagggtctcagtacagccaccaaggacacctacgacgcccttcacatgcaggccctgccccctcgctctagaggatctggagcaacaaacttctcactactcaaacaagcaggtgacgtggaggagaatcccgggcctgggatccacatggccacttacgaggttctctgtgaggtggcgcggaaactgggcacggatgacagggaagtggtattgttcctcctaaacgtgttcatacctcaacccacactggcccaattaattggagctcttagagctttaaaggaggagggcaggttaacgtttcccctgttagcggaatgtctgtttcgtgcaggtcgcagagacctcttgcgcgacctgcttcacttagacccgcgttttttagagcgccacctagcgggcacaatgagttatttcagcccttatcagctcactgttctccacgtagacggggagctgtgtgcgagggatattaggtctttgatatttttaagcaaggacactatagggtctcgcagcacaccacagacattcttacactgggtgtactgtatggaaaacttagacctactgggtcccactgacgtggatgccctaatgtcaatgcttagatctttgtcaagagtagacctacagcgccaagtgcaaaccctaatgggccttcacctttccggcccatcacactcccaacactatcgccatacaccactcgagaccgatttctacgactacaaggacgacgatgacaagactagtggctccggcgagggcagaggaagtctactaacctgcggagatgtggaagaaaatcctggcccacatatgaccgagtacaagcccacggtgcgcctcgccacccgcgacgacgtccccagggccgtacgcaccctcgccgccgcgttcgccgactaccccgccacgcgccacaccgtcgatccggaccgccacatcgagcgggtcaccgagctgcaagaactcttcctcacgcgcgtcgggctcgacatcggcaaggtgtgggtcgcggacgacggcgccgcggtggcggtctggaccacgccggagagcgtcgaagcgggggcggtgttcgccgagatcggcccgcgcatggccgagttgagcggttcccggctggccgcgcagcaacagatggaaggcctcctggcgccgcaccggcccaaggagcccgcgtggttcctggccaccgtcggcgtctcgcccgaccaccagggcaagggtctgggcagcgccgtcgtgctccccggagtggaggcggccgagcgcgccggggtgcccgccttcctggagacctccgcgccccgcaacctccccttctacgagcggctcggcttcaccgtcaccgccgacgtcgaggtgcccgaaggaccgcgcacctggtgcatgacccgcaagcccggtgcctga

SEQ ID NO: 1020 - DNA, 2742 bp, Artificial Sequence
  Synthetic Polynucleotides
atggccttaccagtgaccgccttgctcctgccgctggccttgctgctccacgccgccaggccggacatcctgctgacccagagccccgtgatcctgtccgtgtctcctggcgagagagtgtccttcagctgtcgggccagccagagcatcggcaccaacatccactggtatcagcagcggaccaacggcagccccagactgctgattaagtacgccagcgagtccatcagcggcatccccagcagattttccggcagcggctccggcaccgacttcaccctgagcatcaacagcgtggaaagcgaggacattgccgactactactgccagcagaacaacaactggcccaccaccttcggagccggcaccaagctggaactgaagggcggaggcggaagtggaggcggaggatctggcggcggaggctctcaggtgcagctgaagcagagcggacctggcctggtgcagcctagccagagcctgtccatcacctgtaccgtgtccggcttcagcctgaccaactacggcgtgcactgggtgcgccagagccctggaaaaggactggaatggctgggagtgatttggagcggcggcaacaccgactacaacacccccttcaccagcagactgtctatcaacaaggacaacagcaagagccaggtgttcttcaagatgaacagcctccagagcaacgacaccgccatctactactgtgctagagccctgacctactatgactacgagttcgcctactggggccagggcacactcgtgacagtgtctgctacgcgtgagcagaaactgatctcggaagaggatctggcgaagcccaccacgacgccagcgccgcgaccaccaacaccggcgcccaccatcgcgtcgcagcccctgtccctgcgcccagaggcgtgccggccagcggcggggggcgcagtgcacacgagggggctggacttcgcctgtgacatctacatctgggcgcccttggccgggacttgtggggtccttctcctgtcactggttatcaccctttactgcgggcgcgccagagtgaagttcagcaggagcgcagacgcccccgcgtaccagcagggccagaaccagctctataacgagctgaatctaggacgaagagaggagtacgatgttttggacaagagacgtggccgggaccctgagatggggggaaagccgagaaggaagaaccctcaggaaggcctgtacaatgaactgcagaaagataagatggcggaggcctacagtgagattgggatgaaaggcgagcgccggaggggcaaggggcacgatggcctttaccagggtctcagtacagccaccaaggacacctacgacgcccttcacatgcaggccctgccccctcgctctagaggatctggagcaacaaacttctcactactcaaacaagcaggtgacgtggaggagaatcccgggcctgggatccacatggccacttacgaggttctctgtgaggtggcgcggaaactgggcacggatgacagggaagtggtattgttcctcctaaacgtgttcatacctcaacccacactggcccaattaattggagctcttagagctttaaaggaggagggcaggttaacgtttcccctgttagcggaatgtctgtttcgtgcaggtcgcagagacctcttgcgcgacctgcttcacttagacccgcgttttttagagcgccacctagcgggcacaatgagttatttcagcccttatcagctcactgttctccacgtagacggggagctgtgtgcgagggatattaggtctttgatatttttaagcaaggacactatagggtctcgcagcacaccacagacattcttacactgggtgtactgtatggaaaacttagacctactgggtcccactgacgtggatgccctaatgtcaatgcttagatctttgtcaagagtagacctacagcgccaagtgcaaaccctaatgggccttcacctttccggcccatcacactcccaacactatcgccatacaccactcgagaccgatttctacgactacaaggacgacgatgacaagactagtggctccggcgagggcagaggaagtctactaacctgcggagatgtggaagaaaatcctggcccacatatgaccgagtacaagcccacggtgcgcctcgccacccgcgacgacgtccccagggccgtacgcaccctcgccgccgcgttcgccgactaccccgccacgcgccacaccgtcgatccggaccgccacatcgagcgggtcaccgagctgcaagaactcttcctcacgcgcgtcgggctcgacatcggcaaggtgtgggtcgcggacgacggcgccgcggtggcggtctggaccacgccggagagcgtcgaagcgggggcggtgttcgccgagatcggcccgcgcatggccgagttgagcggttcccggctggccgcgcagcaacagatggaaggcctcctggcgccgcaccggcccaaggagcccgcgtggttcctggccaccgtcggcgtctcgcccgaccaccagggcaagggtctgggcagcgccgtcgtgctccccggagtggaggcggccgagcgcgccggggtgcccgccttcctggagacctccgcgccccgcaacctccccttctacgagcggctcggcttcaccgtcaccgccgacgtcgaggtgcccgaaggaccgcgcacctggtgcatgacccgcaagcccggtgcctga

SEQ ID NO: 1021 - DNA, 2721 bp, Artificial Sequence
  Synthetic Polynucleotides
atggccttaccagtgaccgccttgctcctgccgctggccttgctgctccacgccgccaggccgatgacccagagccccaagttcctgctggtgtctgccggcgacagagtgaccctgacatgcaaggccagccagagcgtgaacaacgacgtgtactggtatcagcaggaacccggccagtcccccaagctgctgatctactgggccagcaccagagaaagcggcgtgcccgatagattcaccggcagcggctctggcaccgacttcaccctgacaatcagcagcgtgcaggccgaggacctggccgtgtactactgcaagcagagctacaacctgtacaccttcggcggaggcaccaagctggaaatcaagagaggcggcggaggatctggcggaggcggatctgggggcggaggctctgaatctggaagaggactggtgcagcctggcggcagcagaaagctgtcttgtgccgccagcggcttcaccttcagcaccagcggaatgcactgggtgcgccaggcccctgagaagggactggaatgggtggcctacatcagctccggcagcaccaccatctaccacgccgataccgtgaagggccggttcaccatcagccgggacaaccccaagaataccctgttcctccagatgaccagcctgcggagcgaggacaccgccatgtactattgctgcgccagaagcggccagttcggcaactacttcgactactggggccagggcaccaccctgaccgtgtcatctacgcgtgagcagaaactgatctcggaagaggatctggcgaagcccaccacgacgccagcgccgcgaccaccaacaccggcgcccaccatcgcgtcgcagcccctgtccctgcgcccagaggcgtgccggccagcggcggggggcgcagtgcacacgagggggctggacttcgcctgtgacatctacatctgggcgcccttggccgggacttgtggggtccttctcctgtcactggttatcaccctttactgcgggcgcgccagagtgaagttcagcaggagcgcagacgcccccgcgtaccagcagggccagaaccagctctataacgagctgaatctaggacgaagagaggagtacgatgttttggacaagagacgtggccgggaccctgagatggggggaaagccgagaaggaagaaccctcaggaaggcctgtacaatgaactgcagaaagataagatggcggaggcctacagtgagattgggatgaaaggcgagcgccggaggggcaaggggcacgatggcctttaccagggtctcagtacagccaccaaggacacctacgacgcccttcacatgcaggccctgccccctcgctctagaggatctggagcaacaaacttctcactactcaaacaagcaggtgacgtggaggagaatcccgggcctgggatccacatggccacttacgaggttctctgtgaggtggcgcggaaactgggcacggatgacagggaagtggtattgttcctcctaaacgtgttcatacctcaacccacactggcccaattaattggagctcttagagctttaaaggaggagggcaggttaacgtttcccctgttagcggaatgtctgtttcgtgcaggtcgcagagacctcttgcgcgacctgcttcacttagacccgcgttttttagagcgccacctagcgggcacaatgagttatttcagcccttatcagctcactgttctccacgtagacggggagctgtgtgcgagggatattaggtctttgatatttttaagcaaggacactatagggtctcgcagcacaccacagacattcttacactgggtgtactgtatggaaaacttagacctactgggtcccactgacgtggatgccctaatgtcaatgcttagatctttgtcaagagtagacctacagcgccaagtgcaaaccctaatgggccttcacctttccggcccatcacactcccaacactatcgccatacaccactcgagaccgatttctacgactacaaggacgacgatgacaagactagtggctccggcgagggcagaggaagtctactaacctgcggagatgtggaagaaaatcctggcccacatatgaccgagtacaagcccacggtgcgcctcgccacccgcgacgacgtccccagggccgtacgcaccctcgccgccgcgttcgccgactaccccgccacgcgccacaccgtcgatccggaccgccacatcgagcgggtcaccgagctgcaagaactcttcctcacgcgcgtcgggctcgacatcggcaaggtgtgggtcgcggacgacggcgccgcggtggcggtctggaccacgccggagagcgtcgaagcgggggcggtgttcgccgagatcggcccgcgcatggccgagttgagcggttcccggctggccgcgcagcaacagatggaaggcctcctggcgccgcaccggcccaaggagcccgcgtggttcctggccaccgtcggcgtctcgcccgaccaccagggcaagggtctgggcagcgccgtcgtgctccccggagtggaggcggccgagcgcgccggggtgcccgccttcctggagacctccgcgccccgcaacctccccttctacgagcggctcggcttcaccgtcaccgccgacgtcgaggtgcccgaaggaccgcgcacctggtgcatgacccgcaagcccggtgcctga

SEQ ID NO: 1022 - DNA, 2736 bp, Artificial Sequence
  Synthetic Polynucleotides
atggccttaccagtgaccgccttgctcctgccgctggccttgctgctccacgccgccaggccgcagagcccatctagcctggctgtgtctgccggcgagaaagtgaccatgagctgcaagagcagccagagcctgctgaacagccggacccggaagaactacctggcctggtatcagcagaagcccggccagagccccaagctgctgatctactgggccagcaccagagaaagcggcgtgcccgatagattcaccggctctggcagcggcaccgacttcaccctgacaatcagcagcgtgcaggccgaggacctggccgtgtactactgcaagcagagcaacctgtacaccttcggcggaggcaccaagctggaaatcaagggcggaggcggaagtggaggcggaggatctggcggcggaggctctcaggtgcagctggaagagtctggacccgagcttgtgaagcctggggccagcgtgaagctgtcctgtaaagccagcggctacaccttcaccgagtacatcatccactgggtcaagcagcggagcggccagggcctggaatggatcggctggttttaccctggctccggcagcatcaagtacaacgagaagttcaaggacaaggccaccctgaccgccgacaagtccagcagcaccgtgtacatggaactgagcggcctgaccagcgaggacagcgccgtgtatttctgcgccagacacgacggctacagctacttcgactattggggccagggcaccacactgaccgtgtcctctacgcgtgagcagaaactgatctcggaagaggatctggcgaagcccaccacgacgccagcgccgcgaccaccaacaccggcgcccaccatcgcgtcgcagcccctgtccctgcgcccagaggcgtgccggccagcggcggggggcgcagtgcacacgagggggctggacttcgcctgtgacatctacatctgggcgcccttggccgggacttgtggggtccttctcctgtcactggttatcaccctttactgcgggcgcgccagagtgaagttcagcaggagcgcagacgcccccgcgtaccagcagggccagaaccagctctataacgagctgaatctaggacgaagagaggagtacgatgttttggacaagagacgtggccgggaccctgagatggggggaaagccgagaaggaagaaccctcaggaaggcctgtacaatgaactgcagaaagataagatggcggaggcctacagtgagattgggatgaaaggcgagcgccggaggggcaaggggcacgatggcctttaccagggtctcagtacagccaccaaggacacctacgacgcccttcacatgcaggccctgccccctcgctctagaggatctggagcaacaaacttctcactactcaaacaagcaggtgacgtggaggagaatcccgggcctgggatccacatggccacttacgaggttctctgtgaggtggcgcggaaactgggcacggatgacagggaagtggtattgttcctcctaaacgtgttcatacctcaacccacactggcccaattaattggagctcttagagctttaaaggaggagggcaggttaacgtttcccctgttagcggaatgtctgtttcgtgcaggtcgcagagacctcttgcgcgacctgcttcacttagacccgcgttttttagagcgccacctagcgggcacaatgagttatttcagcccttatcagctcactgttctccacgtagacggggagctgtgtgcgagggatattaggtctttgatatttttaagcaaggacactatagggtctcgcagcacaccacagacattcttacactgggtgtactgtatggaaaacttagacctactgggtcccactgacgtggatgccctaatgtcaatgcttagatctttgtcaagagtagacctacagcgccaagtgcaaaccctaatgggccttcacctttccggcccatcacactcccaacactatcgccatacaccactcgagaccgatttctacgactacaaggacgacgatgacaagactagtggctccggcgagggcagaggaagtctactaacctgcggagatgtggaagaaaatcctggcccacatatgaccgagtacaagcccacggtgcgcctcgccacccgcgacgacgtccccagggccgtacgcaccctcgccgccgcgttcgccgactaccccgccacgcgccacaccgtcgatccggaccgccacatcgagcgggtcaccgagctgcaagaactcttcctcacgcgcgtcgggctcgacatcggcaaggtgtgggtcgcggacgacggcgccgcggtggcggtctggaccacgccggagagcgtcgaagcgggggcggtgttcgccgagatcggcccgcgcatggccgagttgagcggttcccggctggccgcgcagcaacagatggaaggcctcctggcgccgcaccggcccaaggagcccgcgtggttcctggccaccgtcggcgtctcgcccgaccaccagggcaagggtctgggcagcgccgtcgtgctccccggagtggaggcggccgagcgcgccggggtgcccgccttcctggagacctccgcgccccgcaacctccccttctacgagcggctcggcttcaccgtcaccgccgacgtcgaggtgcccgaaggaccgcgcacctggtgcatgacccgcaagcccggtgcctga

SEQ ID NO: 1023 - DNA, 2772 bp, Artificial Sequence
  Synthetic Polynucleotides
atggaaatgttccagggcctgctgctgctcctgctgctttctatgggaggcacatgggccagcagagagatgctgaggcccagatgcagacccatcaatgccacactggccgtggaaaaagagggctgccctgtctgcatcaccgtgaacaccacaatctgcgccggctactgccccaccatgacaagagttctgcaaggcgtgctgcccgctctgcctcaggtcgtgtgcaactatcgggacgtccgcttcgagagcatcagactgcctggatgtcccagaggcgtgaaccctgtggtgtcttatgccgtggctctgagctgtcagtgcgccctgtgtagaagaagcaccaccgattgcggcggacccaaggatcaccctctgacctgtgacgaccctagattccaggccagcagcagctctaaagcccctccaccttctctgccatctccaagcagactgcccggacctagcgacacacctattctgcctcaaggcggaggcggaagtggaggcggaggatctggcggcggaggctctgctcctgatgtgcaggattgccctgagtgcaccctgcaagagaaccccttcttctcccaacctggcgctcctatcctccagtgcatgggctgctgcttcagccgggcttatcccacacctctgcggagcaagaaaaccatgctggtccagaaaaacgtgaccagcgagagcacctgttgtgtggctaagagctacaacagagtgaccgtgatgggcggcttcaaggtggaaaatcacaccgcctgccactgctccacctgttactaccacaagagcacgcgtgagcagaaactgatctcggaagaggatctggcgaagcccaccacgacgccagcgccgcgaccaccaacaccggcgcccaccatcgcgtcgcagcccctgtccctgcgcccagaggcgtgccggccagcggcggggggcgcagtgcacacgagggggctggacttcgcctgtgacatctacatctgggcgcccttggccgggacttgtggggtccttctcctgtcactggttatcaccctttactgcgggcgcgccagagtgaagttcagcaggagcgcagacgcccccgcgtaccagcagggccagaaccagctctataacgagctgaatctaggacgaagagaggagtacgatgttttggacaagagacgtggccgggaccctgagatggggggaaagccgagaaggaagaaccctcaggaaggcctgtacaatgaactgcagaaagataagatggcggaggcctacagtgagattgggatgaaaggcgagcgccggaggggcaaggggcacgatggcctttaccagggtctcagtacagccaccaaggacacctacgacgcccttcacatgcaggccctgccccctcgctctagaggatctggagcaacaaacttctcactactcaaacaagcaggtgacgtggaggagaatcccgggcctgggatccacatggccacttacgaggttctctgtgaggtggcgcggaaactgggcacggatgacagggaagtggtattgttcctcctaaacgtgttcatacctcaacccacactggcccaattaattggagctcttagagctttaaaggaggagggcaggttaacgtttcccctgttagcggaatgtctgtttcgtgcaggtcgcagagacctcttgcgcgacctgcttcacttagacccgcgttttttagagcgccacctagcgggcacaatgagttatttcagcccttatcagctcactgttctccacgtagacggggagctgtgtgcgagggatattaggtctttgatatttttaagcaaggacactatagggtctcgcagcacaccacagacattcttacactgggtgtactgtatggaaaacttagacctactgggtcccactgacgtggatgccctaatgtcaatgcttagatctttgtcaagagtagacctacagcgccaagtgcaaaccctaatgggccttcacctttccggcccatcacactcccaacactatcgccatacaccactcgagaccgatttctacgactacaaggacgacgatgacaagactagtggctccggcgagggcagaggaagtctactaacctgcggagatgtggaagaaaatcctggcccacatatgaccgagtacaagcccacggtgcgcctcgccacccgcgacgacgtccccagggccgtacgcaccctcgccgccgcgttcgccgactaccccgccacgcgccacaccgtcgatccggaccgccacatcgagcgggtcaccgagctgcaagaactcttcctcacgcgcgtcgggctcgacatcggcaaggtgtgggtcgcggacgacggcgccgcggtggcggtctggaccacgccggagagcgtcgaagcgggggcggtgttcgccgagatcggcccgcgcatggccgagttgagcggttcccggctggccgcgcagcaacagatggaaggcctcctggcgccgcaccggcccaaggagcccgcgtggttcctggccaccgtcggcgtctcgcccgaccaccagggcaagggtctgggcagcgccgtcgtgctccccggagtggaggcggccgagcgcgccggggtgcccgccttcctggagacctccgcgccccgcaacctccccttctacgagcggctcggcttcaccgtcaccgccgacgtcgaggtgcccgaaggaccgcgcacctggtgcatgacccgcaagcccggtgcctga

SEQ ID NO: 1024 - DNA, 2745 bp, Artificial Sequence
  Synthetic Polynucleotides
atggccttaccagtgaccgccttgctcctgccgctggccttgctgctccacgccgccaggccggacatccagatgacccagagccccagcagcctgtctgcctctctgggcgagagagtgtccctgacctgtcgggccacacaggaactgagcggctacctgtcttggctgcagcagaagcccgacggcaccatcaagcggctgatctacgccgccagcaccctggatagcggcgtgcccaagagattcagcggcaacagaagcggcagcgactacagcctgaccatcagctccctggaaagcgaggacttcgccgactactactgcctgcagtacgccatctacccctacaccttcggcggaggcaccaagctggaaatcaagggcggaggcggaagtggaggcggaggatctggcggcggaggctctgaggtgcaactgcagcagtctggccccgagcttgtgaagcctggcgcctccgtgaagatgagctgcaaggccagcggctacacctttaccagctacttcatccactgggtcaagcagaaacccggccagggcctggaatggatcggcttcatcaacccttacaacgacggcagcaagtacaacgagaagttcaagggcaaggccaccctgaccagcgacaagagcagcagcaccgcctacatggaactgtccagcctgacatccgaggacagcgccgtgtactactgcaccagggacgacggctactacggctacgccatggactactggggccagggaacaagcgtcaccgtgtcctctacgcgtgagcagaaactgatctcggaagaggatctggcgaagcccaccacgacgccagcgccgcgaccaccaacaccggcgcccaccatcgcgtcgcagcccctgtccctgcgcccagaggcgtgccggccagcggcggggggcgcagtgcacacgagggggctggacttcgcctgtgacatctacatctgggcgcccttggccgggacttgtggggtccttctcctgtcactggttatcaccctttactgcgggcgcgccagagtgaagttcagcaggagcgcagacgcccccgcgtaccagcagggccagaaccagctctataacgagctgaatctaggacgaagagaggagtacgatgttttggacaagagacgtggccgggaccctgagatggggggaaagccgagaaggaagaaccctcaggaaggcctgtacaatgaactgcagaaagataagatggcggaggcctacagtgagattgggatgaaaggcgagcgccggaggggcaaggggcacgatggcctttaccagggtctcagtacagccaccaaggacacctacgacgcccttcacatgcaggccctgccccctcgctctagaggatctggagcaacaaacttctcactactcaaacaagcaggtgacgtggaggagaatcccgggcctgggatccacatggccacttacgaggttctctgtgaggtggcgcggaaactgggcacggatgacagggaagtggtattgttcctcctaaacgtgttcatacctcaacccacactggcccaattaattggagctcttagagctttaaaggaggagggcaggttaacgtttcccctgttagcggaatgtctgtttcgtgcaggtcgcagagacctcttgcgcgacctgcttcacttagacccgcgttttttagagcgccacctagcgggcacaatgagttatttcagcccttatcagctcactgttctccacgtagacggggagctgtgtgcgagggatattaggtctttgatatttttaagcaaggacactatagggtctcgcagcacaccacagacattcttacactgggtgtactgtatggaaaacttagacctactgggtcccactgacgtggatgccctaatgtcaatgcttagatctttgtcaagagtagacctacagcgccaagtgcaaaccctaatgggccttcacctttccggcccatcacactcccaacactatcgccatacaccactcgagaccgatttctacgactacaaggacgacgatgacaagactagtggctccggcgagggcagaggaagtctactaacctgcggagatgtggaagaaaatcctggcccacatatgaccgagtacaagcccacggtgcgcctcgccacccgcgacgacgtccccagggccgtacgcaccctcgccgccgcgttcgccgactaccccgccacgcgccacaccgtcgatccggaccgccacatcgagcgggtcaccgagctgcaagaactcttcctcacgcgcgtcgggctcgacatcggcaaggtgtgggtcgcggacgacggcgccgcggtggcggtctggaccacgccggagagcgtcgaagcgggggcggtgttcgccgagatcggcccgcgcatggccgagttgagcggttcccggctggccgcgcagcaacagatggaaggcctcctggcgccgcaccggcccaaggagcccgcgtggttcctggccaccgtcggcgtctcgcccgaccaccagggcaagggtctgggcagcgccgtcgtgctccccggagtggaggcggccgagcgcgccggggtgcccgccttcctggagacctccgcgccccgcaacctccccttctacgagcggctcggcttcaccgtcaccgccgacgtcgaggtgcccgaaggaccgcgcacctggtgcatgacccgcaagcccggtgcctga

SEQ ID NO: 1025 - DNA, 2760 bp, Artificial Sequence
  Synthetic Polynucleotides
atggccttaccagtgaccgccttgctcctgccgctggccttgctgctccacgccgccaggccggacaccatcgtgctgacacagagccctgcttccctggccgtgtccctgggacagagagccaccatctcttgcagagccagcgagagcgtggacagctacggcaacagcttcatgcactggtatcagcagaagcccggccagccccccaagctgctgatctacctggcctccaacctggaaagcggcgtgcccgccagattttctggcagcggcagcagaaccgacttcaccctgaccatcgaccccgtggaagccgatgatgccgccacctactactgccagcagaacaactacgacccctggaccttcggcggaggcaccaagctggaaatcaagggcggaggcggaagtggaggcggaggatctggcggcggaggctctgaagtgcaactccagcagagcggccctgagcttgtgaagcctggcgcttccgtgaagatgagctgcaaggccagcggctacaccttcaccagctacgtgatgcactgggtcaagcagaaacctggacagggcctggaatggatcggctacatcaacccctacaacgacggcaccaagtacaacgagaagttcaagggcaaggccaccctgacaagcgacaccagcagcagcaccgcctacatggaactgaacagcctgaccagcgaggacagcgccgtgtacttctgcgccagacccatctacttcgacaacgactacttcgattactggggccagggcaccaccctgaaggtgtcctctacgcgtgagcagaaactgatctcggaagaggatctggcgaagcccaccacgacgccagcgccgcgaccaccaacaccggcgcccaccatcgcgtcgcagcccctgtccctgcgcccagaggcgtgccggccagcggcggggggcgcagtgcacacgagggggctggacttcgcctgtgacatctacatctgggcgcccttggccgggacttgtggggtccttctcctgtcactggttatcaccctttactgcgggcgcgccagagtgaagttcagcaggagcgcagacgcccccgcgtaccagcagggccagaaccagctctataacgagctgaatctaggacgaagagaggagtacgatgttttggacaagagacgtggccgggaccctgagatggggggaaagccgagaaggaagaaccctcaggaaggcctgtacaatgaactgcagaaagataagatggcggaggcctacagtgagattgggatgaaaggcgagcgccggaggggcaaggggcacgatggcctttaccagggtctcagtacagccaccaaggacacctacgacgcccttcacatgcaggccctgccccctcgctctagaggatctggagcaacaaacttctcactactcaaacaagcaggtgacgtggaggagaatcccgggcctgggatccacatggccacttacgaggttctctgtgaggtggcgcggaaactgggcacggatgacagggaagtggtattgttcctcctaaacgtgttcatacctcaacccacactggcccaattaattggagctcttagagctttaaaggaggagggcaggttaacgtttcccctgttagcggaatgtctgtttcgtgcaggtcgcagagacctcttgcgcgacctgcttcacttagacccgcgttttttagagcgccacctagcgggcacaatgagttatttcagcccttatcagctcactgttctccacgtagacggggagctgtgtgcgagggatattaggtctttgatatttttaagcaaggacactatagggtctcgcagcacaccacagacattcttacactgggtgtactgtatggaaaacttagacctactgggtcccactgacgtggatgccctaatgtcaatgcttagatctttgtcaagagtagacctacagcgccaagtgcaaaccctaatgggccttcacctttccggcccatcacactcccaacactatcgccatacaccactcgagaccgatttctacgactacaaggacgacgatgacaagactagtggctccggcgagggcagaggaagtctactaacctgcggagatgtggaagaaaatcctggcccacatatgaccgagtacaagcccacggtgcgcctcgccacccgcgacgacgtccccagggccgtacgcaccctcgccgccgcgttcgccgactaccccgccacgcgccacaccgtcgatccggaccgccacatcgagcgggtcaccgagctgcaagaactcttcctcacgcgcgtcgggctcgacatcggcaaggtgtgggtcgcggacgacggcgccgcggtggcggtctggaccacgccggagagcgtcgaagcgggggcggtgttcgccgagatcggcccgcgcatggccgagttgagcggttcccggctggccgcgcagcaacagatggaaggcctcctggcgccgcaccggcccaaggagcccgcgtggttcctggccaccgtcggcgtctcgcccgaccaccagggcaagggtctgggcagcgccgtcgtgctccccggagtggaggcggccgagcgcgccggggtgcccgccttcctggagacctccgcgccccgcaacctccccttctacgagcggctcggcttcaccgtcaccgccgacgtcgaggtgcccgaaggaccgcgcacctggtgcatgacccgcaagcccggtgcctga

SEQ ID NO: 1026 - DNA, 2745 bp, Artificial Sequence
  Synthetic Polynucleotides
atggccttaccagtgaccgccttgctcctgccgctggccttgctgctccacgccgccaggccggacatccagatgacacagagccctagcagcctgtctgccagcgtgggagacagagtgaccatcacatgcaaggccagccaggatgtgtctacagccgtggcctggttccagcagaagcctggaaaagcccctaagctgctgatctacagccccagctacagatacaccggcgtgcccagcagattttctggcagcggctctggcaccgacttcaccctgacaatatccagcctccagcctgaggacttcacctactactgccagcagctctacagcaccccttacacattcggccagggcaccaaggtggaaatcaaaggcggaggcggaagtggaggcggaggatctggcggcggaggctctgaagtgcaactggttcagagcggagccgaagtgaagaaacctggggcctctgtgaaggtgtcctgcaaagccagcggctacacctttaccgactactacctggacgtggtcgtgcggcaagctcctggacaaggactggaatggatcggcagagtgaacccctacaacggcggcaccatctacaaccagaaattcaagggaagagtgaccctgaccagagacaccagcacctccacagcctacctggaactgagcagcctgagaagcgaagataccgccgtgtactactgcgccagggaccactacagatatgaccctctgctggactactggggccagggaaccctggttacagtgtctagtacgcgtgagcagaaactgatctcggaagaggatctggcgaagcccaccacgacgccagcgccgcgaccaccaacaccggcgcccaccatcgcgtcgcagcccctgtccctgcgcccagaggcgtgccggccagcggcggggggcgcagtgcacacgagggggctggacttcgcctgtgacatctacatctgggcgcccttggccgggacttgtggggtccttctcctgtcactggttatcaccctttactgcgggcgcgccagagtgaagttcagcaggagcgcagacgcccccgcgtaccagcagggccagaaccagctctataacgagctgaatctaggacgaagagaggagtacgatgttttggacaagagacgtggccgggaccctgagatggggggaaagccgagaaggaagaaccctcaggaaggcctgtacaatgaactgcagaaagataagatggcggaggcctacagtgagattgggatgaaaggcgagcgccggaggggcaaggggcacgatggcctttaccagggtctcagtacagccaccaaggacacctacgacgcccttcacatgcaggccctgccccctcgctctagaggatctggagcaacaaacttctcactactcaaacaagcaggtgacgtggaggagaatcccgggcctgggatccacatggccacttacgaggttctctgtgaggtggcgcggaaactgggcacggatgacagggaagtggtattgttcctcctaaacgtgttcatacctcaacccacactggcccaattaattggagctcttagagctttaaaggaggagggcaggttaacgtttcccctgttagcggaatgtctgtttcgtgcaggtcgcagagacctcttgcgcgacctgcttcacttagacccgcgttttttagagcgccacctagcgggcacaatgagttatttcagcccttatcagctcactgttctccacgtagacggggagctgtgtgcgagggatattaggtctttgatatttttaagcaaggacactatagggtctcgcagcacaccacagacattcttacactgggtgtactgtatggaaaacttagacctactgggtcccactgacgtggatgccctaatgtcaatgcttagatctttgtcaagagtagacctacagcgccaagtgcaaaccctaatgggccttcacctttccggcccatcacactcccaacactatcgccatacaccactcgagaccgatttctacgactacaaggacgacgatgacaagactagtggctccggcgagggcagaggaagtctactaacctgcggagatgtggaagaaaatcctggcccacatatgaccgagtacaagcccacggtgcgcctcgccacccgcgacgacgtccccagggccgtacgcaccctcgccgccgcgttcgccgactaccccgccacgcgccacaccgtcgatccggaccgccacatcgagcgggtcaccgagctgcaagaactcttcctcacgcgcgtcgggctcgacatcggcaaggtgtgggtcgcggacgacggcgccgcggtggcggtctggaccacgccggagagcgtcgaagcgggggcggtgttcgccgagatcggcccgcgcatggccgagttgagcggttcccggctggccgcgcagcaacagatggaaggcctcctggcgccgcaccggcccaaggagcccgcgtggttcctggccaccgtcggcgtctcgcccgaccaccagggcaagggtctgggcagcgccgtcgtgctccccggagtggaggcggccgagcgcgccggggtgcccgccttcctggagacctccgcgccccgcaacctccccttctacgagcggctcggcttcaccgtcaccgccgacgtcgaggtgcccgaaggaccgcgcacctggtgcatgacccgcaagcccggtgcctga

SEQ ID NO: 1027 - DNA, 2763 bp, Artificial Sequence
  Synthetic Polynucleotides
atggccttaccagtgaccgccttgctcctgccgctggccttgctgctccacgccgccaggccggacatccagatgacacagagccctagcagcctgtctgccagcgtgggagacagagtgaccatcacctgtagagccagccagagcgtgtccaccagcagctacaactacatgcactggtatcagcagaagcccggcaagcctcctaagctgctgattaagtacgccagcaacctggaaagcggcgtgcccagcagattttctggcagcggctctggcaccgacttcaccctgacaatatccagcctccagcctgaggacttcgccacctactactgtcagcactcctgggagatccctctgacattcggccagggcaccaaggtggaaatcaaaggcggaggcggaagtggaggcggaggatctggcggcggaggctctgaagtgcaactggttcagagcggagccgaagtgaagaaacctggggcctctgtgaaggtgtcctgcaaggccagcggctacagcttcaccgactattatatgcactgggtccgacaggctccaggccagggacttgagtggatcggcagaatcaacccctacaacggcgctgccttctacagccagaacttcaaggatagagtgaccctgaccgtggacaccagcaccagcacagcctacctggaactgagcagcctgagaagcgaggacaccgccgtgtactactgcgccattgagagaggcgctgacctggaaggctacgctatggattattggggccagggaaccctggtcaccgtgtcatctacgcgtgagcagaaactgatctcggaagaggatctggcgaagcccaccacgacgccagcgccgcgaccaccaacaccggcgcccaccatcgcgtcgcagcccctgtccctgcgcccagaggcgtgccggccagcggcggggggcgcagtgcacacgagggggctggacttcgcctgtgacatctacatctgggcgcccttggccgggacttgtggggtccttctcctgtcactggttatcaccctttactgcgggcgcgccagagtgaagttcagcaggagcgcagacgcccccgcgtaccagcagggccagaaccagctctataacgagctgaatctaggacgaagagaggagtacgatgttttggacaagagacgtggccgggaccctgagatggggggaaagccgagaaggaagaaccctcaggaaggcctgtacaatgaactgcagaaagataagatggcggaggcctacagtgagattgggatgaaaggcgagcgccggaggggcaaggggcacgatggcctttaccagggtctcagtacagccaccaaggacacctacgacgcccttcacatgcaggccctgccccctcgctctagaggatctggagcaacaaacttctcactactcaaacaagcaggtgacgtggaggagaatcccgggcctgggatccacatggccacttacgaggttctctgtgaggtggcgcggaaactgggcacggatgacagggaagtggtattgttcctcctaaacgtgttcatacctcaacccacactggcccaattaattggagctcttagagctttaaaggaggagggcaggttaacgtttcccctgttagcggaatgtctgtttcgtgcaggtcgcagagacctcttgcgcgacctgcttcacttagacccgcgttttttagagcgccacctagcgggcacaatgagttatttcagcccttatcagctcactgttctccacgtagacggggagctgtgtgcgagggatattaggtctttgatatttttaagcaaggacactatagggtctcgcagcacaccacagacattcttacactgggtgtactgtatggaaaacttagacctactgggtcccactgacgtggatgccctaatgtcaatgcttagatctttgtcaagagtagacctacagcgccaagtgcaaaccctaatgggccttcacctttccggcccatcacactcccaacactatcgccatacaccactcgagaccgatttctacgactacaaggacgacgatgacaagactagtggctccggcgagggcagaggaagtctactaacctgcggagatgtggaagaaaatcctggcccacatatgaccgagtacaagcccacggtgcgcctcgccacccgcgacgacgtccccagggccgtacgcaccctcgccgccgcgttcgccgactaccccgccacgcgccacaccgtcgatccggaccgccacatcgagcgggtcaccgagctgcaagaactcttcctcacgcgcgtcgggctcgacatcggcaaggtgtgggtcgcggacgacggcgccgcggtggcggtctggaccacgccggagagcgtcgaagcgggggcggtgttcgccgagatcggcccgcgcatggccgagttgagcggttcccggctggccgcgcagcaacagatggaaggcctcctggcgccgcaccggcccaaggagcccgcgtggttcctggccaccgtcggcgtctcgcccgaccaccagggcaagggtctgggcagcgccgtcgtgctccccggagtggaggcggccgagcgcgccggggtgcccgccttcctggagacctccgcgccccgcaacctccccttctacgagcggctcggcttcaccgtcaccgccgacgtcgaggtgcccgaaggaccgcgcacctggtgcatgacccgcaagcccggtgcctga

SEQ ID NO: 1028 - DNA, 2757 bp, Artificial Sequence
  Synthetic Polynucleotides
atggccttaccagtgaccgccttgctcctgccgctggccttgctgctccacgccgccaggccggagatcgtgctgacacagtctccagccacactgagcgcttctccaggcgagagagtgaccctgacctgtagagccagcagcaacgtgatctccagctacgtgcactggtatcagcagaagcctggcagcagccccagactgtttctgtacagcaccagcaatctggcctccggcgtgccaagcagattttctggctctggcagcggcaccgacttcacctttaccatctctagcctggaagccgaggacgccgccacctactactgtcagcagtacagcggctaccctctgaccttcggccagggcacaagactggaaatcaaaggcggaggcggaagtggaggcggaggatctggcggcggaggctctcaagttcagctgcaagagtctggccctggcctggtcaagcctagcgaaacactgagcctgacctgcgccgtgtctggctactctatcaccagcgcctactattggaactggatcagacagcctcctggcaaaggactggaatggatcggctacatcagctacgacggcagaaacaactacaaccccagcctgaagaaccggatcaccatcaatcccgacaccagcaagaaccagttcagcctccagctgaacagcgtgacccctgaggataccgccgtgtactactgtgccagagaaggcgactacgacgtgggcaactactacgctatggactactggggccagggaaccctggtcacagtctcttctacgcgtgagcagaaactgatctcggaagaggatctggcgaagcccaccacgacgccagcgccgcgaccaccaacaccggcgcccaccatcgcgtcgcagcccctgtccctgcgcccagaggcgtgccggccagcggcggggggcgcagtgcacacgagggggctggacttcgcctgtgacatctacatctgggcgcccttggccgggacttgtggggtccttctcctgtcactggttatcaccctttactgcgggcgcgccagagtgaagttcagcaggagcgcagacgcccccgcgtaccagcagggccagaaccagctctataacgagctgaatctaggacgaagagaggagtacgatgttttggacaagagacgtggccgggaccctgagatggggggaaagccgagaaggaagaaccctcaggaaggcctgtacaatgaactgcagaaagataagatggcggaggcctacagtgagattgggatgaaaggcgagcgccggaggggcaaggggcacgatggcctttaccagggtctcagtacagccaccaaggacacctacgacgcccttcacatgcaggccctgccccctcgctctagaggatctggagcaacaaacttctcactactcaaacaagcaggtgacgtggaggagaatcccgggcctgggatccacatggccacttacgaggttctctgtgaggtggcgcggaaactgggcacggatgacagggaagtggtattgttcctcctaaacgtgttcatacctcaacccacactggcccaattaattggagctcttagagctttaaaggaggagggcaggttaacgtttcccctgttagcggaatgtctgtttcgtgcaggtcgcagagacctcttgcgcgacctgcttcacttagacccgcgttttttagagcgccacctagcgggcacaatgagttatttcagcccttatcagctcactgttctccacgtagacggggagctgtgtgcgagggatattaggtctttgatatttttaagcaaggacactatagggtctcgcagcacaccacagacattcttacactgggtgtactgtatggaaaacttagacctactgggtcccactgacgtggatgccctaatgtcaatgcttagatctttgtcaagagtagacctacagcgccaagtgcaaaccctaatgggccttcacctttccggcccatcacactcccaacactatcgccatacaccactcgagaccgatttctacgactacaaggacgacgatgacaagactagtggctccggcgagggcagaggaagtctactaacctgcggagatgtggaagaaaatcctggcccacatatgaccgagtacaagcccacggtgcgcctcgccacccgcgacgacgtccccagggccgtacgcaccctcgccgccgcgttcgccgactaccccgccacgcgccacaccgtcgatccggaccgccacatcgagcgggtcaccgagctgcaagaactcttcctcacgcgcgtcgggctcgacatcggcaaggtgtgggtcgcggacgacggcgccgcggtggcggtctggaccacgccggagagcgtcgaagcgggggcggtgttcgccgagatcggcccgcgcatggccgagttgagcggttcccggctggccgcgcagcaacagatggaaggcctcctggcgccgcaccggcccaaggagcccgcgtggttcctggccaccgtcggcgtctcgcccgaccaccagggcaagggtctgggcagcgccgtcgtgctccccggagtggaggcggccgagcgcgccggggtgcccgccttcctggagacctccgcgccccgcaacctccccttctacgagcggctcggcttcaccgtcaccgccgacgtcgaggtgcccgaaggaccgcgcacctggtgcatgacccgcaagcccggtgcctga

SEQ ID NO: 1029 - DNA, 2757 bp, Artificial Sequence
  Synthetic Polynucleotides
atggccttaccagtgaccgccttgctcctgccgctggccttgctgctccacgccgccaggccggagatcgtgctgacacagtctcccgccacactgtcactgtctccaggcgaaagagccacactgagctgtagagccagcagcaacgtgatctccagctacgtgcactggtatcagcagaagcctggacaggcccctcggctgctgatctacagcacaagcaatctggcctctggcatccccgccagattttctggctctggaagcggcaccgacttcaccctgaccataagcagcctggaacctgaggacttcgccgtgtactactgccagcagtatagcggctaccctctgaccttcggccagggcacaagactggaaatcaaaggcggaggcggaagtggaggcggaggatctggcggcggaggctctgaagtgcaactggtggaaagtggcggcggactggtgcaacctggaagaagcctgagactgtcctgtgccgccagcggctactctatcacaagcgcctactactggaactgggtccgacaggctcctggcaaaggactggaatgggtgtcctacatcagctacgacggcagaaacaactacaaccccagcctgaagaaccgcttcaccatcagccgggacaacgccaagaagtccctgtacctccagatgaacagcctgagagccgaggacacagccctgtactattgcgccaaagagggcgactacgacgtcggcaactactacgctatggactactggggccagggaaccaccgtgactgtctcttctacgcgtgagcagaaactgatctcggaagaggatctggcgaagcccaccacgacgccagcgccgcgaccaccaacaccggcgcccaccatcgcgtcgcagcccctgtccctgcgcccagaggcgtgccggccagcggcggggggcgcagtgcacacgagggggctggacttcgcctgtgacatctacatctgggcgcccttggccgggacttgtggggtccttctcctgtcactggttatcaccctttactgcgggcgcgccagagtgaagttcagcaggagcgcagacgcccccgcgtaccagcagggccagaaccagctctataacgagctgaatctaggacgaagagaggagtacgatgttttggacaagagacgtggccgggaccctgagatggggggaaagccgagaaggaagaaccctcaggaaggcctgtacaatgaactgcagaaagataagatggcggaggcctacagtgagattgggatgaaaggcgagcgccggaggggcaaggggcacgatggcctttaccagggtctcagtacagccaccaaggacacctacgacgcccttcacatgcaggccctgccccctcgctctagaggatctggagcaacaaacttctcactactcaaacaagcaggtgacgtggaggagaatcccgggcctgggatccacatggccacttacgaggttctctgtgaggtggcgcggaaactgggcacggatgacagggaagtggtattgttcctcctaaacgtgttcatacctcaacccacactggcccaattaattggagctcttagagctttaaaggaggagggcaggttaacgtttcccctgttagcggaatgtctgtttcgtgcaggtcgcagagacctcttgcgcgacctgcttcacttagacccgcgttttttagagcgccacctagcgggcacaatgagttatttcagcccttatcagctcactgttctccacgtagacggggagctgtgtgcgagggatattaggtctttgatatttttaagcaaggacactatagggtctcgcagcacaccacagacattcttacactgggtgtactgtatggaaaacttagacctactgggtcccactgacgtggatgccctaatgtcaatgcttagatctttgtcaagagtagacctacagcgccaagtgcaaaccctaatgggccttcacctttccggcccatcacactcccaacactatcgccatacaccactcgagaccgatttctacgactacaaggacgacgatgacaagactagtggctccggcgagggcagaggaagtctactaacctgcggagatgtggaagaaaatcctggcccacatatgaccgagtacaagcccacggtgcgcctcgccacccgcgacgacgtccccagggccgtacgcaccctcgccgccgcgttcgccgactaccccgccacgcgccacaccgtcgatccggaccgccacatcgagcgggtcaccgagctgcaagaactcttcctcacgcgcgtcgggctcgacatcggcaaggtgtgggtcgcggacgacggcgccgcggtggcggtctggaccacgccggagagcgtcgaagcgggggcggtgttcgccgagatcggcccgcgcatggccgagttgagcggttcccggctggccgcgcagcaacagatggaaggcctcctggcgccgcaccggcccaaggagcccgcgtggttcctggccaccgtcggcgtctcgcccgaccaccagggcaagggtctgggcagcgccgtcgtgctccccggagtggaggcggccgagcgcgccggggtgcccgccttcctggagacctccgcgccccgcaacctccccttctacgagcggctcggcttcaccgtcaccgccgacgtcgaggtgcccgaaggaccgcgcacctggtgcatgacccgcaagcccggtgcctga

SEQ ID NO: 1030 - DNA, 2793 bp, Artificial Sequence
  Synthetic Polynucleotides
atggccttaccagtgaccgccttgctcctgccgctggccttgctgctccacgccgccaggccggacctgaacttcatgctgacccagccccacagcgtgtccggcagccctggaaagaccgtgaccatctcctgcaccagaagcaccggcagcatcaccagcaactacgtgcactggtatcagcagaggcccggcagcagccctaccaccgtgatctgcgaggacaacgagaggccaagcggcgtgcccgatagattcagcggctccatcgacatcagcagcaacagcgccagcctgaccatcagcggcctgaaaaccgaggacgaggccgactactactgccagagctacgacgacagcaaccacatctccgtgttcggcaccgggaccaaagtgaccgtgctgggacagcccaaggccaatcctggcggaggcggaagtggaggcggaggatctggcggcggaggctctcaggtgcaactgcaggaatctggccctggcctcgtgaagcccagcgagacactgagcctgacctgcacagtgtccggcggcagcattagcagcagcaattactactggggctggattcggcagccccctggcaagggactggaatggatcggagccatctactacagcggcagcacctactacaaccccagcctgaagtccagagtggctatcagcgtggacaccagcaagaaccagttctccctgaagctgagcagcgtgacagccgccgataccgccgtgtactactgcgccagacggatcggagtggccggacagtggtacttcgacctgtggggcagaggaaccctcgtgaccgtgtctagcacgcgtgagcagaaactgatctcggaagaggatctggcgaagcccaccacgacgccagcgccgcgaccaccaacaccggcgcccaccatcgcgtcgcagcccctgtccctgcgcccagaggcgtgccggccagcggcggggggcgcagtgcacacgagggggctggacttcgcctgtgacatctacatctgggcgcccttggccgggacttgtggggtccttctcctgtcactggttatcaccctttactgcgggcgcgccagagtgaagttcagcaggagcgcagacgcccccgcgtaccagcagggccagaaccagctctataacgagctgaatctaggacgaagagaggagtacgatgttttggacaagagacgtggccgggaccctgagatggggggaaagccgagaaggaagaaccctcaggaaggcctgtacaatgaactgcagaaagataagatggcggaggcctacagtgagattgggatgaaaggcgagcgccggaggggcaaggggcacgatggcctttaccagggtctcagtacagccaccaaggacacctacgacgcccttcacatgcaggccctgccccctcgctctagaggatctggagcaacaaacttctcactactcaaacaagcaggtgacgtggaggagaatcccgggcctgggatccacatggccacttacgaggttctctgtgaggtggcgcggaaactgggcacggatgacagggaagtggtattgttcctcctaaacgtgttcatacctcaacccacactggcccaattaattggagctcttagagctttaaaggaggagggcaggttaacgtttcccctgttagcggaatgtctgtttcgtgcaggtcgcagagacctcttgcgcgacctgcttcacttagacccgcgttttttagagcgccacctagcgggcacaatgagttatttcagcccttatcagctcactgttctccacgtagacggggagctgtgtgcgagggatattaggtctttgatatttttaagcaaggacactatagggtctcgcagcacaccacagacattcttacactgggtgtactgtatggaaaacttagacctactgggtcccactgacgtggatgccctaatgtcaatgcttagatctttgtcaagagtagacctacagcgccaagtgcaaaccctaatgggccttcacctttccggcccatcacactcccaacactatcgccatacaccactcgagaccgatttctacgactacaaggacgacgatgacaagactagtggctccggcgagggcagaggaagtctactaacctgcggagatgtggaagaaaatcctggcccacatatgaccgagtacaagcccacggtgcgcctcgccacccgcgacgacgtccccagggccgtacgcaccctcgccgccgcgttcgccgactaccccgccacgcgccacaccgtcgatccggaccgccacatcgagcgggtcaccgagctgcaagaactcttcctcacgcgcgtcgggctcgacatcggcaaggtgtgggtcgcggacgacggcgccgcggtggcggtctggaccacgccggagagcgtcgaagcgggggcggtgttcgccgagatcggcccgcgcatggccgagttgagcggttcccggctggccgcgcagcaacagatggaaggcctcctggcgccgcaccggcccaaggagcccgcgtggttcctggccaccgtcggcgtctcgcccgaccaccagggcaagggtctgggcagcgccgtcgtgctccccggagtggaggcggccgagcgcgccggggtgcccgccttcctggagacctccgcgccccgcaacctccccttctacgagcggctcggcttcaccgtcaccgccgacgtcgaggtgcccgaaggaccgcgcacctggtgcatgacccgcaagcccggtgcctga

SEQ ID NO: 1031 - DNA, 2751 bp, Artificial Sequence
  Synthetic Polynucleotides
atggccttaccagtgaccgccttgctcctgccgctggccttgctgctccacgccgccaggccggacatccagatgacccagagccccagcagcctgagcgccagcgtgggcgacagagtgaccatcacctgcaaggccagccaggacgtgggcatcgccgtggcctggtaccagcagaagcccggcaaggtgcccaagctgctgatctactgggccagcaccagacacaccggcgtgcccgacagattcagcggcagcggcagcggcaccgacttcaccctgaccatcagcagcctgcagcccgaggacgtggccacctactactgccagcagtacagcagctacccctacaccttcggccagggcaccaaggtggagatcaagggcggaggcggaagtggaggcggaggatctggcggcggaggctctcagatccagttggtgcagtctggacctgacctgaagaagcctggagagacagtcaagatcagttgcaaggcttctgggtataccttcacaaacactggaatgaactgggtgaagcaggctccaggaaagggtttaaagtggatgggctggataaatacctacactggagagccaacatacgctgatgacttcaagggacggtttaccttctctttggaaacctctgccagcactgcctatttgcagatcaacaacctcaaaaatgaggacacggctacatatttctgtacaagatggggctacggtagtagcctttattatgctatggactactggggtcaaggaacctcagtcaccgtctcctcaacgcgtgagcagaaactgatctcggaagaggatctggcgaagcccaccacgacgccagcgccgcgaccaccaacaccggcgcccaccatcgcgtcgcagcccctgtccctgcgcccagaggcgtgccggccagcggcggggggcgcagtgcacacgagggggctggacttcgcctgtgacatctacatctgggcgcccttggccgggacttgtggggtccttctcctgtcactggttatcaccctttactgcgggcgcgccagagtgaagttcagcaggagcgcagacgcccccgcgtaccagcagggccagaaccagctctataacgagctgaatctaggacgaagagaggagtacgatgttttggacaagagacgtggccgggaccctgagatggggggaaagccgagaaggaagaaccctcaggaaggcctgtacaatgaactgcagaaagataagatggcggaggcctacagtgagattgggatgaaaggcgagcgccggaggggcaaggggcacgatggcctttaccagggtctcagtacagccaccaaggacacctacgacgcccttcacatgcaggccctgccccctcgctctagaggatctggagcaacaaacttctcactactcaaacaagcaggtgacgtggaggagaatcccgggcctgggatccacatggccacttacgaggttctctgtgaggtggcgcggaaactgggcacggatgacagggaagtggtattgttcctcctaaacgtgttcatacctcaacccacactggcccaattaattggagctcttagagctttaaaggaggagggcaggttaacgtttcccctgttagcggaatgtctgtttcgtgcaggtcgcagagacctcttgcgcgacctgcttcacttagacccgcgttttttagagcgccacctagcgggcacaatgagttatttcagcccttatcagctcactgttctccacgtagacggggagctgtgtgcgagggatattaggtctttgatatttttaagcaaggacactatagggtctcgcagcacaccacagacattcttacactgggtgtactgtatggaaaacttagacctactgggtcccactgacgtggatgccctaatgtcaatgcttagatctttgtcaagagtagacctacagcgccaagtgcaaaccctaatgggccttcacctttccggcccatcacactcccaacactatcgccatacaccactcgagaccgatttctacgactacaaggacgacgatgacaagactagtggctccggcgagggcagaggaagtctactaacctgcggagatgtggaagaaaatcctggcccacatatgaccgagtacaagcccacggtgcgcctcgccacccgcgacgacgtccccagggccgtacgcaccctcgccgccgcgttcgccgactaccccgccacgcgccacaccgtcgatccggaccgccacatcgagcgggtcaccgagctgcaagaactcttcctcacgcgcgtcgggctcgacatcggcaaggtgtgggtcgcggacgacggcgccgcggtggcggtctggaccacgccggagagcgtcgaagcgggggcggtgttcgccgagatcggcccgcgcatggccgagttgagcggttcccggctggccgcgcagcaacagatggaaggcctcctggcgccgcaccggcccaaggagcccgcgtggttcctggccaccgtcggcgtctcgcccgaccaccagggcaagggtctgggcagcgccgtcgtgctccccggagtggaggcggccgagcgcgccggggtgcccgccttcctggagacctccgcgccccgcaacctccccttctacgagcggctcggcttcaccgtcaccgccgacgtcgaggtgcccgaaggaccgcgcacctggtgcatgacccgcaagcccggtgcctga

SEQ ID NO: 1032 - DNA, 2742 bp, Artificial Sequence
  Synthetic Polynucleotides
atggccttaccagtgaccgccttgctcctgccgctggccttgctgctccacgccgccaggccggacatccagatgacccagagccccagcagcctgtctgccagcgtgggcgacagagtgaccatcacatgcaaggccagccaggacgtgggaatcgccgtggcctggtatcagcagaaacccggcaaggtgcccaagctgctgatctactgggccagcaccagacacaccggcgtgcccgatagattttccggcagcggctccggcaccgacttcaccctgacaatcagctccctccagcccgaggacgtggcaacctactactgccagcagtacagcagctacccctacaccttcggccagggcaccaaggtggaaatcaagggcggaggcggaagtggaggcggaggatctggcggcggaggctctgaagtgcaactggtggaatcaggcggcggactggtgcagcctggcggatctctgagactgagctgtgccgccagcggcttcgacttcagccggtactggatgagctgggtgcgccaggcccctggcaaaggactggaatggatcggcgagatcaaccccgacagcagcaccatcaactacgcccccagcctgaaggacaagttcatcatcagccgggacaacgccaagaacagcctgtacctccagatgaactccctgcgggccgaggacaccgccgtgtactattgcgccagacccgacggcaactactggtacttcgacgtgtggggccagggaaccctcgtgaccgtgtcatctacgcgtgagcagaaactgatctcggaagaggatctggcgaagcccaccacgacgccagcgccgcgaccaccaacaccggcgcccaccatcgcgtcgcagcccctgtccctgcgcccagaggcgtgccggccagcggcggggggcgcagtgcacacgagggggctggacttcgcctgtgacatctacatctgggcgcccttggccgggacttgtggggtccttctcctgtcactggttatcaccctttactgcgggcgcgccagagtgaagttcagcaggagcgcagacgcccccgcgtaccagcagggccagaaccagctctataacgagctgaatctaggacgaagagaggagtacgatgttttggacaagagacgtggccgggaccctgagatggggggaaagccgagaaggaagaaccctcaggaaggcctgtacaatgaactgcagaaagataagatggcggaggcctacagtgagattgggatgaaaggcgagcgccggaggggcaaggggcacgatggcctttaccagggtctcagtacagccaccaaggacacctacgacgcccttcacatgcaggccctgccccctcgctctagaggatctggagcaacaaacttctcactactcaaacaagcaggtgacgtggaggagaatcccgggcctgggatccacatggccacttacgaggttctctgtgaggtggcgcggaaactgggcacggatgacagggaagtggtattgttcctcctaaacgtgttcatacctcaacccacactggcccaattaattggagctcttagagctttaaaggaggagggcaggttaacgtttcccctgttagcggaatgtctgtttcgtgcaggtcgcagagacctcttgcgcgacctgcttcacttagacccgcgttttttagagcgccacctagcgggcacaatgagttatttcagcccttatcagctcactgttctccacgtagacggggagctgtgtgcgagggatattaggtctttgatatttttaagcaaggacactatagggtctcgcagcacaccacagacattcttacactgggtgtactgtatggaaaacttagacctactgggtcccactgacgtggatgccctaatgtcaatgcttagatctttgtcaagagtagacctacagcgccaagtgcaaaccctaatgggccttcacctttccggcccatcacactcccaacactatcgccatacaccactcgagaccgatttctacgactacaaggacgacgatgacaagactagtggctccggcgagggcagaggaagtctactaacctgcggagatgtggaagaaaatcctggcccacatatgaccgagtacaagcccacggtgcgcctcgccacccgcgacgacgtccccagggccgtacgcaccctcgccgccgcgttcgccgactaccccgccacgcgccacaccgtcgatccggaccgccacatcgagcgggtcaccgagctgcaagaactcttcctcacgcgcgtcgggctcgacatcggcaaggtgtgggtcgcggacgacggcgccgcggtggcggtctggaccacgccggagagcgtcgaagcgggggcggtgttcgccgagatcggcccgcgcatggccgagttgagcggttcccggctggccgcgcagcaacagatggaaggcctcctggcgccgcaccggcccaaggagcccgcgtggttcctggccaccgtcggcgtctcgcccgaccaccagggcaagggtctgggcagcgccgtcgtgctccccggagtggaggcggccgagcgcgccggggtgcccgccttcctggagacctccgcgccccgcaacctccccttctacgagcggctcggcttcaccgtcaccgccgacgtcgaggtgcccgaaggaccgcgcacctggtgcatgacccgcaagcccggtgcctga

SEQ ID NO: 1033 - DNA, 2745 bp, Artificial Sequence
  Synthetic Polynucleotides
atggccttaccagtgaccgccttgctcctgccgctggccttgctgctccacgccgccaggccggacatcgtgatgacccagagccagaagagcatgagcaccagcgtgggcgacagagtgagcatcacctgcaaggccagccaggacgtgatcaccggcgtggcctggtaccagcagaagcccggccagagccccaagctgctgatctacagcgccagctacagatacaccggcgtgcccgacagattcaccggcagcggcagcggcaccgacttcaccttcaccatcagcaacgtgcaggccgaggacctggccgtgtactactgccagcagcactacagcacccccctgaccttcggcgccggcaccaagctggagctgaagggcggaggcggaagtggaggcggaggatctggcggcggaggctctcaggtgcagctgcagcagcccggcgccgagctggtgagacccggcgccagcgtgaagctgagctgcaaggccagcggctacagcttcaccacctactggatgaactgggtgaagcagagacccggccagggcctggagtggatcggcatgatccaccccagcgacagcgagaccagactgaaccagaagttcaaggacaaggccaccctgaccgtggacaagagcagcagcaccgcctacatgcagctgagcagccccaccagcgaggacagcgccgtgtactactgcgccagaagcaccatgatcgccaccagagccatggactactggggccagggcaccagcgtgaccgtgagcagcacgcgtgagcagaaactgatctcggaagaggatctggcgaagcccaccacgacgccagcgccgcgaccaccaacaccggcgcccaccatcgcgtcgcagcccctgtccctgcgcccagaggcgtgccggccagcggcggggggcgcagtgcacacgagggggctggacttcgcctgtgacatctacatctgggcgcccttggccgggacttgtggggtccttctcctgtcactggttatcaccctttactgcgggcgcgccagagtgaagttcagcaggagcgcagacgcccccgcgtaccagcagggccagaaccagctctataacgagctgaatctaggacgaagagaggagtacgatgttttggacaagagacgtggccgggaccctgagatggggggaaagccgagaaggaagaaccctcaggaaggcctgtacaatgaactgcagaaagataagatggcggaggcctacagtgagattgggatgaaaggcgagcgccggaggggcaaggggcacgatggcctttaccagggtctcagtacagccaccaaggacacctacgacgcccttcacatgcaggccctgccccctcgctctagaggatctggagcaacaaacttctcactactcaaacaagcaggtgacgtggaggagaatcccgggcctgggatccacatggccacttacgaggttctctgtgaggtggcgcggaaactgggcacggatgacagggaagtggtattgttcctcctaaacgtgttcatacctcaacccacactggcccaattaattggagctcttagagctttaaaggaggagggcaggttaacgtttcccctgttagcggaatgtctgtttcgtgcaggtcgcagagacctcttgcgcgacctgcttcacttagacccgcgttttttagagcgccacctagcgggcacaatgagttatttcagcccttatcagctcactgttctccacgtagacggggagctgtgtgcgagggatattaggtctttgatatttttaagcaaggacactatagggtctcgcagcacaccacagacattcttacactgggtgtactgtatggaaaacttagacctactgggtcccactgacgtggatgccctaatgtcaatgcttagatctttgtcaagagtagacctacagcgccaagtgcaaaccctaatgggccttcacctttccggcccatcacactcccaacactatcgccatacaccactcgagaccgatttctacgactacaaggacgacgatgacaagactagtggctccggcgagggcagaggaagtctactaacctgcggagatgtggaagaaaatcctggcccacatatgaccgagtacaagcccacggtgcgcctcgccacccgcgacgacgtccccagggccgtacgcaccctcgccgccgcgttcgccgactaccccgccacgcgccacaccgtcgatccggaccgccacatcgagcgggtcaccgagctgcaagaactcttcctcacgcgcgtcgggctcgacatcggcaaggtgtgggtcgcggacgacggcgccgcggtggcggtctggaccacgccggagagcgtcgaagcgggggcggtgttcgccgagatcggcccgcgcatggccgagttgagcggttcccggctggccgcgcagcaacagatggaaggcctcctggcgccgcaccggcccaaggagcccgcgtggttcctggccaccgtcggcgtctcgcccgaccaccagggcaagggtctgggcagcgccgtcgtgctccccggagtggaggcggccgagcgcgccggggtgcccgccttcctggagacctccgcgccccgcaacctccccttctacgagcggctcggcttcaccgtcaccgccgacgtcgaggtgcccgaaggaccgcgcacctggtgcatgacccgcaagcccggtgcctga

SEQ ID NO: 1034 - DNA, 2751 bp, Artificial Sequence
  Synthetic Polynucleotides
atggccttaccagtgaccgccttgctcctgccgctggccttgctgctccacgccgccaggccggacatccagatgacacagagccctagcagcctgtctgccagcgtgggagacagagtgaccatcacatgcaaggccagccaggatgtgtctacagccgtggcctggtatcagcagaagcctggaaaggcccctaagctgctgatctacagcgccagctacagatacaccggcgtgcccgatagattcacaggctctggcagcggcaccgacttcaccctgacaatatctagcctccagcctgaggacttcgccacctactactgccagcagcactacagcacccctccatacacatttggcggaggcaccaaggtggaaatcaagagaggcggaggcggaagtggaggcggaggatctggcggcggaggctctcaagttcaactggttcagagcggagccgaagtgaagaaacctggggcctctgtgaaggtgtcctgcaaagccagcggctacgcctttagcagctcctggatgaactgggtccgacaggctcctggacagggcctcgaatggatcggcagaatctatcctggcgacggcgacaccaagtacaacggcaagttcaagggcaaagccacactgaccgccgacaagagcacaagcaccgcctacatggaactgagcagcctgagaagcgaggacaccgccgtgtactactgtgccagatccaccatgatcgccaccggcgctatggattattggggccagggaaccctggtcaccgtgtcatctacgcgtgagcagaaactgatctcggaagaggatctggcgaagcccaccacgacgccagcgccgcgaccaccaacaccggcgcccaccatcgcgtcgcagcccctgtccctgcgcccagaggcgtgccggccagcggcggggggcgcagtgcacacgagggggctggacttcgcctgtgacatctacatctgggcgcccttggccgggacttgtggggtccttctcctgtcactggttatcaccctttactgcgggcgcgccagagtgaagttcagcaggagcgcagacgcccccgcgtaccagcagggccagaaccagctctataacgagctgaatctaggacgaagagaggagtacgatgttttggacaagagacgtggccgggaccctgagatggggggaaagccgagaaggaagaaccctcaggaaggcctgtacaatgaactgcagaaagataagatggcggaggcctacagtgagattgggatgaaaggcgagcgccggaggggcaaggggcacgatggcctttaccagggtctcagtacagccaccaaggacacctacgacgcccttcacatgcaggccctgccccctcgctctagaggatctggagcaacaaacttctcactactcaaacaagcaggtgacgtggaggagaatcccgggcctgggatccacatggccacttacgaggttctctgtgaggtggcgcggaaactgggcacggatgacagggaagtggtattgttcctcctaaacgtgttcatacctcaacccacactggcccaattaattggagctcttagagctttaaaggaggagggcaggttaacgtttcccctgttagcggaatgtctgtttcgtgcaggtcgcagagacctcttgcgcgacctgcttcacttagacccgcgttttttagagcgccacctagcgggcacaatgagttatttcagcccttatcagctcactgttctccacgtagacggggagctgtgtgcgagggatattaggtctttgatatttttaagcaaggacactatagggtctcgcagcacaccacagacattcttacactgggtgtactgtatggaaaacttagacctactgggtcccactgacgtggatgccctaatgtcaatgcttagatctttgtcaagagtagacctacagcgccaagtgcaaaccctaatgggccttcacctttccggcccatcacactcccaacactatcgccatacaccactcgagaccgatttctacgactacaaggacgacgatgacaagactagtggctccggcgagggcagaggaagtctactaacctgcggagatgtggaagaaaatcctggcccacatatgaccgagtacaagcccacggtgcgcctcgccacccgcgacgacgtccccagggccgtacgcaccctcgccgccgcgttcgccgactaccccgccacgcgccacaccgtcgatccggaccgccacatcgagcgggtcaccgagctgcaagaactcttcctcacgcgcgtcgggctcgacatcggcaaggtgtgggtcgcggacgacggcgccgcggtggcggtctggaccacgccggagagcgtcgaagcgggggcggtgttcgccgagatcggcccgcgcatggccgagttgagcggttcccggctggccgcgcagcaacagatggaaggcctcctggcgccgcaccggcccaaggagcccgcgtggttcctggccaccgtcggcgtctcgcccgaccaccagggcaagggtctgggcagcgccgtcgtgctccccggagtggaggcggccgagcgcgccggggtgcccgccttcctggagacctccgcgccccgcaacctccccttctacgagcggctcggcttcaccgtcaccgccgacgtcgaggtgcccgaaggaccgcgcacctggtgcatgacccgcaagcccggtgcctga

SEQ ID NO: 1035 - DNA, 2754 bp, Artificial Sequence
  Synthetic Polynucleotides
atggccttaccagtgaccgccttgctcctgccgctggccttgctgctccacgccgccaggccggacgtggtcatgacacagacacctctgagcctgagcgtgacacctggacagcctgccagcatcagctgtagaagcagccagagcctggtgcacaacaacggcaacacctacctgcactggtatctccagaagcctggacagagccctcagctgctgatctacaaggtgtccaacagattcagcggcgtgcccgacagattttctggcagcggctctggcaccgacttcaccctgaagattagcagagtggaagccgaggacgtgggcgtgtacttctgtagccagagcacacacgtgccaccttacacctttggcggaggcaccaaggtggaaatcaaaggcggaggcggaagtggaggcggaggatctggcggcggaggctctgaagtgcagctggttgagtctggtggcggactggttcaacctggcggaagcctgagactgtcttgtgccgccagcggcttcaccttcagcgactactatatggcctgggtccgacaggcccctggcaaaggacttgaatgggtcgccgagatcaactacgacggcagcagcacctactacgtggacagcgtgaagggcagattcaccatcagccgggacaacgccaagaacagcctgtacctccagatgaactccctgagagccgaggataccgccgtgtactactgcgccagagacagaggcttctacttcgactattggggccagggcaccaccgtgacagtctcttctacgcgtgagcagaaactgatctcggaagaggatctggcgaagcccaccacgacgccagcgccgcgaccaccaacaccggcgcccaccatcgcgtcgcagcccctgtccctgcgcccagaggcgtgccggccagcggcggggggcgcagtgcacacgagggggctggacttcgcctgtgacatctacatctgggcgcccttggccgggacttgtggggtccttctcctgtcactggttatcaccctttactgcgggcgcgccagagtgaagttcagcaggagcgcagacgcccccgcgtaccagcagggccagaaccagctctataacgagctgaatctaggacgaagagaggagtacgatgttttggacaagagacgtggccgggaccctgagatggggggaaagccgagaaggaagaaccctcaggaaggcctgtacaatgaactgcagaaagataagatggcggaggcctacagtgagattgggatgaaaggcgagcgccggaggggcaaggggcacgatggcctttaccagggtctcagtacagccaccaaggacacctacgacgcccttcacatgcaggccctgccccctcgctctagaggatctggagcaacaaacttctcactactcaaacaagcaggtgacgtggaggagaatcccgggcctgggatccacatggccacttacgaggttctctgtgaggtggcgcggaaactgggcacggatgacagggaagtggtattgttcctcctaaacgtgttcatacctcaacccacactggcccaattaattggagctcttagagctttaaaggaggagggcaggttaacgtttcccctgttagcggaatgtctgtttcgtgcaggtcgcagagacctcttgcgcgacctgcttcacttagacccgcgttttttagagcgccacctagcgggcacaatgagttatttcagcccttatcagctcactgttctccacgtagacggggagctgtgtgcgagggatattaggtctttgatatttttaagcaaggacactatagggtctcgcagcacaccacagacattcttacactgggtgtactgtatggaaaacttagacctactgggtcccactgacgtggatgccctaatgtcaatgcttagatctttgtcaagagtagacctacagcgccaagtgcaaaccctaatgggccttcacctttccggcccatcacactcccaacactatcgccatacaccactcgagaccgatttctacgactacaaggacgacgatgacaagactagtggctccggcgagggcagaggaagtctactaacctgcggagatgtggaagaaaatcctggcccacatatgaccgagtacaagcccacggtgcgcctcgccacccgcgacgacgtccccagggccgtacgcaccctcgccgccgcgttcgccgactaccccgccacgcgccacaccgtcgatccggaccgccacatcgagcgggtcaccgagctgcaagaactcttcctcacgcgcgtcgggctcgacatcggcaaggtgtgggtcgcggacgacggcgccgcggtggcggtctggaccacgccggagagcgtcgaagcgggggcggtgttcgccgagatcggcccgcgcatggccgagttgagcggttcccggctggccgcgcagcaacagatggaaggcctcctggcgccgcaccggcccaaggagcccgcgtggttcctggccaccgtcggcgtctcgcccgaccaccagggcaagggtctgggcagcgccgtcgtgctccccggagtggaggcggccgagcgcgccggggtgcccgccttcctggagacctccgcgccccgcaacctccccttctacgagcggctcggcttcaccgtcaccgccgacgtcgaggtgcccgaaggaccgcgcacctggtgcatgacccgcaagcccggtgcctga

SEQ ID NO: 1036 - DNA, 2754 bp, Artificial Sequence
  Synthetic Polynucleotides
atggccttaccagtgaccgccttgctcctgccgctggccttgctgctccacgccgccaggccggacgtggtcatgacacagacacctctgagcctgagcgtgacacctggacagcctgccagcatctcctgtagaagcagccagagcctggtgcacagcaacggcctgacatacctgcactggtatctccagaagcctggacagagccctcagctcctgatctacaaggtgtccaacagattcagcggcgtgcccgacagattttctggcagcggctctggcaccgacttcaccctgaagatcagcagagtggaagccgaggacgtgggcgtgtacttctgtagccagagcacacacgtgccacctttcacctttggcggaggcaccaaggtggaaatcaaaggcggaggcggaagtggaggcggaggatctggcggcggaggctctgaagtgcagctcgttgagtctggtggcggactggttcaacctggcggaagcctgagactgtcttgtgccgccagcggcttcaccttcagcgactactatatggcctgggtccgacaggcccctggcaaaggacttgaatgggtcgccagcatcaactacgacggcgagagcacctactacgtggacagcgtgaagggcagattcaccatcagccgggacaacgccaagaacagcctgtacctccagatgaactccctgagagccgaggataccgccgtgtactactgcgccagagacagaggctactacttcgactattggggccagggcaccaccgtgacagtctcttctacgcgtgagcagaaactgatctcggaagaggatctggcgaagcccaccacgacgccagcgccgcgaccaccaacaccggcgcccaccatcgcgtcgcagcccctgtccctgcgcccagaggcgtgccggccagcggcggggggcgcagtgcacacgagggggctggacttcgcctgtgacatctacatctgggcgcccttggccgggacttgtggggtccttctcctgtcactggttatcaccctttactgcgggcgcgccagagtgaagttcagcaggagcgcagacgcccccgcgtaccagcagggccagaaccagctctataacgagctgaatctaggacgaagagaggagtacgatgttttggacaagagacgtggccgggaccctgagatggggggaaagccgagaaggaagaaccctcaggaaggcctgtacaatgaactgcagaaagataagatggcggaggcctacagtgagattgggatgaaaggcgagcgccggaggggcaaggggcacgatggcctttaccagggtctcagtacagccaccaaggacacctacgacgcccttcacatgcaggccctgccccctcgctctagaggatctggagcaacaaacttctcactactcaaacaagcaggtgacgtggaggagaatcccgggcctgggatccacatggccacttacgaggttctctgtgaggtggcgcggaaactgggcacggatgacagggaagtggtattgttcctcctaaacgtgttcatacctcaacccacactggcccaattaattggagctcttagagctttaaaggaggagggcaggttaacgtttcccctgttagcggaatgtctgtttcgtgcaggtcgcagagacctcttgcgcgacctgcttcacttagacccgcgttttttagagcgccacctagcgggcacaatgagttatttcagcccttatcagctcactgttctccacgtagacggggagctgtgtgcgagggatattaggtctttgatatttttaagcaaggacactatagggtctcgcagcacaccacagacattcttacactgggtgtactgtatggaaaacttagacctactgggtcccactgacgtggatgccctaatgtcaatgcttagatctttgtcaagagtagacctacagcgccaagtgcaaaccctaatgggccttcacctttccggcccatcacactcccaacactatcgccatacaccactcgagaccgatttctacgactacaaggacgacgatgacaagactagtggctccggcgagggcagaggaagtctactaacctgcggagatgtggaagaaaatcctggcccacatatgaccgagtacaagcccacggtgcgcctcgccacccgcgacgacgtccccagggccgtacgcaccctcgccgccgcgttcgccgactaccccgccacgcgccacaccgtcgatccggaccgccacatcgagcgggtcaccgagctgcaagaactcttcctcacgcgcgtcgggctcgacatcggcaaggtgtgggtcgcggacgacggcgccgcggtggcggtctggaccacgccggagagcgtcgaagcgggggcggtgttcgccgagatcggcccgcgcatggccgagttgagcggttcccggctggccgcgcagcaacagatggaaggcctcctggcgccgcaccggcccaaggagcccgcgtggttcctggccaccgtcggcgtctcgcccgaccaccagggcaagggtctgggcagcgccgtcgtgctccccggagtggaggcggccgagcgcgccggggtgcccgccttcctggagacctccgcgccccgcaacctccccttctacgagcggctcggcttcaccgtcaccgccgacgtcgaggtgcccgaaggaccgcgcacctggtgcatgacccgcaagcccggtgcctga

SEQ ID NO: 1037 - DNA, 2754 bp, Artificial Sequence
  Synthetic Polynucleotides
atggccttaccagtgaccgccttgctcctgccgctggccttgctgctccacgccgccaggccggacgtggtcatgacacagagccctctgagcctgcctgtgacacctggcgaacctgccagcatctcctgtagaagcagccagagcctggtgcacagcaacggcaatacctacctgcactggtatctccagaagcctggacagagcccacagctcctgatctacaaggtgtccaaccggttcagcggcgtgcccgatagattttctggcagcggctctggcaccgacttcaccctgaagatcagcagagtggaagccgaggacgtgggcgtgtacttctgtagccagagcacacacgtgccacctttcacctttggcggaggcaccaaggtggaaatcaaaggcggaggcggaagtggaggcggaggatctggcggcggaggctctgaagtgcagctcgttgagtctggtggcggactggttcaacctggcggaagcctgagactgtcttgtgccgccagcggcttcaccttcagcgactactatatggcctgggtccgacaggcccctggcaaaggacttgaatgggtcgccgacatcaactacgatggcggcagcacctactacctggacagcctgaagtcccggttcaccatctccagagacaacgccaagaacagcctgtacctccagatgaactccctgagagccgaggataccgccgtgtactactgcgccagagacagaggctactacttcgactattggggccagggcaccctggtcacagtctcttctacgcgtgagcagaaactgatctcggaagaggatctggcgaagcccaccacgacgccagcgccgcgaccaccaacaccggcgcccaccatcgcgtcgcagcccctgtccctgcgcccagaggcgtgccggccagcggcggggggcgcagtgcacacgagggggctggacttcgcctgtgacatctacatctgggcgcccttggccgggacttgtggggtccttctcctgtcactggttatcaccctttactgcgggcgcgccagagtgaagttcagcaggagcgcagacgcccccgcgtaccagcagggccagaaccagctctataacgagctgaatctaggacgaagagaggagtacgatgttttggacaagagacgtggccgggaccctgagatggggggaaagccgagaaggaagaaccctcaggaaggcctgtacaatgaactgcagaaagataagatggcggaggcctacagtgagattgggatgaaaggcgagcgccggaggggcaaggggcacgatggcctttaccagggtctcagtacagccaccaaggacacctacgacgcccttcacatgcaggccctgccccctcgctctagaggatctggagcaacaaacttctcactactcaaacaagcaggtgacgtggaggagaatcccgggcctgggatccacatggccacttacgaggttctctgtgaggtggcgcggaaactgggcacggatgacagggaagtggtattgttcctcctaaacgtgttcatacctcaacccacactggcccaattaattggagctcttagagctttaaaggaggagggcaggttaacgtttcccctgttagcggaatgtctgtttcgtgcaggtcgcagagacctcttgcgcgacctgcttcacttagacccgcgttttttagagcgccacctagcgggcacaatgagttatttcagcccttatcagctcactgttctccacgtagacggggagctgtgtgcgagggatattaggtctttgatatttttaagcaaggacactatagggtctcgcagcacaccacagacattcttacactgggtgtactgtatggaaaacttagacctactgggtcccactgacgtggatgccctaatgtcaatgcttagatctttgtcaagagtagacctacagcgccaagtgcaaaccctaatgggccttcacctttccggcccatcacactcccaacactatcgccatacaccactcgagaccgatttctacgactacaaggacgacgatgacaagactagtggctccggcgagggcagaggaagtctactaacctgcggagatgtggaagaaaatcctggcccacatatgaccgagtacaagcccacggtgcgcctcgccacccgcgacgacgtccccagggccgtacgcaccctcgccgccgcgttcgccgactaccccgccacgcgccacaccgtcgatccggaccgccacatcgagcgggtcaccgagctgcaagaactcttcctcacgcgcgtcgggctcgacatcggcaaggtgtgggtcgcggacgacggcgccgcggtggcggtctggaccacgccggagagcgtcgaagcgggggcggtgttcgccgagatcggcccgcgcatggccgagttgagcggttcccggctggccgcgcagcaacagatggaaggcctcctggcgccgcaccggcccaaggagcccgcgtggttcctggccaccgtcggcgtctcgcccgaccaccagggcaagggtctgggcagcgccgtcgtgctccccggagtggaggcggccgagcgcgccggggtgcccgccttcctggagacctccgcgccccgcaacctccccttctacgagcggctcggcttcaccgtcaccgccgacgtcgaggtgcccgaaggaccgcgcacctggtgcatgacccgcaagcccggtgcctga

SEQ ID NO: 1038 - DNA, 2748 bp, Artificial Sequence
  Synthetic Polynucleotides
atggccttaccagtgaccgccttgctcctgccgctggccttgctgctccacgccgccaggccggacatccagatgacccagagcagcagctacctgagcgtgtcccttggcggcagagtgaccatcacctgtaaagccagcgaccacatcaacaactggctggcctggtatcagcagaagcctggcaacgcccctagactgctgattagcggagccacctctctggaaacaggcgtgccaagcagattttccggcagcggctctggcaaggactacaccctgagcatcaccagcctccagaccgaggatgtggctacctactactgccagcagtattggagcaccccttggacctttggcggaggcaccaagctggaaatcaaaggcggaggcggaagtggaggcggaggatctggcggcggaggctctcaggttcagctccagcagtctggcgctgagcttgctagacctggcgcttctgtgaagctgagctgcaaggccagcggctacaccttcaccagctactggatgcagtgggtcaagcagaggccaggccaaggactggaatggatcggagccatctatcccggcgacggcgataccagatacacccagaagttcaagggcaaagccacactgaccgccgacaagagcagctccacagcctacatgcaactgagcagcctggcttccgaggacagcgccgtgtactattgtgccagaggcaaggtgtactacggcagcaaccctttcgcctattggggccagggaaccctggttacagtgtctgctacgcgtgagcagaaactgatctcggaagaggatctggcgaagcccaccacgacgccagcgccgcgaccaccaacaccggcgcccaccatcgcgtcgcagcccctgtccctgcgcccagaggcgtgccggccagcggcggggggcgcagtgcacacgagggggctggacttcgcctgtgacatctacatctgggcgcccttggccgggacttgtggggtccttctcctgtcactggttatcaccctttactgcgggcgcgccagagtgaagttcagcaggagcgcagacgcccccgcgtaccagcagggccagaaccagctctataacgagctgaatctaggacgaagagaggagtacgatgttttggacaagagacgtggccgggaccctgagatggggggaaagccgagaaggaagaaccctcaggaaggcctgtacaatgaactgcagaaagataagatggcggaggcctacagtgagattgggatgaaaggcgagcgccggaggggcaaggggcacgatggcctttaccagggtctcagtacagccaccaaggacacctacgacgcccttcacatgcaggccctgccccctcgctctagaggatctggagcaacaaacttctcactactcaaacaagcaggtgacgtggaggagaatcccgggcctgggatccacatggccacttacgaggttctctgtgaggtggcgcggaaactgggcacggatgacagggaagtggtattgttcctcctaaacgtgttcatacctcaacccacactggcccaattaattggagctcttagagctttaaaggaggagggcaggttaacgtttcccctgttagcggaatgtctgtttcgtgcaggtcgcagagacctcttgcgcgacctgcttcacttagacccgcgttttttagagcgccacctagcgggcacaatgagttatttcagcccttatcagctcactgttctccacgtagacggggagctgtgtgcgagggatattaggtctttgatatttttaagcaaggacactatagggtctcgcagcacaccacagacattcttacactgggtgtactgtatggaaaacttagacctactgggtcccactgacgtggatgccctaatgtcaatgcttagatctttgtcaagagtagacctacagcgccaagtgcaaaccctaatgggccttcacctttccggcccatcacactcccaacactatcgccatacaccactcgagaccgatttctacgactacaaggacgacgatgacaagactagtggctccggcgagggcagaggaagtctactaacctgcggagatgtggaagaaaatcctggcccacatatgaccgagtacaagcccacggtgcgcctcgccacccgcgacgacgtccccagggccgtacgcaccctcgccgccgcgttcgccgactaccccgccacgcgccacaccgtcgatccggaccgccacatcgagcgggtcaccgagctgcaagaactcttcctcacgcgcgtcgggctcgacatcggcaaggtgtgggtcgcggacgacggcgccgcggtggcggtctggaccacgccggagagcgtcgaagcgggggcggtgttcgccgagatcggcccgcgcatggccgagttgagcggttcccggctggccgcgcagcaacagatggaaggcctcctggcgccgcaccggcccaaggagcccgcgtggttcctggccaccgtcggcgtctcgcccgaccaccagggcaagggtctgggcagcgccgtcgtgctccccggagtggaggcggccgagcgcgccggggtgcccgccttcctggagacctccgcgccccgcaacctccccttctacgagcggctcggcttcaccgtcaccgccgacgtcgaggtgcccgaaggaccgcgcacctggtgcatgacccgcaagcccggtgcctga

SEQ ID NO: 1039 - DNA, 2748 bp, Artificial Sequence
  Synthetic Polynucleotides
atggccttaccagtgaccgccttgctcctgccgctggccttgctgctccacgccgccaggccggacatcgtgatgacccagagccacaagttcatgagcaccagcgtgggcgacagagtgtccatcacctgtaaagccagccaggacgtgtcaacagccgtggcctggtatcagcagaagcctggacagagccccaagctgctgatctacagcgccagctacagatacaccggcgtgcccgatagattcacaggctctggcagcggcaccgacttcacctttacaatcagcagcgtgcaggccgaggacctggccgtgtattattgccagcagcactacagcacccctccatacacatttggcggaggcaccaagctggaaatcaaaggcggaggcggaagtggaggcggaggatctggcggcggaggctctcaggttcagctccagcagtctggccctgagcttgtgaaacctggcgcttccgtgaagattagctgcaaggccagcggctacgccttcagcagctcctggatgaactgggtcaagcagaggccaggccagggcctcgaatggatcggcagaatctatcctggcgacggcgacaccaagtacaacggcaagttcaagggcaaagccacactgaccgccgacaagtctagcagcaccgcctatatgcagctcagcagcctgacctctgtggacagcgccgtgtacttctgtgcccggtctaccatgattgccaccggcgctatggattactggggccagggaacaagcgtgaccgtgtcatctacgcgtgagcagaaactgatctcggaagaggatctggcgaagcccaccacgacgccagcgccgcgaccaccaacaccggcgcccaccatcgcgtcgcagcccctgtccctgcgcccagaggcgtgccggccagcggcggggggcgcagtgcacacgagggggctggacttcgcctgtgacatctacatctgggcgcccttggccgggacttgtggggtccttctcctgtcactggttatcaccctttactgcgggcgcgccagagtgaagttcagcaggagcgcagacgcccccgcgtaccagcagggccagaaccagctctataacgagctgaatctaggacgaagagaggagtacgatgttttggacaagagacgtggccgggaccctgagatggggggaaagccgagaaggaagaaccctcaggaaggcctgtacaatgaactgcagaaagataagatggcggaggcctacagtgagattgggatgaaaggcgagcgccggaggggcaaggggcacgatggcctttaccagggtctcagtacagccaccaaggacacctacgacgcccttcacatgcaggccctgccccctcgctctagaggatctggagcaacaaacttctcactactcaaacaagcaggtgacgtggaggagaatcccgggcctgggatccacatggccacttacgaggttctctgtgaggtggcgcggaaactgggcacggatgacagggaagtggtattgttcctcctaaacgtgttcatacctcaacccacactggcccaattaattggagctcttagagctttaaaggaggagggcaggttaacgtttcccctgttagcggaatgtctgtttcgtgcaggtcgcagagacctcttgcgcgacctgcttcacttagacccgcgttttttagagcgccacctagcgggcacaatgagttatttcagcccttatcagctcactgttctccacgtagacggggagctgtgtgcgagggatattaggtctttgatatttttaagcaaggacactatagggtctcgcagcacaccacagacattcttacactgggtgtactgtatggaaaacttagacctactgggtcccactgacgtggatgccctaatgtcaatgcttagatctttgtcaagagtagacctacagcgccaagtgcaaaccctaatgggccttcacctttccggcccatcacactcccaacactatcgccatacaccactcgagaccgatttctacgactacaaggacgacgatgacaagactagtggctccggcgagggcagaggaagtctactaacctgcggagatgtggaagaaaatcctggcccacatatgaccgagtacaagcccacggtgcgcctcgccacccgcgacgacgtccccagggccgtacgcaccctcgccgccgcgttcgccgactaccccgccacgcgccacaccgtcgatccggaccgccacatcgagcgggtcaccgagctgcaagaactcttcctcacgcgcgtcgggctcgacatcggcaaggtgtgggtcgcggacgacggcgccgcggtggcggtctggaccacgccggagagcgtcgaagcgggggcggtgttcgccgagatcggcccgcgcatggccgagttgagcggttcccggctggccgcgcagcaacagatggaaggcctcctggcgccgcaccggcccaaggagcccgcgtggttcctggccaccgtcggcgtctcgcccgaccaccagggcaagggtctgggcagcgccgtcgtgctccccggagtggaggcggccgagcgcgccggggtgcccgccttcctggagacctccgcgccccgcaacctccccttctacgagcggctcggcttcaccgtcaccgccgacgtcgaggtgcccgaaggaccgcgcacctggtgcatgacccgcaagcccggtgcctga

SEQ ID NO: 1040 - DNA, 2763 bp, Artificial Sequence
  Synthetic Polynucleotides
atggccttaccagtgaccgccttgctcctgccgctggccttgctgctccacgccgccaggccgcagagcgtgctgacacagcctccatccgtgtctggcgctccaggccagagagtgaccatctcctgtaccggcagcggcagcaacatcggagccccctacgacgtgtcctggtatcagcaactgcctggcaccgcccccaagctgctgatctaccacaacaacaagcggcccagcggcgtgcccgatagattcagcggctctaagagcggcaccagcgccagcctggctatcactggactccaggccgaggacgaggccgactactactgtgccacagtggaagccggcctgagcggctctgtgtttggcggcggaacaaagctgaccgtgctgggagctggcggaggcggaagtggaggcggaggatctggcggcggaggctctcaggtgcaactggtgcagagcggagccgaagtgaagaaacctggggccagcgtgaaggtgtcctgcaaggtgtccggctacaccctgaccgagctgagcattcactgggtgcgccaggcccctggcaagggactggaatggatgggcggcttcgaccccgaagagaacgagatcgtgtacgcccagcggttccagggcagagtgacaatgaccgaggacaccagcaccgacaccgcctacatggaactgagcagcctgcggagcgaggataccgccgtgtactactgcgccatcgtgggcagcttcagccctctgacactgggcctgtggggccagggaactatggtcaccgtgtccagcacgcgtgagcagaaactgatctcggaagaggatctggcgaagcccaccacgacgccagcgccgcgaccaccaacaccggcgcccaccatcgcgtcgcagcccctgtccctgcgcccagaggcgtgccggccagcggcggggggcgcagtgcacacgagggggctggacttcgcctgtgacatctacatctgggcgcccttggccgggacttgtggggtccttctcctgtcactggttatcaccctttactgcgggcgcgccagagtgaagttcagcaggagcgcagacgcccccgcgtaccagcagggccagaaccagctctataacgagctgaatctaggacgaagagaggagtacgatgttttggacaagagacgtggccgggaccctgagatggggggaaagccgagaaggaagaaccctcaggaaggcctgtacaatgaactgcagaaagataagatggcggaggcctacagtgagattgggatgaaaggcgagcgccggaggggcaaggggcacgatggcctttaccagggtctcagtacagccaccaaggacacctacgacgcccttcacatgcaggccctgccccctcgctctagaggatctggagcaacaaacttctcactactcaaacaagcaggtgacgtggaggagaatcccgggcctgggatccacatggccacttacgaggttctctgtgaggtggcgcggaaactgggcacggatgacagggaagtggtattgttcctcctaaacgtgttcatacctcaacccacactggcccaattaattggagctcttagagctttaaaggaggagggcaggttaacgtttcccctgttagcggaatgtctgtttcgtgcaggtcgcagagacctcttgcgcgacctgcttcacttagacccgcgttttttagagcgccacctagcgggcacaatgagttatttcagcccttatcagctcactgttctccacgtagacggggagctgtgtgcgagggatattaggtctttgatatttttaagcaaggacactatagggtctcgcagcacaccacagacattcttacactgggtgtactgtatggaaaacttagacctactgggtcccactgacgtggatgccctaatgtcaatgcttagatctttgtcaagagtagacctacagcgccaagtgcaaaccctaatgggccttcacctttccggcccatcacactcccaacactatcgccatacaccactcgagaccgatttctacgactacaaggacgacgatgacaagactagtggctccggcgagggcagaggaagtctactaacctgcggagatgtggaagaaaatcctggcccacatatgaccgagtacaagcccacggtgcgcctcgccacccgcgacgacgtccccagggccgtacgcaccctcgccgccgcgttcgccgactaccccgccacgcgccacaccgtcgatccggaccgccacatcgagcgggtcaccgagctgcaagaactcttcctcacgcgcgtcgggctcgacatcggcaaggtgtgggtcgcggacgacggcgccgcggtggcggtctggaccacgccggagagcgtcgaagcgggggcggtgttcgccgagatcggcccgcgcatggccgagttgagcggttcccggctggccgcgcagcaacagatggaaggcctcctggcgccgcaccggcccaaggagcccgcgtggttcctggccaccgtcggcgtctcgcccgaccaccagggcaagggtctgggcagcgccgtcgtgctccccggagtggaggcggccgagcgcgccggggtgcccgccttcctggagacctccgcgccccgcaacctccccttctacgagcggctcggcttcaccgtcaccgccgacgtcgaggtgcccgaaggaccgcgcacctggtgcatgacccgcaagcccggtgcctga

SEQ ID NO: 1041 - DNA, 2763 bp, Artificial Sequence
  Synthetic Polynucleotides
atggccttaccagtgaccgccttgctcctgccgctggccttgctgctccacgccgccaggccgcagagcgtgctgacacagcctccatccgtgtctggcgctccaggccagagagtgaccatctcctgtaccggcagcggcagcaacatcggagccccctacgacgtgtcctggtatcagcaactgcctggcaccgcccccaagctgctgatctaccacaacaacaagcggcccagcggcgtgcccgatagattcagcggctctaagagcggcaccagcgccagcctggctatcactggactccaggccgaggacgaggccgactactactgccagagctacgacagcagcagcatcagcaccatcttcggcggaggcaccaagctgacagtgctgggagctggcggaggcggaagtggaggcggaggatctggcggcggaggctctcaggtgcaactggtgcagagcggagccgaagtgaagaaacctggggccagcgtgaaggtgtcctgcaaggtgtccggctacaccctgaccgagctgagcattcactgggtgcgccaggcccctggcaagggactggaatggatgggcggcttcgaccccgaagagaacgagatcgtgtacgcccagcggttccagggcagagtgacaatgaccgaggacaccagcaccgacaccgcctacatggaactgagcagcctgcggagcgaggataccgccgtgtactactgtgccatcgtgggcagcttcagcggaatcgcctacagaccttggggccagggcacaatggtcaccgtgtctagcacgcgtgagcagaaactgatctcggaagaggatctggcgaagcccaccacgacgccagcgccgcgaccaccaacaccggcgcccaccatcgcgtcgcagcccctgtccctgcgcccagaggcgtgccggccagcggcggggggcgcagtgcacacgagggggctggacttcgcctgtgacatctacatctgggcgcccttggccgggacttgtggggtccttctcctgtcactggttatcaccctttactgcgggcgcgccagagtgaagttcagcaggagcgcagacgcccccgcgtaccagcagggccagaaccagctctataacgagctgaatctaggacgaagagaggagtacgatgttttggacaagagacgtggccgggaccctgagatggggggaaagccgagaaggaagaaccctcaggaaggcctgtacaatgaactgcagaaagataagatggcggaggcctacagtgagattgggatgaaaggcgagcgccggaggggcaaggggcacgatggcctttaccagggtctcagtacagccaccaaggacacctacgacgcccttcacatgcaggccctgccccctcgctctagaggatctggagcaacaaacttctcactactcaaacaagcaggtgacgtggaggagaatcccgggcctgggatccacatggccacttacgaggttctctgtgaggtggcgcggaaactgggcacggatgacagggaagtggtattgttcctcctaaacgtgttcatacctcaacccacactggcccaattaattggagctcttagagctttaaaggaggagggcaggttaacgtttcccctgttagcggaatgtctgtttcgtgcaggtcgcagagacctcttgcgcgacctgcttcacttagacccgcgttttttagagcgccacctagcgggcacaatgagttatttcagcccttatcagctcactgttctccacgtagacggggagctgtgtgcgagggatattaggtctttgatatttttaagcaaggacactatagggtctcgcagcacaccacagacattcttacactgggtgtactgtatggaaaacttagacctactgggtcccactgacgtggatgccctaatgtcaatgcttagatctttgtcaagagtagacctacagcgccaagtgcaaaccctaatgggccttcacctttccggcccatcacactcccaacactatcgccatacaccactcgagaccgatttctacgactacaaggacgacgatgacaagactagtggctccggcgagggcagaggaagtctactaacctgcggagatgtggaagaaaatcctggcccacatatgaccgagtacaagcccacggtgcgcctcgccacccgcgacgacgtccccagggccgtacgcaccctcgccgccgcgttcgccgactaccccgccacgcgccacaccgtcgatccggaccgccacatcgagcgggtcaccgagctgcaagaactcttcctcacgcgcgtcgggctcgacatcggcaaggtgtgggtcgcggacgacggcgccgcggtggcggtctggaccacgccggagagcgtcgaagcgggggcggtgttcgccgagatcggcccgcgcatggccgagttgagcggttcccggctggccgcgcagcaacagatggaaggcctcctggcgccgcaccggcccaaggagcccgcgtggttcctggccaccgtcggcgtctcgcccgaccaccagggcaagggtctgggcagcgccgtcgtgctccccggagtggaggcggccgagcgcgccggggtgcccgccttcctggagacctccgcgccccgcaacctccccttctacgagcggctcggcttcaccgtcaccgccgacgtcgaggtgcccgaaggaccgcgcacctggtgcatgacccgcaagcccggtgcctga

SEQ ID NO: 1042 - DNA, 2796 bp, Artificial Sequence
  Synthetic Polynucleotides
atggccttaccagtgaccgccttgctcctgccgctggccttgctgctccacgccgccaggccggacgaattcgaggtgcagctggtagaatccggcgggggacttgtacaggctggtggtagtctgagactgagctgtgtggcctccggcatcagcagcagcaagcggaacatgggatggtataggcaagcccctggtaagcagagggaatccgtggctacaatcagcagcggcggcaacaaggactacaccgacgccgtgaaggacaggttcaccatctccagggacaccaccaagaacaccgtgtacctgcagatgaactccctcaagcccgaggacaccgccgtgtactactgcaagatcgaggccggcacaggctgggccaccagaagaggctacacatactgggggcagggaacactggtgaccgtgagctccctcgagggcggaggcggaagtggaggcggaggatctggcggcggaggctctttcgaagttcaactggtggaatccggtggaggactggtgcaagcgggcggctcactgcgccttagctgtgctgccagcggcagtatcttcagcggcaatgtaatgggttggtacaggcgacaagccccaggcaaggagcgagagtgggtagccgcgattgcaagtgggggcagcatctactacagagattctgtgaaaggccgcttcactattagtcgggacaacgcaaaaaacacggtgtatctccaaatgaacagcttgaagccagaggacactgctgtctactattgtaacagtcatcccccaactctcccctattgggggctgggcactcaggtcaccgtgagttccacgcgtgagcagaaactgatctcggaagaggatctggcgaagcccaccacgacgccagcgccgcgaccaccaacaccggcgcccaccatcgcgtcgcagcccctgtccctgcgcccagaggcgtgccggccagcggcggggggcgcagtgcacacgagggggctggacttcgcctgtgacatctacatctgggcgcccttggccgggacttgtggggtccttctcctgtcactggttatcaccctttactgcgggcgcgccagagtgaagttcagcaggagcgcagacgcccccgcgtaccagcagggccagaaccagctctataacgagctgaatctaggacgaagagaggagtacgatgttttggacaagagacgtggccgggaccctgagatggggggaaagccgagaaggaagaaccctcaggaaggcctgtacaatgaactgcagaaagataagatggcggaggcctacagtgagattgggatgaaaggcgagcgccggaggggcaaggggcacgatggcctttaccagggtctcagtacagccaccaaggacacctacgacgcccttcacatgcaggccctgccccctcgctctagaggatctggagcaacaaacttctcactactcaaacaagcaggtgacgtggaggagaatcccgggcctgggatccacatggccacttacgaggttctctgtgaggtggcgcggaaactgggcacggatgacagggaagtggtattgttcctcctaaacgtgttcatacctcaacccacactggcccaattaattggagctcttagagctttaaaggaggagggcaggttaacgtttcccctgttagcggaatgtctgtttcgtgcaggtcgcagagacctcttgcgcgacctgcttcacttagacccgcgttttttagagcgccacctagcgggcacaatgagttatttcagcccttatcagctcactgttctccacgtagacggggagctgtgtgcgagggatattaggtctttgatatttttaagcaaggacactatagggtctcgcagcacaccacagacattcttacactgggtgtactgtatggaaaacttagacctactgggtcccactgacgtggatgccctaatgtcaatgcttagatctttgtcaagagtagacctacagcgccaagtgcaaaccctaatgggccttcacctttccggcccatcacactcccaacactatcgccatacaccactcgagaccgatttctacgactacaaggacgacgatgacaagactagtggctccggcgagggcagaggaagtctactaacctgcggagatgtggaagaaaatcctggcccacatatgaccgagtacaagcccacggtgcgcctcgccacccgcgacgacgtccccagggccgtacgcaccctcgccgccgcgttcgccgactaccccgccacgcgccacaccgtcgatccggaccgccacatcgagcgggtcaccgagctgcaagaactcttcctcacgcgcgtcgggctcgacatcggcaaggtgtgggtcgcggacgacggcgccgcggtggcggtctggaccacgccggagagcgtcgaagcgggggcggtgttcgccgagatcggcccgcgcatggccgagttgagcggttcccggctggccgcgcagcaacagatggaaggcctcctggcgccgcaccggcccaaggagcccgcgtggttcctggccaccgtcggcgtctcgcccgaccaccagggcaagggtctgggcagcgccgtcgtgctccccggagtggaggcggccgagcgcgccggggtgcccgccttcctggagacctccgcgccccgcaacctccccttctacgagcggctcggcttcaccgtcaccgccgacgtcgaggtgcccgaaggaccgcgcacctggtgcatgacccgcaagcccggtgcctga

SEQ ID NO: 1043 - DNA, 2898 bp, Artificial Sequence
  Synthetic Polynucleotides
atggccttaccagtgaccgccttgctcctgccgctggccttgctgctccacgccgccaggccggacgaattcgaggtgcaactggtggaaagcggcggaggactggtgcaggctggcgatagcctgagactgagctgtgccgcctccggcagagccttcagcagatatgccatgggctggttcagacaggcccctggcaaagaacgcgagttcgtggccgccatcggctggggacctagcaagaccaactacgccgacagcgtgaagggccggttcaccatcagccgggacaacgccaagaacaccgtgtacctgcagatgaacaccctgaagcccgaggacaccgccgtgtactcttgcgccgccaagttcgtgaacaccgacagcacctggtcccgcagcgagatgtacacctattggggccagggcaccctcgtgaccgtgtctagtctcgagggaggaggcggctccgggggaggcggaagtggaggcggaggatctgggtctggaggaagcggatctggaggctcagggtcagggggctcaggcagtggaggctctttcgaagtgcaactggtggaatctggagggggaagcgtgcaggcaggcggatctctgagactgtcctgcaccacatctggcagagccctgaatatgtacgtgatgggatggtttcggcaggctcccggcaacgagcgggaatttgtggccgctacaagcagcagcggcggcagcacaagctaccccgattctgtgaagggcagattcacaatctcccgcgataatgccaagaatactgtgtacctgcagatgaatagtctgaagcctgaagatacagccgcctacagatgtgccgccagcccctacgtgtccacccccaccatgaacatcctggaagagtacagatactggggcctgggaacacaagtgacagtgtccagcacgcgtgagcagaaactgatctcggaagaggatctggcgaagcccaccacgacgccagcgccgcgaccaccaacaccggcgcccaccatcgcgtcgcagcccctgtccctgcgcccagaggcgtgccggccagcggcggggggcgcagtgcacacgagggggctggacttcgcctgtgacatctacatctgggcgcccttggccgggacttgtggggtccttctcctgtcactggttatcaccctttactgcgggcgcgccagagtgaagttcagcaggagcgcagacgcccccgcgtaccagcagggccagaaccagctctataacgagctgaatctaggacgaagagaggagtacgatgttttggacaagagacgtggccgggaccctgagatggggggaaagccgagaaggaagaaccctcaggaaggcctgtacaatgaactgcagaaagataagatggcggaggcctacagtgagattgggatgaaaggcgagcgccggaggggcaaggggcacgatggcctttaccagggtctcagtacagccaccaaggacacctacgacgcccttcacatgcaggccctgccccctcgctctagaggatctggagcaacaaacttctcactactcaaacaagcaggtgacgtggaggagaatcccgggcctgggatccacatggccacttacgaggttctctgtgaggtggcgcggaaactgggcacggatgacagggaagtggtattgttcctcctaaacgtgttcatacctcaacccacactggcccaattaattggagctcttagagctttaaaggaggagggcaggttaacgtttcccctgttagcggaatgtctgtttcgtgcaggtcgcagagacctcttgcgcgacctgcttcacttagacccgcgttttttagagcgccacctagcgggcacaatgagttatttcagcccttatcagctcactgttctccacgtagacggggagctgtgtgcgagggatattaggtctttgatatttttaagcaaggacactatagggtctcgcagcacaccacagacattcttacactgggtgtactgtatggaaaacttagacctactgggtcccactgacgtggatgccctaatgtcaatgcttagatctttgtcaagagtagacctacagcgccaagtgcaaaccctaatgggccttcacctttccggcccatcacactcccaacactatcgccatacaccactcgagaccgatttctacgactacaaggacgacgatgacaagactagtggctccggcgagggcagaggaagtctactaacctgcggagatgtggaagaaaatcctggcccacatatgaccgagtacaagcccacggtgcgcctcgccacccgcgacgacgtccccagggccgtacgcaccctcgccgccgcgttcgccgactaccccgccacgcgccacaccgtcgatccggaccgccacatcgagcgggtcaccgagctgcaagaactcttcctcacgcgcgtcgggctcgacatcggcaaggtgtgggtcgcggacgacggcgccgcggtggcggtctggaccacgccggagagcgtcgaagcgggggcggtgttcgccgagatcggcccgcgcatggccgagttgagcggttcccggctggccgcgcagcaacagatggaaggcctcctggcgccgcaccggcccaaggagcccgcgtggttcctggccaccgtcggcgtctcgcccgaccaccagggcaagggtctgggcagcgccgtcgtgctccccggagtggaggcggccgagcgcgccggggtgcccgccttcctggagacctccgcgccccgcaacctccccttctacgagcggctcggcttcaccgtcaccgccgacgtcgaggtgcccgaaggaccgcgcacctggtgcatgacccgcaagcccggtgcctga

SEQ ID NO: 1044 - DNA, 2757 bp, Artificial Sequence
  Synthetic Polynucleotides
atggccttaccagtgaccgccttgctcctgccgctggccttgctgctccacgccgccaggccggacatccagatgacccagagccccagcagcctgtctgccagcgtgggcgacagagtgaccatcacctgtagcgccagcagcagcgtgtcctacatgtactggtatcagcagaagcccggcaaggcccccaagctgctgatctacctgaccagcaatctggcctccggcgtgcccagcagattttctggcagcggctccggcaccgacttcaccctgacaatcagctccctccagcccgaggacttcgccacctactactgtcagcagtggcggagcaaccccttcaccttcggccagggcaccaagctggaaatcaagagaggcggaggcggaagtggaggcggaggatctggcggcggaggctctcagatcaccctgaaagagtccggccccaccctcgtgaagcctacccagaccctgacactgacctgcaccttcagcggcttcagcctgagcacaagcggcatgggcgtgggctggatcagacagcctcctggaaaggccctggaatggctggcccacatttggtgggacgacgtgaagcggtacagccccagcctgaagtcccggctgaccattaccaaggacaccagcaagaaccaggtggtgctgaccatgacaaacatggaccccgtggacaccgccacatattactgcgcccggatcgtgtccttcgacaacgacgtggtgtccgctatggactactggggccagggaaccctcgtgaccgtgtctagtacgcgtgagcagaaactgatctcggaagaggatctggcgaagcccaccacgacgccagcgccgcgaccaccaacaccggcgcccaccatcgcgtcgcagcccctgtccctgcgcccagaggcgtgccggccagcggcggggggcgcagtgcacacgagggggctggacttcgcctgtgacatctacatctgggcgcccttggccgggacttgtggggtccttctcctgtcactggttatcaccctttactgcgggcgcgccagagtgaagttcagcaggagcgcagacgcccccgcgtaccagcagggccagaaccagctctataacgagctgaatctaggacgaagagaggagtacgatgttttggacaagagacgtggccgggaccctgagatggggggaaagccgagaaggaagaaccctcaggaaggcctgtacaatgaactgcagaaagataagatggcggaggcctacagtgagattgggatgaaaggcgagcgccggaggggcaaggggcacgatggcctttaccagggtctcagtacagccaccaaggacacctacgacgcccttcacatgcaggccctgccccctcgctctagaggatctggagcaacaaacttctcactactcaaacaagcaggtgacgtggaggagaatcccgggcctgggatccacatggccacttacgaggttctctgtgaggtggcgcggaaactgggcacggatgacagggaagtggtattgttcctcctaaacgtgttcatacctcaacccacactggcccaattaattggagctcttagagctttaaaggaggagggcaggttaacgtttcccctgttagcggaatgtctgtttcgtgcaggtcgcagagacctcttgcgcgacctgcttcacttagacccgcgttttttagagcgccacctagcgggcacaatgagttatttcagcccttatcagctcactgttctccacgtagacggggagctgtgtgcgagggatattaggtctttgatatttttaagcaaggacactatagggtctcgcagcacaccacagacattcttacactgggtgtactgtatggaaaacttagacctactgggtcccactgacgtggatgccctaatgtcaatgcttagatctttgtcaagagtagacctacagcgccaagtgcaaaccctaatgggccttcacctttccggcccatcacactcccaacactatcgccatacaccactcgagaccgatttctacgactacaaggacgacgatgacaagactagtggctccggcgagggcagaggaagtctactaacctgcggagatgtggaagaaaatcctggcccacatatgaccgagtacaagcccacggtgcgcctcgccacccgcgacgacgtccccagggccgtacgcaccctcgccgccgcgttcgccgactaccccgccacgcgccacaccgtcgatccggaccgccacatcgagcgggtcaccgagctgcaagaactcttcctcacgcgcgtcgggctcgacatcggcaaggtgtgggtcgcggacgacggcgccgcggtggcggtctggaccacgccggagagcgtcgaagcgggggcggtgttcgccgagatcggcccgcgcatggccgagttgagcggttcccggctggccgcgcagcaacagatggaaggcctcctggcgccgcaccggcccaaggagcccgcgtggttcctggccaccgtcggcgtctcgcccgaccaccagggcaagggtctgggcagcgccgtcgtgctccccggagtggaggcggccgagcgcgccggggtgcccgccttcctggagacctccgcgccccgcaacctccccttctacgagcggctcggcttcaccgtcaccgccgacgtcgaggtgcccgaaggaccgcgcacctggtgcatgacccgcaagcccggtgcctga

SEQ ID NO: 1045 - DNA, 2742 bp, Artificial Sequence
  Synthetic Polynucleotides
atggccttaccagtgaccgccttgctcctgccgctggccttgctgctccacgccgccaggccggagatcgtgatgacccagagccctgccaccctgtccgtgtctccaggcgaaagagccaccctgagctgcaaggcttcccagagcgtgtccaacgacgtcgtgtggtatcagcagaagcccggccaggcccccagactgctgatctactacgccagcaacagatacaccggcatccccgccagattcagcggctctggcagcggcaccgagttcaccctgacaatcagcagcctccagagcgaggacttcgccgtgtactactgtcagcaggactacaccagcccctggaccttcggccagggcaccaagctggaaatcaagagaggcggaggcggaagtggaggcggaggatctggcggcggaggctctcaggtgcaactggtgcagagcggagccgaagtgaagaaacctggggccagcgtgaaggtgtcctgcaaggccagcggctacacctttaccaactacggcatgaactgggtgcgccaggctcctggacagggcctggaatggatgggctggatcaacacctacaccggcgagcccacctacgccgacgacttcaagggcagagtgaccatgaccaccgacaccagcacctccaccgcctacatggaactgcggagcctgagaagcgacgacaccgccgtgtattattgcgcccggatcggcgacagcagccccagcgattattggggccagggaaccctcgtgaccgtgtcctctacgcgtgagcagaaactgatctcggaagaggatctggcgaagcccaccacgacgccagcgccgcgaccaccaacaccggcgcccaccatcgcgtcgcagcccctgtccctgcgcccagaggcgtgccggccagcggcggggggcgcagtgcacacgagggggctggacttcgcctgtgacatctacatctgggcgcccttggccgggacttgtggggtccttctcctgtcactggttatcaccctttactgcgggcgcgccagagtgaagttcagcaggagcgcagacgcccccgcgtaccagcagggccagaaccagctctataacgagctgaatctaggacgaagagaggagtacgatgttttggacaagagacgtggccgggaccctgagatggggggaaagccgagaaggaagaaccctcaggaaggcctgtacaatgaactgcagaaagataagatggcggaggcctacagtgagattgggatgaaaggcgagcgccggaggggcaaggggcacgatggcctttaccagggtctcagtacagccaccaaggacacctacgacgcccttcacatgcaggccctgccccctcgctctagaggatctggagcaacaaacttctcactactcaaacaagcaggtgacgtggaggagaatcccgggcctgggatccacatggccacttacgaggttctctgtgaggtggcgcggaaactgggcacggatgacagggaagtggtattgttcctcctaaacgtgttcatacctcaacccacactggcccaattaattggagctcttagagctttaaaggaggagggcaggttaacgtttcccctgttagcggaatgtctgtttcgtgcaggtcgcagagacctcttgcgcgacctgcttcacttagacccgcgttttttagagcgccacctagcgggcacaatgagttatttcagcccttatcagctcactgttctccacgtagacggggagctgtgtgcgagggatattaggtctttgatatttttaagcaaggacactatagggtctcgcagcacaccacagacattcttacactgggtgtactgtatggaaaacttagacctactgggtcccactgacgtggatgccctaatgtcaatgcttagatctttgtcaagagtagacctacagcgccaagtgcaaaccctaatgggccttcacctttccggcccatcacactcccaacactatcgccatacaccactcgagaccgatttctacgactacaaggacgacgatgacaagactagtggctccggcgagggcagaggaagtctactaacctgcggagatgtggaagaaaatcctggcccacatatgaccgagtacaagcccacggtgcgcctcgccacccgcgacgacgtccccagggccgtacgcaccctcgccgccgcgttcgccgactaccccgccacgcgccacaccgtcgatccggaccgccacatcgagcgggtcaccgagctgcaagaactcttcctcacgcgcgtcgggctcgacatcggcaaggtgtgggtcgcggacgacggcgccgcggtggcggtctggaccacgccggagagcgtcgaagcgggggcggtgttcgccgagatcggcccgcgcatggccgagttgagcggttcccggctggccgcgcagcaacagatggaaggcctcctggcgccgcaccggcccaaggagcccgcgtggttcctggccaccgtcggcgtctcgcccgaccaccagggcaagggtctgggcagcgccgtcgtgctccccggagtggaggcggccgagcgcgccggggtgcccgccttcctggagacctccgcgccccgcaacctccccttctacgagcggctcggcttcaccgtcaccgccgacgtcgaggtgcccgaaggaccgcgcacctggtgcatgacccgcaagcccggtgcctga

SEQ ID NO: 1046 - DNA, 2745 bp, Artificial Sequence
  Synthetic Polynucleotides
atggccttaccagtgaccgccttgctcctgccgctggccttgctgctccacgccgccaggccggacagcaccgacatccagatgacccagagccccagcagcctgtctgccagcgtgggcgacagagtgaccatcacctgtagagccagccagagcatcagcagctacctgaactggtatcagcagaagcccggcaaggcccccaaactgctgatctacctggccagcaacctgcagagcggcgtgcccagcagattttctggcagcggctccggcaccgacttcaccctgacaatcagctccctgcagcccgaggacttcgccacctactactgtcagcaggccgagtacatgcccctgaccttcggccagggaacaaaggtggaaatcaagagagccggcggaggcggaagtggaggcggaggatctggcggcggaggctctgaagtgcaactgctggaatctggcggcggactggtgcagcctggcggatctctgagactgagctgtgccgccagcggcttcacctttagcggctacgccatgagctgggtgcgccaggctcctggcaaaggcctggaatgggtgtccgagatcgcccctcccggcctgaataccagatacgccgatagcgtgaagggccggttcaccatcagccgggacaacagcaagaacaccctgtacctgcagatgaacagcctgcgggccgaggataccgccgtgtactactgcgccaagagcgacaccgccttcgactactggggacagggaacccttgtgaccgtgtccacgcgtgagcagaaactgatctcggaagaggatctggcgaagcccaccacgacgccagcgccgcgaccaccaacaccggcgcccaccatcgcgtcgcagcccctgtccctgcgcccagaggcgtgccggccagcggcggggggcgcagtgcacacgagggggctggacttcgcctgtgacatctacatctgggcgcccttggccgggacttgtggggtccttctcctgtcactggttatcaccctttactgcgggcgcgccagagtgaagttcagcaggagcgcagacgcccccgcgtaccagcagggccagaaccagctctataacgagctgaatctaggacgaagagaggagtacgatgttttggacaagagacgtggccgggaccctgagatggggggaaagccgagaaggaagaaccctcaggaaggcctgtacaatgaactgcagaaagataagatggcggaggcctacagtgagattgggatgaaaggcgagcgccggaggggcaaggggcacgatggcctttaccagggtctcagtacagccaccaaggacacctacgacgcccttcacatgcaggccctgccccctcgctctagaggatctggagcaacaaacttctcactactcaaacaagcaggtgacgtggaggagaatcccgggcctgggatccacatggccacttacgaggttctctgtgaggtggcgcggaaactgggcacggatgacagggaagtggtattgttcctcctaaacgtgttcatacctcaacccacactggcccaattaattggagctcttagagctttaaaggaggagggcaggttaacgtttcccctgttagcggaatgtctgtttcgtgcaggtcgcagagacctcttgcgcgacctgcttcacttagacccgcgttttttagagcgccacctagcgggcacaatgagttatttcagcccttatcagctcactgttctccacgtagacggggagctgtgtgcgagggatattaggtctttgatatttttaagcaaggacactatagggtctcgcagcacaccacagacattcttacactgggtgtactgtatggaaaacttagacctactgggtcccactgacgtggatgccctaatgtcaatgcttagatctttgtcaagagtagacctacagcgccaagtgcaaaccctaatgggccttcacctttccggcccatcacactcccaacactatcgccatacaccactcgagaccgatttctacgactacaaggacgacgatgacaagactagtggctccggcgagggcagaggaagtctactaacctgcggagatgtggaagaaaatcctggcccacatatgaccgagtacaagcccacggtgcgcctcgccacccgcgacgacgtccccagggccgtacgcaccctcgccgccgcgttcgccgactaccccgccacgcgccacaccgtcgatccggaccgccacatcgagcgggtcaccgagctgcaagaactcttcctcacgcgcgtcgggctcgacatcggcaaggtgtgggtcgcggacgacggcgccgcggtggcggtctggaccacgccggagagcgtcgaagcgggggcggtgttcgccgagatcggcccgcgcatggccgagttgagcggttcccggctggccgcgcagcaacagatggaaggcctcctggcgccgcaccggcccaaggagcccgcgtggttcctggccaccgtcggcgtctcgcccgaccaccagggcaagggtctgggcagcgccgtcgtgctccccggagtggaggcggccgagcgcgccggggtgcccgccttcctggagacctccgcgccccgcaacctccccttctacgagcggctcggcttcaccgtcaccgccgacgtcgaggtgcccgaaggaccgcgcacctggtgcatgacccgcaagcccggtgcctga

SEQ ID NO: 1047 - DNA, 2754 bp, Artificial Sequence
  Synthetic Polynucleotides
atggccttaccagtgaccgccttgctcctgccgctggccttgctgctccacgccgccaggccggaccaggccgtgctgacccaggagagcgccctgaccaccagccccggcgagaccgtgaccctgacctgcagaagcagcaccggcgccgtgaccaccagcaactacgccaactgggtgcaggagaagcccgaccacctgttcaccggcctgatcggcggcaccaacaacagagtgcccggcgtgcccgccagattcagcggcagcctgatcggcgacaaggccgccctgaccatcaccggcgcccagaccgaggacgaggccatctacttctgcgtgctgtggcacagcaaccactgggtgttcggcggcggcaccaagctgaccgtgctgggcggaggcggaagtggaggcggaggatctggcggcggaggctctgacgtgcagctggtggagagcggcggcggcctggtgcagcccggcggcagcagaaagctgagctgcgccgccagcggcttcaccttcagcagcttcgggatgcactgggtgagacaggcccccgagaagggcctggagtgggtggcctacatcagcagcggcagcagcaccctgcactacgccgacaccgtgaagggcagattcaccatcagcagagacaaccccaagaacaccctgttcctgcagatgaccagcctgagaagcgaggacaccgccatgtactactgcgccagatggggcaactacccccactacgctatggactactggggccagggcaccagcgtgaccgtgagcagcacgcgtgagcagaaactgatctcggaagaggatctggcgaagcccaccacgacgccagcgccgcgaccaccaacaccggcgcccaccatcgcgtcgcagcccctgtccctgcgcccagaggcgtgccggccagcggcggggggcgcagtgcacacgagggggctggacttcgcctgtgacatctacatctgggcgcccttggccgggacttgtggggtccttctcctgtcactggttatcaccctttactgcgggcgcgccagagtgaagttcagcaggagcgcagacgcccccgcgtaccagcagggccagaaccagctctataacgagctgaatctaggacgaagagaggagtacgatgttttggacaagagacgtggccgggaccctgagatggggggaaagccgagaaggaagaaccctcaggaaggcctgtacaatgaactgcagaaagataagatggcggaggcctacagtgagattgggatgaaaggcgagcgccggaggggcaaggggcacgatggcctttaccagggtctcagtacagccaccaaggacacctacgacgcccttcacatgcaggccctgccccctcgctctagaggatctggagcaacaaacttctcactactcaaacaagcaggtgacgtggaggagaatcccgggcctgggatccacatggccacttacgaggttctctgtgaggtggcgcggaaactgggcacggatgacagggaagtggtattgttcctcctaaacgtgttcatacctcaacccacactggcccaattaattggagctcttagagctttaaaggaggagggcaggttaacgtttcccctgttagcggaatgtctgtttcgtgcaggtcgcagagacctcttgcgcgacctgcttcacttagacccgcgttttttagagcgccacctagcgggcacaatgagttatttcagcccttatcagctcactgttctccacgtagacggggagctgtgtgcgagggatattaggtctttgatatttttaagcaaggacactatagggtctcgcagcacaccacagacattcttacactgggtgtactgtatggaaaacttagacctactgggtcccactgacgtggatgccctaatgtcaatgcttagatctttgtcaagagtagacctacagcgccaagtgcaaaccctaatgggccttcacctttccggcccatcacactcccaacactatcgccatacaccactcgagaccgatttctacgactacaaggacgacgatgacaagactagtggctccggcgagggcagaggaagtctactaacctgcggagatgtggaagaaaatcctggcccacatatgaccgagtacaagcccacggtgcgcctcgccacccgcgacgacgtccccagggccgtacgcaccctcgccgccgcgttcgccgactaccccgccacgcgccacaccgtcgatccggaccgccacatcgagcgggtcaccgagctgcaagaactcttcctcacgcgcgtcgggctcgacatcggcaaggtgtgggtcgcggacgacggcgccgcggtggcggtctggaccacgccggagagcgtcgaagcgggggcggtgttcgccgagatcggcccgcgcatggccgagttgagcggttcccggctggccgcgcagcaacagatggaaggcctcctggcgccgcaccggcccaaggagcccgcgtggttcctggccaccgtcggcgtctcgcccgaccaccagggcaagggtctgggcagcgccgtcgtgctccccggagtggaggcggccgagcgcgccggggtgcccgccttcctggagacctccgcgccccgcaacctccccttctacgagcggctcggcttcaccgtcaccgccgacgtcgaggtgcccgaaggaccgcgcacctggtgcatgacccgcaagcccggtgcctga

SEQ ID NO: 1048 - DNA, 2400 bp, Artificial Sequence
  Synthetic Polynucleotides
atggccctgcccgtgacagccctgctgctgcctctggctctgctgctgcacgccgccagacccgatgaattcgaggtgcaactggtggaaagcggcggaggctctgtgcagacaggcggctctctgagactgacctgtgccgccagcggcagaaccagcagatcctatggcatgggctggttcagacaggcccctggcaaagaacgcgagttcgtgtccggcatctcttggagaggcgacagcaccggctacgccgatagcgtgaagggccggttcaccatcagccgggacaacgccaagaacaccgtggacctgcagatgaacagcctgaagcccgaggacaccgccatctactactgtgccgctgccgccggatctgcttggtacggcacactgtacgagtacgactactggggccagggcacccttgtgaccgtgtcatctacgcgtgagcagaaactgatctcggaagaggatctggcgaagcccaccacgacgccagcgccgcgaccaccaacaccggcgcccaccatcgcgtcgcagcccctgtccctgcgcccagaggcgtgccggccagcggcggggggcgcagtgcacacgagggggctggacttcgcctgtgacatctacatctgggcgcccttggccgggacttgtggggtccttctcctgtcactggttatcaccctttactgcgggcgcgccagagtgaagttcagcaggagcgcagacgcccccgcgtaccagcagggccagaaccagctctataacgagctgaatctaggacgaagagaggagtacgatgttttggacaagagacgtggccgggaccctgagatggggggaaagccgagaaggaagaaccctcaggaaggcctgtacaatgaactgcagaaagataagatggcggaggcctacagtgagattgggatgaaaggcgagcgccggaggggcaaggggcacgatggcctttaccagggtctcagtacagccaccaaggacacctacgacgcccttcacatgcaggccctgccccctcgctctagaggatctggagcaacaaacttctcactactcaaacaagcaggtgacgtggaggagaatcccgggcctgggatccacatggccacttacgaggttctctgtgaggtggcgcggaaactgggcacggatgacagggaagtggtattgttcctcctaaacgtgttcatacctcaacccacactggcccaattaattggagctcttagagctttaaaggaggagggcaggttaacgtttcccctgttagcggaatgtctgtttcgtgcaggtcgcagagacctcttgcgcgacctgcttcacttagacccgcgttttttagagcgccacctagcgggcacaatgagttatttcagcccttatcagctcactgttctccacgtagacggggagctgtgtgcgagggatattaggtctttgatatttttaagcaaggacactatagggtctcgcagcacaccacagacattcttacactgggtgtactgtatggaaaacttagacctactgggtcccactgacgtggatgccctaatgtcaatgcttagatctttgtcaagagtagacctacagcgccaagtgcaaaccctaatgggccttcacctttccggcccatcacactcccaacactatcgccatacaccactcgagaccgatttctacgactacaaggacgacgatgacaagactagtggctccggcgagggcagaggaagtctactaacctgcggagatgtggaagaaaatcctggcccacatatgaccgagtacaagcccacggtgcgcctcgccacccgcgacgacgtccccagggccgtacgcaccctcgccgccgcgttcgccgactaccccgccacgcgccacaccgtcgatccggaccgccacatcgagcgggtcaccgagctgcaagaactcttcctcacgcgcgtcgggctcgacatcggcaaggtgtgggtcgcggacgacggcgccgcggtggcggtctggaccacgccggagagcgtcgaagcgggggcggtgttcgccgagatcggcccgcgcatggccgagttgagcggttcccggctggccgcgcagcaacagatggaaggcctcctggcgccgcaccggcccaaggagcccgcgtggttcctggccaccgtcggcgtctcgcccgaccaccagggcaagggtctgggcagcgccgtcgtgctccccggagtggaggcggccgagcgcgccggggtgcccgccttcctggagacctccgcgccccgcaacctccccttctacgagcggctcggcttcaccgtcaccgccgacgtcgaggtgcccgaaggaccgcgcacctggtgcatgacccgcaagcccggtgcctga

SEQ ID NO: 1049 - DNA, 2826 bp, Artificial Sequence
  Synthetic Polynucleotides
atggccctgcccgtgacagccctgctgctgcctctggctctgctgctgcacgccgccagacccgatgaattcgaggtgcaactggtggaaagcggcggaggctctgtgcagacaggcggctctctgagactgacctgtgccgccagcggcagaaccagcagatcctatggcatgggctggttcagacaggcccctggcaaagaacgcgagttcgtgtccggcatctcttggagaggcgacagcaccggctacgccgatagcgtgaagggccggttcaccatcagccgggacaacgccaagaacaccgtggacctgcagatgaacagcctgaagcccgaggacaccgccatctactactgtgccgctgccgccggatctgcttggtacggcacactgtacgagtacgactactggggccagggcacccttgtgaccgtgtcatctctcgagggcggaggcggaagtggaggcggaggatctggcggcggaggctctttcgaagaggtgcaactggtggaatccgggggaggcagcgtgcaggctgggggatcactgagactgtcttgtgctgcctccggcgacacctacggcagctattggatgggatggtttcggcaggctcccggaaaagaacgggaaggcgtggccgccatcaacagaggcggcggatacaccgtgtacgccgactctgtgaagggcagattcacaatctccagagacacagccaagaatactgtgtacctgcagatgaactccctgcgccccgacgataccgccgactattattgcgccgcttccggcgtgctgggcggcctgcatgaggactggttcaattattggggacagggaacacttgtgacagtgtccagcacgcgtgagcagaaactgatctcggaagaggatctggcgaagcccaccacgacgccagcgccgcgaccaccaacaccggcgcccaccatcgcgtcgcagcccctgtccctgcgcccagaggcgtgccggccagcggcggggggcgcagtgcacacgagggggctggacttcgcctgtgacatctacatctgggcgcccttggccgggacttgtggggtccttctcctgtcactggttatcaccctttactgcgggcgcgccagagtgaagttcagcaggagcgcagacgcccccgcgtaccagcagggccagaaccagctctataacgagctgaatctaggacgaagagaggagtacgatgttttggacaagagacgtggccgggaccctgagatggggggaaagccgagaaggaagaaccctcaggaaggcctgtacaatgaactgcagaaagataagatggcggaggcctacagtgagattgggatgaaaggcgagcgccggaggggcaaggggcacgatggcctttaccagggtctcagtacagccaccaaggacacctacgacgcccttcacatgcaggccctgccccctcgctctagaggatctggagcaacaaacttctcactactcaaacaagcaggtgacgtggaggagaatcccgggcctgggatccacatggccacttacgaggttctctgtgaggtggcgcggaaactgggcacggatgacagggaagtggtattgttcctcctaaacgtgttcatacctcaacccacactggcccaattaattggagctcttagagctttaaaggaggagggcaggttaacgtttcccctgttagcggaatgtctgtttcgtgcaggtcgcagagacctcttgcgcgacctgcttcacttagacccgcgttttttagagcgccacctagcgggcacaatgagttatttcagcccttatcagctcactgttctccacgtagacggggagctgtgtgcgagggatattaggtctttgatatttttaagcaaggacactatagggtctcgcagcacaccacagacattcttacactgggtgtactgtatggaaaacttagacctactgggtcccactgacgtggatgccctaatgtcaatgcttagatctttgtcaagagtagacctacagcgccaagtgcaaaccctaatgggccttcacctttccggcccatcacactcccaacactatcgccatacaccactcgagaccgatttctacgactacaaggacgacgatgacaagactagtggctccggcgagggcagaggaagtctactaacctgcggagatgtggaagaaaatcctggcccacatatgaccgagtacaagcccacggtgcgcctcgccacccgcgacgacgtccccagggccgtacgcaccctcgccgccgcgttcgccgactaccccgccacgcgccacaccgtcgatccggaccgccacatcgagcgggtcaccgagctgcaagaactcttcctcacgcgcgtcgggctcgacatcggcaaggtgtgggtcgcggacgacggcgccgcggtggcggtctggaccacgccggagagcgtcgaagcgggggcggtgttcgccgagatcggcccgcgcatggccgagttgagcggttcccggctggccgcgcagcaacagatggaaggcctcctggcgccgcaccggcccaaggagcccgcgtggttcctggccaccgtcggcgtctcgcccgaccaccagggcaagggtctgggcagcgccgtcgtgctccccggagtggaggcggccgagcgcgccggggtgcccgccttcctggagacctccgcgccccgcaacctccccttctacgagcggctcggcttcaccgtcaccgccgacgtcgaggtgcccgaaggaccgcgcacctggtgcatgacccgcaagcccggtgcctga

SEQ ID NO: 1050 - DNA, 2883 bp, Artificial Sequence
  Synthetic Polynucleotides
atggccctgcccgtgacagccctgctgctgcctctggctctgctgctgcacgccgccagacccgatgaattcgaggtgcagctcgtagaatctggaggtggttccgtgcaagccggaggatcattgcgactgacctgcgcagcgagcggatctacttctcgctcttacggtatgggatggttcagacaggctcctgggaaagagcgcgagttcgtttcaggcatctcctggaggggggacagcaccggctacgcagatagcgtgaagggcaggttcacgatcagccgagacaacgccaaaaacaccgtcgatctgcaaatgaatagtctgaagcccgaagatactgcgatctactactgtgccgccgcagcagggtccacctggtacggcacactctacgagtacgactactgggggcagggaaccctggtaaccgtgtcctctctcgagggaggaggcggctccgggggaggcggaagtggaggcggaggatctgggtctggaggaagcggatctggaggctcagggtcagggggctcaggcagtggaggctctttcgaagttcagctcgtggaaagcggtggcggaagtgtgcaggccggaggcagtttgcgcctgagctgcgctgcttccggcgatacatacgggtcttactggatgggctggtttaggcaggcacctggacaagaaagagaagctgtggccgctattaacaggggaggtggctataccgtttatgctgattccgtgaagggccgattcacaatctcccgggataacgccaaaaacactctgtacctgcagatgaactcccttaggcccgatgacacagccgattactattgtgcggcctccggcgtgctgggtggtctgcatgaggattggttcaactactgggggcaaggcaccctcgtaaccgtgagtagcacgcgtgagcagaaactgatctcggaagaggatctggcgaagcccaccacgacgccagcgccgcgaccaccaacaccggcgcccaccatcgcgtcgcagcccctgtccctgcgcccagaggcgtgccggccagcggcggggggcgcagtgcacacgagggggctggacttcgcctgtgacatctacatctgggcgcccttggccgggacttgtggggtccttctcctgtcactggttatcaccctttactgcgggcgcgccagagtgaagttcagcaggagcgcagacgcccccgcgtaccagcagggccagaaccagctctataacgagctgaatctaggacgaagagaggagtacgatgttttggacaagagacgtggccgggaccctgagatggggggaaagccgagaaggaagaaccctcaggaaggcctgtacaatgaactgcagaaagataagatggcggaggcctacagtgagattgggatgaaaggcgagcgccggaggggcaaggggcacgatggcctttaccagggtctcagtacagccaccaaggacacctacgacgcccttcacatgcaggccctgccccctcgctctagaggatctggagcaacaaacttctcactactcaaacaagcaggtgacgtggaggagaatcccgggcctgggatccacatggccacttacgaggttctctgtgaggtggcgcggaaactgggcacggatgacagggaagtggtattgttcctcctaaacgtgttcatacctcaacccacactggcccaattaattggagctcttagagctttaaaggaggagggcaggttaacgtttcccctgttagcggaatgtctgtttcgtgcaggtcgcagagacctcttgcgcgacctgcttcacttagacccgcgttttttagagcgccacctagcgggcacaatgagttatttcagcccttatcagctcactgttctccacgtagacggggagctgtgtgcgagggatattaggtctttgatatttttaagcaaggacactatagggtctcgcagcacaccacagacattcttacactgggtgtactgtatggaaaacttagacctactgggtcccactgacgtggatgccctaatgtcaatgcttagatctttgtcaagagtagacctacagcgccaagtgcaaaccctaatgggccttcacctttccggcccatcacactcccaacactatcgccatacaccactcgagaccgatttctacgactacaaggacgacgatgacaagactagtggctccggcgagggcagaggaagtctactaacctgcggagatgtggaagaaaatcctggcccacatatgaccgagtacaagcccacggtgcgcctcgccacccgcgacgacgtccccagggccgtacgcaccctcgccgccgcgttcgccgactaccccgccacgcgccacaccgtcgatccggaccgccacatcgagcgggtcaccgagctgcaagaactcttcctcacgcgcgtcgggctcgacatcggcaaggtgtgggtcgcggacgacggcgccgcggtggcggtctggaccacgccggagagcgtcgaagcgggggcggtgttcgccgagatcggcccgcgcatggccgagttgagcggttcccggctggccgcgcagcaacagatggaaggcctcctggcgccgcaccggcccaaggagcccgcgtggttcctggccaccgtcggcgtctcgcccgaccaccagggcaagggtctgggcagcgccgtcgtgctccccggagtggaggcggccgagcgcgccggggtgcccgccttcctggagacctccgcgccccgcaacctccccttctacgagcggctcggcttcaccgtcaccgccgacgtcgaggtgcccgaaggaccgcgcacctggtgcatgacccgcaagcccggtgcctga

SEQ ID NO: 1051 - DNA, 2727 bp, Artificial Sequence
  Synthetic Polynucleotides
atggccttaccagtgaccgccttgctcctgccgctggccttgctgctccacgccgccaggccggacatccagatgacccagagccccagcagcctgtctgccagcgtgggcgacagagtgaccatcacctgtagagccagccagggcatcagaaacaacctggcctggtatcagcagaagcccggcaaggcccccaagcggctgatctacgccgccagcaatctccagagcggcgtgcccagcagattcacaggctctggcagcggcaccgagttcaccctgatcgtgtctagcctccagcccgaggacttcgccacctactactgcctccagcaccacagctaccccctgacatctggcggaggcaccaaggtggaaggcggaggcggaagtggaggcggaggatctggcggcggaggctctgaggtgcaggtgctggaaagtggcggaggactggtgcagcctggcggctctctgagactgtcttgtgccgccagcggcttcaccttcagcagctacgccatgagctgggtgcgccaggcccctggaaaaggactggaatgggtgtccgccatcagcggctctggcgggtctaccaactacgccgatagcgtgaagggccggttcaccatcagccgggacaacagcaagaacaccctgtacctccagatgaacagcctgcgggccgaggacaccgccgtgtattattgtgccggcagcagcgggtggagcgagtattggggacagggcaccctcgtgaccgtgtcctctacgcgtgagcagaaactgatctcggaagaggatctggcgaagcccaccacgacgccagcgccgcgaccaccaacaccggcgcccaccatcgcgtcgcagcccctgtccctgcgcccagaggcgtgccggccagcggcggggggcgcagtgcacacgagggggctggacttcgcctgtgacatctacatctgggcgcccttggccgggacttgtggggtccttctcctgtcactggttatcaccctttactgcgggcgcgccagagtgaagttcagcaggagcgcagacgcccccgcgtaccagcagggccagaaccagctctataacgagctgaatctaggacgaagagaggagtacgatgttttggacaagagacgtggccgggaccctgagatggggggaaagccgagaaggaagaaccctcaggaaggcctgtacaatgaactgcagaaagataagatggcggaggcctacagtgagattgggatgaaaggcgagcgccggaggggcaaggggcacgatggcctttaccagggtctcagtacagccaccaaggacacctacgacgcccttcacatgcaggccctgccccctcgctctagaggatctggagcaacaaacttctcactactcaaacaagcaggtgacgtggaggagaatcccgggcctgggatccacatggccacttacgaggttctctgtgaggtggcgcggaaactgggcacggatgacagggaagtggtattgttcctcctaaacgtgttcatacctcaacccacactggcccaattaattggagctcttagagctttaaaggaggagggcaggttaacgtttcccctgttagcggaatgtctgtttcgtgcaggtcgcagagacctcttgcgcgacctgcttcacttagacccgcgttttttagagcgccacctagcgggcacaatgagttatttcagcccttatcagctcactgttctccacgtagacggggagctgtgtgcgagggatattaggtctttgatatttttaagcaaggacactatagggtctcgcagcacaccacagacattcttacactgggtgtactgtatggaaaacttagacctactgggtcccactgacgtggatgccctaatgtcaatgcttagatctttgtcaagagtagacctacagcgccaagtgcaaaccctaatgggccttcacctttccggcccatcacactcccaacactatcgccatacaccactcgagaccgatttctacgactacaaggacgacgatgacaagactagtggctccggcgagggcagaggaagtctactaacctgcggagatgtggaagaaaatcctggcccacatatgaccgagtacaagcccacggtgcgcctcgccacccgcgacgacgtccccagggccgtacgcaccctcgccgccgcgttcgccgactaccccgccacgcgccacaccgtcgatccggaccgccacatcgagcgggtcaccgagctgcaagaactcttcctcacgcgcgtcgggctcgacatcggcaaggtgtgggtcgcggacgacggcgccgcggtggcggtctggaccacgccggagagcgtcgaagcgggggcggtgttcgccgagatcggcccgcgcatggccgagttgagcggttcccggctggccgcgcagcaacagatggaaggcctcctggcgccgcaccggcccaaggagcccgcgtggttcctggccaccgtcggcgtctcgcccgaccaccagggcaagggtctgggcagcgccgtcgtgctccccggagtggaggcggccgagcgcgccggggtgcccgccttcctggagacctccgcgccccgcaacctccccttctacgagcggctcggcttcaccgtcaccgccgacgtcgaggtgcccgaaggaccgcgcacctggtgcatgacccgcaagcccggtgcctga

SEQ ID NO: 1052 - DNA, 2745 bp, Artificial Sequence
  Synthetic Polynucleotides
atggccttaccagtgaccgccttgctcctgccgctggccttgctgctccacgccgccaggccggacgagatccagctggtgcagagcggagccgaagtgaagaagcctggcgagagcctgcggatcagctgcaagggcagcggcttcaacatcgaggactactacatccactgggtgcgccagatgcccggcaagggcctggaatggatgggcagaatcgaccccgagaacgacgagactaagtacggccccatcttccagggccacgtgaccatcagcgccgacaccagcatcaacaccgtgtacctccagtggtccagcctgaaggccagcgacaccgccatgtactactgcgcctttagaggcggcgtgtactggggccagggcaccacagtgacagtgtctagcggcggaggcggaagtggaggcggaggatctggcggcggaggctctgatgtcgtgatgacccagagccccgacagcctggctgtgtctctgggagagagagccaccatcaactgcaagtccagccagtccctgctggacagcgacggcaagacctacctgaactggctccagcagaagcccggccagccccccaagagactgatctccctggtgtccaagctggactccggcgtgcccgatagattttccggctctggcagcggcaccgacttcaccctgacaatcagctcccttcaggccgaggacgtggccgtgtactattgctggcagggcacacacttccccggcacctttggcggaggcaccaaggtggaaatcaagacgcgtgagcagaaactgatctcggaagaggatctggcgaagcccaccacgacgccagcgccgcgaccaccaacaccggcgcccaccatcgcgtcgcagcccctgtccctgcgcccagaggcgtgccggccagcggcggggggcgcagtgcacacgagggggctggacttcgcctgtgacatctacatctgggcgcccttggccgggacttgtggggtccttctcctgtcactggttatcaccctttactgcgggcgcgccagagtgaagttcagcaggagcgcagacgcccccgcgtaccagcagggccagaaccagctctataacgagctgaatctaggacgaagagaggagtacgatgttttggacaagagacgtggccgggaccctgagatggggggaaagccgagaaggaagaaccctcaggaaggcctgtacaatgaactgcagaaagataagatggcggaggcctacagtgagattgggatgaaaggcgagcgccggaggggcaaggggcacgatggcctttaccagggtctcagtacagccaccaaggacacctacgacgcccttcacatgcaggccctgccccctcgctctagaggatctggagcaacaaacttctcactactcaaacaagcaggtgacgtggaggagaatcccgggcctgggatccacatggccacttacgaggttctctgtgaggtggcgcggaaactgggcacggatgacagggaagtggtattgttcctcctaaacgtgttcatacctcaacccacactggcccaattaattggagctcttagagctttaaaggaggagggcaggttaacgtttcccctgttagcggaatgtctgtttcgtgcaggtcgcagagacctcttgcgcgacctgcttcacttagacccgcgttttttagagcgccacctagcgggcacaatgagttatttcagcccttatcagctcactgttctccacgtagacggggagctgtgtgcgagggatattaggtctttgatatttttaagcaaggacactatagggtctcgcagcacaccacagacattcttacactgggtgtactgtatggaaaacttagacctactgggtcccactgacgtggatgccctaatgtcaatgcttagatctttgtcaagagtagacctacagcgccaagtgcaaaccctaatgggccttcacctttccggcccatcacactcccaacactatcgccatacaccactcgagaccgatttctacgactacaaggacgacgatgacaagactagtggctccggcgagggcagaggaagtctactaacctgcggagatgtggaagaaaatcctggcccacatatgaccgagtacaagcccacggtgcgcctcgccacccgcgacgacgtccccagggccgtacgcaccctcgccgccgcgttcgccgactaccccgccacgcgccacaccgtcgatccggaccgccacatcgagcgggtcaccgagctgcaagaactcttcctcacgcgcgtcgggctcgacatcggcaaggtgtgggtcgcggacgacggcgccgcggtggcggtctggaccacgccggagagcgtcgaagcgggggcggtgttcgccgagatcggcccgcgcatggccgagttgagcggttcccggctggccgcgcagcaacagatggaaggcctcctggcgccgcaccggcccaaggagcccgcgtggttcctggccaccgtcggcgtctcgcccgaccaccagggcaagggtctgggcagcgccgtcgtgctccccggagtggaggcggccgagcgcgccggggtgcccgccttcctggagacctccgcgccccgcaacctccccttctacgagcggctcggcttcaccgtcaccgccgacgtcgaggtgcccgaaggaccgcgcacctggtgcatgacccgcaagcccggtgcctga

SEQ ID NO: 1053 - DNA, 2766 bp, Artificial Sequence
  Synthetic Polynucleotides
atggccttaccagtgaccgccttgctcctgccgctggccttgctgctccacgccgccaggccggacgagcttgtgatgacccagagccccagcagcctgacagtgacagccggcgagaaagtgaccatgagctgcaagagcagccagagcctgctgaacagcggcaaccagaagaactacctgacctggtatcagcagaagcccggccagccccccaagctgctgatctactgggccagcaccagagaaagcggcgtgcccgatagattcaccggctctggcagcggcaccgacttcaccctgacaatcagcagcgtgcaggccgaggacctggccgtgtactactgccagaacgactacagctaccccctgaccttcggagccggcaccaagctggaaatcaagggcggaggcggaagtggaggcggaggatctggcggcggaggctctgaagtgcagctgctggaacagtctggcgccgaacttgtgcggcctggcaccagcgtgaagatcagctgtaaagccagcggctacgccttcaccaactactggctgggctgggtcaagcagaggcctggacacggcctggaatggatcggcgacatctttcccggctccggcaacatccactacaacgagaagttcaagggcaaggccaccctgaccgccgacaagtctagcagcaccgcctacatgcagctgtccagcctgacctttgaggacagcgccgtgtatttctgtgcccggctgcggaactgggacgagcccatggattattggggccagggcaccaccgtgaccgtgtctagtacgcgtgagcagaaactgatctcggaagaggatctggcgaagcccaccacgacgccagcgccgcgaccaccaacaccggcgcccaccatcgcgtcgcagcccctgtccctgcgcccagaggcgtgccggccagcggcggggggcgcagtgcacacgagggggctggacttcgcctgtgacatctacatctgggcgcccttggccgggacttgtggggtccttctcctgtcactggttatcaccctttactgcgggcgcgccagagtgaagttcagcaggagcgcagacgcccccgcgtaccagcagggccagaaccagctctataacgagctgaatctaggacgaagagaggagtacgatgttttggacaagagacgtggccgggaccctgagatggggggaaagccgagaaggaagaaccctcaggaaggcctgtacaatgaactgcagaaagataagatggcggaggcctacagtgagattgggatgaaaggcgagcgccggaggggcaaggggcacgatggcctttaccagggtctcagtacagccaccaaggacacctacgacgcccttcacatgcaggccctgccccctcgctctagaggatctggagcaacaaacttctcactactcaaacaagcaggtgacgtggaggagaatcccgggcctgggatccacatggccacttacgaggttctctgtgaggtggcgcggaaactgggcacggatgacagggaagtggtattgttcctcctaaacgtgttcatacctcaacccacactggcccaattaattggagctcttagagctttaaaggaggagggcaggttaacgtttcccctgttagcggaatgtctgtttcgtgcaggtcgcagagacctcttgcgcgacctgcttcacttagacccgcgttttttagagcgccacctagcgggcacaatgagttatttcagcccttatcagctcactgttctccacgtagacggggagctgtgtgcgagggatattaggtctttgatatttttaagcaaggacactatagggtctcgcagcacaccacagacattcttacactgggtgtactgtatggaaaacttagacctactgggtcccactgacgtggatgccctaatgtcaatgcttagatctttgtcaagagtagacctacagcgccaagtgcaaaccctaatgggccttcacctttccggcccatcacactcccaacactatcgccatacaccactcgagaccgatttctacgactacaaggacgacgatgacaagactagtggctccggcgagggcagaggaagtctactaacctgcggagatgtggaagaaaatcctggcccacatatgaccgagtacaagcccacggtgcgcctcgccacccgcgacgacgtccccagggccgtacgcaccctcgccgccgcgttcgccgactaccccgccacgcgccacaccgtcgatccggaccgccacatcgagcgggtcaccgagctgcaagaactcttcctcacgcgcgtcgggctcgacatcggcaaggtgtgggtcgcggacgacggcgccgcggtggcggtctggaccacgccggagagcgtcgaagcgggggcggtgttcgccgagatcggcccgcgcatggccgagttgagcggttcccggctggccgcgcagcaacagatggaaggcctcctggcgccgcaccggcccaaggagcccgcgtggttcctggccaccgtcggcgtctcgcccgaccaccagggcaagggtctgggcagcgccgtcgtgctccccggagtggaggcggccgagcgcgccggggtgcccgccttcctggagacctccgcgccccgcaacctccccttctacgagcggctcggcttcaccgtcaccgccgacgtcgaggtgcccgaaggaccgcgcacctggtgcatgacccgcaagcccggtgcctga

SEQ ID NO: 1054 - DNA, 2769 bp, Artificial Sequence
  Synthetic Polynucleotides
atggccttaccagtgaccgccttgctcctgccgctggccttgctgctccacgccgccaggccggacgagctgcagatgacccagagccctagcagcctgtctgccagcgtgggcgacagagtgaccatcacctgtagagccagccagagcatcagcagctacctgaactggtatcagcagaagcccggccagccccccaaactgctgatctactgggccagcaccagagaaagcggcgtgcccgatagattcagcggcagcgagagcggcaccaactacaccctgaccatcagctccctgcagcccgaggacttcgccacctacttttgccagcagagcgacagcctgcccatcacctttggacagggcacccggctggacattcagggcggaggcggaagtggaggcggaggatctggcggcggaggctctgaggtgcaactgctggaatctgggggcggagtggtgcagcctggcagaagcctgagactgagctgtgccgccagcggcttcaccttcagctcctacggaatgcactgggtgcgccaggcccctggcaaaggactggaatgggtggccgtgatctcctacgacggcagcaacaagtactacgccgacagcgtgaagggccggttcaccatcagccgggacaacagcaagaacaccctgtacctgcagatgaacagcctgcgggccgaggacaccgccgtgtactactgcgccaaggatatgggctggggcagcggctggcggccttactactactacggcatggacgtgtggggccagggcaccaccgtgacagtgtcatctacgcgtgagcagaaactgatctcggaagaggatctggcgaagcccaccacgacgccagcgccgcgaccaccaacaccggcgcccaccatcgcgtcgcagcccctgtccctgcgcccagaggcgtgccggccagcggcggggggcgcagtgcacacgagggggctggacttcgcctgtgacatctacatctgggcgcccttggccgggacttgtggggtccttctcctgtcactggttatcaccctttactgcgggcgcgccagagtgaagttcagcaggagcgcagacgcccccgcgtaccagcagggccagaaccagctctataacgagctgaatctaggacgaagagaggagtacgatgttttggacaagagacgtggccgggaccctgagatggggggaaagccgagaaggaagaaccctcaggaaggcctgtacaatgaactgcagaaagataagatggcggaggcctacagtgagattgggatgaaaggcgagcgccggaggggcaaggggcacgatggcctttaccagggtctcagtacagccaccaaggacacctacgacgcccttcacatgcaggccctgccccctcgctctagaggatctggagcaacaaacttctcactactcaaacaagcaggtgacgtggaggagaatcccgggcctgggatccacatggccacttacgaggttctctgtgaggtggcgcggaaactgggcacggatgacagggaagtggtattgttcctcctaaacgtgttcatacctcaacccacactggcccaattaattggagctcttagagctttaaaggaggagggcaggttaacgtttcccctgttagcggaatgtctgtttcgtgcaggtcgcagagacctcttgcgcgacctgcttcacttagacccgcgttttttagagcgccacctagcgggcacaatgagttatttcagcccttatcagctcactgttctccacgtagacggggagctgtgtgcgagggatattaggtctttgatatttttaagcaaggacactatagggtctcgcagcacaccacagacattcttacactgggtgtactgtatggaaaacttagacctactgggtcccactgacgtggatgccctaatgtcaatgcttagatctttgtcaagagtagacctacagcgccaagtgcaaaccctaatgggccttcacctttccggcccatcacactcccaacactatcgccatacaccactcgagaccgatttctacgactacaaggacgacgatgacaagactagtggctccggcgagggcagaggaagtctactaacctgcggagatgtggaagaaaatcctggcccacatatgaccgagtacaagcccacggtgcgcctcgccacccgcgacgacgtccccagggccgtacgcaccctcgccgccgcgttcgccgactaccccgccacgcgccacaccgtcgatccggaccgccacatcgagcgggtcaccgagctgcaagaactcttcctcacgcgcgtcgggctcgacatcggcaaggtgtgggtcgcggacgacggcgccgcggtggcggtctggaccacgccggagagcgtcgaagcgggggcggtgttcgccgagatcggcccgcgcatggccgagttgagcggttcccggctggccgcgcagcaacagatggaaggcctcctggcgccgcaccggcccaaggagcccgcgtggttcctggccaccgtcggcgtctcgcccgaccaccagggcaagggtctgggcagcgccgtcgtgctccccggagtggaggcggccgagcgcgccggggtgcccgccttcctggagacctccgcgccccgcaacctccccttctacgagcggctcggcttcaccgtcaccgccgacgtcgaggtgcccgaaggaccgcgcacctggtgcatgacccgcaagcccggtgcctga

SEQ ID NO: 1055 - DNA, 2760 bp, Artificial Sequence
  Synthetic Polynucleotides
atggccttaccagtgaccgccttgctcctgccgctggccttgctgctccacgccgccaggccggacgacatccaaatgacacagagtccttctagtttgagtgcgagcgtgggggacagggtgaccattacctgcagggccagccagagcataagctcataccttaattggtaccagcaaaaaccaggtaaggcccctaagctcctgatctacgcggcctcttcacttcaatctggggtcccttcccgcttcagtggctccggcagcggcaccgacttcacgctcactatatcaagtctgcagcctgaggatctcgccacctattactgtcaacaaagttattccacccctttcacctttggaccgggcacgaaagtggatattaagggcggaggcggaagtggaggcggaggatctggcggcggaggctctgtgcacgaggtccagcttgtgcagtccggggcagaggtcaagaagcctggttctagcgtaaaagtgagttgcaaagcctcaggtgggacattttcatcctacgcgatcagttgggttagacaggctcctggtcaagggctggaatggatgggcggaattattccaatcttcggaacagcgaattacgcgcagaagttccagggtagagtaaccatcactgctgacaagtccacctccaccgcatacatggaattgtctagtctccggagcgaggatacggcggtgtattattgtgctacgttcgccctgtttggcttccgcgaacaggctttcgacatctgggggcagggcacgacagtcacggttagtagtacgcgtgagcagaaactgatctcggaagaggatctggcgaagcccaccacgacgccagcgccgcgaccaccaacaccggcgcccaccatcgcgtcgcagcccctgtccctgcgcccagaggcgtgccggccagcggcggggggcgcagtgcacacgagggggctggacttcgcctgtgacatctacatctgggcgcccttggccgggacttgtggggtccttctcctgtcactggttatcaccctttactgcgggcgcgccagagtgaagttcagcaggagcgcagacgcccccgcgtaccagcagggccagaaccagctctataacgagctgaatctaggacgaagagaggagtacgatgttttggacaagagacgtggccgggaccctgagatggggggaaagccgagaaggaagaaccctcaggaaggcctgtacaatgaactgcagaaagataagatggcggaggcctacagtgagattgggatgaaaggcgagcgccggaggggcaaggggcacgatggcctttaccagggtctcagtacagccaccaaggacacctacgacgcccttcacatgcaggccctgccccctcgctctagaggatctggagcaacaaacttctcactactcaaacaagcaggtgacgtggaggagaatcccgggcctgggatccacatggccacttacgaggttctctgtgaggtggcgcggaaactgggcacggatgacagggaagtggtattgttcctcctaaacgtgttcatacctcaacccacactggcccaattaattggagctcttagagctttaaaggaggagggcaggttaacgtttcccctgttagcggaatgtctgtttcgtgcaggtcgcagagacctcttgcgcgacctgcttcacttagacccgcgttttttagagcgccacctagcgggcacaatgagttatttcagcccttatcagctcactgttctccacgtagacggggagctgtgtgcgagggatattaggtctttgatatttttaagcaaggacactatagggtctcgcagcacaccacagacattcttacactgggtgtactgtatggaaaacttagacctactgggtcccactgacgtggatgccctaatgtcaatgcttagatctttgtcaagagtagacctacagcgccaagtgcaaaccctaatgggccttcacctttccggcccatcacactcccaacactatcgccatacaccactcgagaccgatttctacgactacaaggacgacgatgacaagactagtggctccggcgagggcagaggaagtctactaacctgcggagatgtggaagaaaatcctggcccacatatgaccgagtacaagcccacggtgcgcctcgccacccgcgacgacgtccccagggccgtacgcaccctcgccgccgcgttcgccgactaccccgccacgcgccacaccgtcgatccggaccgccacatcgagcgggtcaccgagctgcaagaactcttcctcacgcgcgtcgggctcgacatcggcaaggtgtgggtcgcggacgacggcgccgcggtggcggtctggaccacgccggagagcgtcgaagcgggggcggtgttcgccgagatcggcccgcgcatggccgagttgagcggttcccggctggccgcgcagcaacagatggaaggcctcctggcgccgcaccggcccaaggagcccgcgtggttcctggccaccgtcggcgtctcgcccgaccaccagggcaagggtctgggcagcgccgtcgtgctccccggagtggaggcggccgagcgcgccggggtgcccgccttcctggagacctccgcgccccgcaacctccccttctacgagcggctcggcttcaccgtcaccgccgacgtcgaggtgcccgaaggaccgcgcacctggtgcatgacccgcaagcccggtgcctga

SEQ ID NO: 1056 - DNA, 2751 bp, Artificial Sequence
  Synthetic Polynucleotides
atggccttaccagtgaccgccttgctcctgccgctggccttgctgctccacgccgccaggccggacgtcgtgatgacccagacccctctgagcctgcctgtgtccctgggcgatcaggccagcatctcctgtagaagcagccagagcctggtgcacagcaacggcaacacctacctgcggtggtatctccagaagcccggccagagccccaaggtgctgatctacaaggtgtccaacagattcagcggcgtgcccgacagattctccggcagcggctctggcaccgacttcaccctgaagatcagccgggtggaagccgaggacctgggcgtgtacttctgtagccagagcacccacgtgccctggacctttggcggcggaacaaagctggaaatcaagggcggaggcggaagtggaggcggaggatctggcggcggaggctctgaagtgaagctggacgagacaggcggagggctggtgcagcctggcagacctatgaagctgagctgtgtggcctccggcttcaccttcagcgactactggatgaactgggtgcgccagtcccccgagaagggcctggaatgggtggcccagatcagaaacaagccctacaactacgaaacctactacagcgacagcgtgaagggccggttcaccatcagcagggacgacagcaagagcagcgtgtacctccagatgaacaacctgagggtggaagatatgggcatctactactgcaccggcagctactacggcatggactactggggccagggcaccagcgtgaccgtgtctacgcgtgagcagaaactgatctcggaagaggatctggcgaagcccaccacgacgccagcgccgcgaccaccaacaccggcgcccaccatcgcgtcgcagcccctgtccctgcgcccagaggcgtgccggccagcggcggggggcgcagtgcacacgagggggctggacttcgcctgtgacatctacatctgggcgcccttggccgggacttgtggggtccttctcctgtcactggttatcaccctttactgcgggcgcgccagagtgaagttcagcaggagcgcagacgcccccgcgtaccagcagggccagaaccagctctataacgagctgaatctaggacgaagagaggagtacgatgttttggacaagagacgtggccgggaccctgagatggggggaaagccgagaaggaagaaccctcaggaaggcctgtacaatgaactgcagaaagataagatggcggaggcctacagtgagattgggatgaaaggcgagcgccggaggggcaaggggcacgatggcctttaccagggtctcagtacagccaccaaggacacctacgacgcccttcacatgcaggccctgccccctcgctctagaggatctggagcaacaaacttctcactactcaaacaagcaggtgacgtggaggagaatcccgggcctgggatccacatggccacttacgaggttctctgtgaggtggcgcggaaactgggcacggatgacagggaagtggtattgttcctcctaaacgtgttcatacctcaacccacactggcccaattaattggagctcttagagctttaaaggaggagggcaggttaacgtttcccctgttagcggaatgtctgtttcgtgcaggtcgcagagacctcttgcgcgacctgcttcacttagacccgcgttttttagagcgccacctagcgggcacaatgagttatttcagcccttatcagctcactgttctccacgtagacggggagctgtgtgcgagggatattaggtctttgatatttttaagcaaggacactatagggtctcgcagcacaccacagacattcttacactgggtgtactgtatggaaaacttagacctactgggtcccactgacgtggatgccctaatgtcaatgcttagatctttgtcaagagtagacctacagcgccaagtgcaaaccctaatgggccttcacctttccggcccatcacactcccaacactatcgccatacaccactcgagaccgatttctacgactacaaggacgacgatgacaagactagtggctccggcgagggcagaggaagtctactaacctgcggagatgtggaagaaaatcctggcccacatatgaccgagtacaagcccacggtgcgcctcgccacccgcgacgacgtccccagggccgtacgcaccctcgccgccgcgttcgccgactaccccgccacgcgccacaccgtcgatccggaccgccacatcgagcgggtcaccgagctgcaagaactcttcctcacgcgcgtcgggctcgacatcggcaaggtgtgggtcgcggacgacggcgccgcggtggcggtctggaccacgccggagagcgtcgaagcgggggcggtgttcgccgagatcggcccgcgcatggccgagttgagcggttcccggctggccgcgcagcaacagatggaaggcctcctggcgccgcaccggcccaaggagcccgcgtggttcctggccaccgtcggcgtctcgcccgaccaccagggcaagggtctgggcagcgccgtcgtgctccccggagtggaggcggccgagcgcgccggggtgcccgccttcctggagacctccgcgccccgcaacctccccttctacgagcggctcggcttcaccgtcaccgccgacgtcgaggtgcccgaaggaccgcgcacctggtgcatgacccgcaagcccggtgcctga

SEQ ID NO: 1057 - DNA, 2784 bp, Artificial Sequence
  Synthetic Polynucleotides
atggccttaccagtgaccgccttgctcctgccgctggccttgctgctccacgccgccaggccggacgtggtcatgacacagaccccactgagcctgcctgtgtctctgggagatcaggccagcatctcctgtagaagcagccagagcctggtgcacagcaacggcaacacctacctgcggtggtatctccagaagcctggacagagccccaaggtgctgatctacaaggtgtccaacagagtgtccggcgtgcccgatagattttctggcagcggctctggcaccgacttcaccctgaagatcaatagagtggaagccgaggacctgggcgtgtacttctgtagccagagcacccatgtgccttggacctttggcggaggcaccaagctggaaatcaagagcagcgccgacgacgccaagaaggacgccgccaaaaaggatgatgccaagaaagacgatgctaaaaaagacggcggcgtgaagctggacgagacaggcggaggacttgttcaacctggcggagccatgaagctgagctgtgtgaccagcggctttaccttcggccactactggatgaactgggtccgacagtcccctgagaaaggactggaatgggtcgcccagttcagaaacaagccctacaactacgaaacctactacagcgacagcgtgaagggcagattcaccatcagccgggacgacagcaagtccagcgtgtacctccagatgaacaacctgcgcgtggaagataccggcatctactactgtaccggggccagctacggcatggaatatctcggccagggcaccagcgtgaccgtgtctacaacgcgtgagcagaaactgatctcggaagaggatctggcgaagcccaccacgacgccagcgccgcgaccaccaacaccggcgcccaccatcgcgtcgcagcccctgtccctgcgcccagaggcgtgccggccagcggcggggggcgcagtgcacacgagggggctggacttcgcctgtgacatctacatctgggcgcccttggccgggacttgtggggtccttctcctgtcactggttatcaccctttactgcgggcgcgccagagtgaagttcagcaggagcgcagacgcccccgcgtaccagcagggccagaaccagctctataacgagctgaatctaggacgaagagaggagtacgatgttttggacaagagacgtggccgggaccctgagatggggggaaagccgagaaggaagaaccctcaggaaggcctgtacaatgaactgcagaaagataagatggcggaggcctacagtgagattgggatgaaaggcgagcgccggaggggcaaggggcacgatggcctttaccagggtctcagtacagccaccaaggacacctacgacgcccttcacatgcaggccctgccccctcgctctagaggatctggagcaacaaacttctcactactcaaacaagcaggtgacgtggaggagaatcccgggcctgggatccacatggccacttacgaggttctctgtgaggtggcgcggaaactgggcacggatgacagggaagtggtattgttcctcctaaacgtgttcatacctcaacccacactggcccaattaattggagctcttagagctttaaaggaggagggcaggttaacgtttcccctgttagcggaatgtctgtttcgtgcaggtcgcagagacctcttgcgcgacctgcttcacttagacccgcgttttttagagcgccacctagcgggcacaatgagttatttcagcccttatcagctcactgttctccacgtagacggggagctgtgtgcgagggatattaggtctttgatatttttaagcaaggacactatagggtctcgcagcacaccacagacattcttacactgggtgtactgtatggaaaacttagacctactgggtcccactgacgtggatgccctaatgtcaatgcttagatctttgtcaagagtagacctacagcgccaagtgcaaaccctaatgggccttcacctttccggcccatcacactcccaacactatcgccatacaccactcgagaccgatttctacgactacaaggacgacgatgacaagactagtggctccggcgagggcagaggaagtctactaacctgcggagatgtggaagaaaatcctggcccacatatgaccgagtacaagcccacggtgcgcctcgccacccgcgacgacgtccccagggccgtacgcaccctcgccgccgcgttcgccgactaccccgccacgcgccacaccgtcgatccggaccgccacatcgagcgggtcaccgagctgcaagaactcttcctcacgcgcgtcgggctcgacatcggcaaggtgtgggtcgcggacgacggcgccgcggtggcggtctggaccacgccggagagcgtcgaagcgggggcggtgttcgccgagatcggcccgcgcatggccgagttgagcggttcccggctggccgcgcagcaacagatggaaggcctcctggcgccgcaccggcccaaggagcccgcgtggttcctggccaccgtcggcgtctcgcccgaccaccagggcaagggtctgggcagcgccgtcgtgctccccggagtggaggcggccgagcgcgccggggtgcccgccttcctggagacctccgcgccccgcaacctccccttctacgagcggctcggcttcaccgtcaccgccgacgtcgaggtgcccgaaggaccgcgcacctggtgcatgacccgcaagcccggtgcctga

SEQ ID NO: 1058 - DNA, 2772 bp, Artificial Sequence
  Synthetic Polynucleotides
atggccttaccagtgaccgccttgctcctgccgctggccttgctgctccacgccgccaggccgcaggtgcaactggtggaatctggcggcaatctggttcagcctggcggctctctgagactgtcttgtgccgccagcggcttcaccttcggcagcttttctatgagctgggtccgacaagctcctggcggaggacttgaatgggtggcaggactgtctgccagaagcagcctgacacactacgccgactctgtgaagggcagattcaccatcagccgggacaacgccaagaacagcgtgtacctccagatgaacagcctgagagtggaagataccgccgtgtactactgcgccagaagaagctacgacagcagcggctactggggccacttctacagctacatggatgtgtggggccagggcaccctggttacagtttctggcggaggcggaagtggaggcggaggatctggcggcggaggctcttctgtgctgacccagcctagctccgtgtctgctgctcctggacagaaagtgaccatctcctgtagcggcagcaccagcaacatcggcaacaactacgtgtcctggtatcagcagcaccccggcaaggcccctaagctgatgatctacgacgtgtccaagaggcccagcggcgtgccagatagattttccggcagcaagagcggcaacagcgccagcctggatattagcggactccagtctgaggacgaggccgactactattgcgccgcctgggatgatagcctgagcgagtttctgtttggcaccggcaccaagctgacagtgcttggaacgcgtgagcagaaactgatctcggaagaggatctggcgaagcccaccacgacgccagcgccgcgaccaccaacaccggcgcccaccatcgcgtcgcagcccctgtccctgcgcccagaggcgtgccggccagcggcggggggcgcagtgcacacgagggggctggacttcgcctgtgacatctacatctgggcgcccttggccgggacttgtggggtccttctcctgtcactggttatcaccctttactgcgggcgcgccagagtgaagttcagcaggagcgcagacgcccccgcgtaccagcagggccagaaccagctctataacgagctgaatctaggacgaagagaggagtacgatgttttggacaagagacgtggccgggaccctgagatggggggaaagccgagaaggaagaaccctcaggaaggcctgtacaatgaactgcagaaagataagatggcggaggcctacagtgagattgggatgaaaggcgagcgccggaggggcaaggggcacgatggcctttaccagggtctcagtacagccaccaaggacacctacgacgcccttcacatgcaggccctgccccctcgctctagaggatctggagcaacaaacttctcactactcaaacaagcaggtgacgtggaggagaatcccgggcctgggatccacatggccacttacgaggttctctgtgaggtggcgcggaaactgggcacggatgacagggaagtggtattgttcctcctaaacgtgttcatacctcaacccacactggcccaattaattggagctcttagagctttaaaggaggagggcaggttaacgtttcccctgttagcggaatgtctgtttcgtgcaggtcgcagagacctcttgcgcgacctgcttcacttagacccgcgttttttagagcgccacctagcgggcacaatgagttatttcagcccttatcagctcactgttctccacgtagacggggagctgtgtgcgagggatattaggtctttgatatttttaagcaaggacactatagggtctcgcagcacaccacagacattcttacactgggtgtactgtatggaaaacttagacctactgggtcccactgacgtggatgccctaatgtcaatgcttagatctttgtcaagagtagacctacagcgccaagtgcaaaccctaatgggccttcacctttccggcccatcacactcccaacactatcgccatacaccactcgagaccgatttctacgactacaaggacgacgatgacaagactagtggctccggcgagggcagaggaagtctactaacctgcggagatgtggaagaaaatcctggcccacatatgaccgagtacaagcccacggtgcgcctcgccacccgcgacgacgtccccagggccgtacgcaccctcgccgccgcgttcgccgactaccccgccacgcgccacaccgtcgatccggaccgccacatcgagcgggtcaccgagctgcaagaactcttcctcacgcgcgtcgggctcgacatcggcaaggtgtgggtcgcggacgacggcgccgcggtggcggtctggaccacgccggagagcgtcgaagcgggggcggtgttcgccgagatcggcccgcgcatggccgagttgagcggttcccggctggccgcgcagcaacagatggaaggcctcctggcgccgcaccggcccaaggagcccgcgtggttcctggccaccgtcggcgtctcgcccgaccaccagggcaagggtctgggcagcgccgtcgtgctccccggagtggaggcggccgagcgcgccggggtgcccgccttcctggagacctccgcgccccgcaacctccccttctacgagcggctcggcttcaccgtcaccgccgacgtcgaggtgcccgaaggaccgcgcacctggtgcatgacccgcaagcccggtgcctga

SEQ ID NO: 1059 - DNA, 2757 bp, Artificial Sequence
  Synthetic Polynucleotides
atggccttaccagtgaccgccttgctcctgccgctggccttgctgctccacgccgccaggccggacatccagatgacacagagccctagcagcctgtctgccagcgtgggagacagagtgaccatcacctgtagaaccagccagagcctgagcagctacacccactggtatcagcagaagcctggcaaggcccctaagctgctgatctatgccgcttccagcagaggcagcggagtgcctagcagattttctggcagcggctccggcaccgatttcaccctgacaatatccagcctccagcctgaggacttcgccacctactactgccagcagagcagaacattcggccagggcaccaaggtggaaatcaaaggcggaggcggaagtggaggcggaggatctggcggcggaggctctcaagttcagctccagcagtctggccctggcctggttaagcctagccagacactgagcctgacctgtgccatcagcggcgatagcgtgtccagctacaacgccgtgtggaactggatcagacagagcccatccagaggactggaatggctgggcagaacctactacagaagcggctggtacaacgactacgccgagagcgtgaagtcccggatcaccatcaatcccgacaccagcaagaaccagttcagcctgcaactgaacagcgtgacccctgaggataccgccgtgtactactgtgctagaagcggccacatcaccgtgttcggcgtgaacgtggacgccttcgatatgtggggccagggaacaatggtcaccgtgtctagtacgcgtgagcagaaactgatctcggaagaggatctggcgaagcccaccacgacgccagcgccgcgaccaccaacaccggcgcccaccatcgcgtcgcagcccctgtccctgcgcccagaggcgtgccggccagcggcggggggcgcagtgcacacgagggggctggacttcgcctgtgacatctacatctgggcgcccttggccgggacttgtggggtccttctcctgtcactggttatcaccctttactgcgggcgcgccagagtgaagttcagcaggagcgcagacgcccccgcgtaccagcagggccagaaccagctctataacgagctgaatctaggacgaagagaggagtacgatgttttggacaagagacgtggccgggaccctgagatggggggaaagccgagaaggaagaaccctcaggaaggcctgtacaatgaactgcagaaagataagatggcggaggcctacagtgagattgggatgaaaggcgagcgccggaggggcaaggggcacgatggcctttaccagggtctcagtacagccaccaaggacacctacgacgcccttcacatgcaggccctgccccctcgctctagaggatctggagcaacaaacttctcactactcaaacaagcaggtgacgtggaggagaatcccgggcctgggatccacatggccacttacgaggttctctgtgaggtggcgcggaaactgggcacggatgacagggaagtggtattgttcctcctaaacgtgttcatacctcaacccacactggcccaattaattggagctcttagagctttaaaggaggagggcaggttaacgtttcccctgttagcggaatgtctgtttcgtgcaggtcgcagagacctcttgcgcgacctgcttcacttagacccgcgttttttagagcgccacctagcgggcacaatgagttatttcagcccttatcagctcactgttctccacgtagacggggagctgtgtgcgagggatattaggtctttgatatttttaagcaaggacactatagggtctcgcagcacaccacagacattcttacactgggtgtactgtatggaaaacttagacctactgggtcccactgacgtggatgccctaatgtcaatgcttagatctttgtcaagagtagacctacagcgccaagtgcaaaccctaatgggccttcacctttccggcccatcacactcccaacactatcgccatacaccactcgagaccgatttctacgactacaaggacgacgatgacaagactagtggctccggcgagggcagaggaagtctactaacctgcggagatgtggaagaaaatcctggcccacatatgaccgagtacaagcccacggtgcgcctcgccacccgcgacgacgtccccagggccgtacgcaccctcgccgccgcgttcgccgactaccccgccacgcgccacaccgtcgatccggaccgccacatcgagcgggtcaccgagctgcaagaactcttcctcacgcgcgtcgggctcgacatcggcaaggtgtgggtcgcggacgacggcgccgcggtggcggtctggaccacgccggagagcgtcgaagcgggggcggtgttcgccgagatcggcccgcgcatggccgagttgagcggttcccggctggccgcgcagcaacagatggaaggcctcctggcgccgcaccggcccaaggagcccgcgtggttcctggccaccgtcggcgtctcgcccgaccaccagggcaagggtctgggcagcgccgtcgtgctccccggagtggaggcggccgagcgcgccggggtgcccgccttcctggagacctccgcgccccgcaacctccccttctacgagcggctcggcttcaccgtcaccgccgacgtcgaggtgcccgaaggaccgcgcacctggtgcatgacccgcaagcccggtgcctga

SEQ ID NO: 1060 - DNA, 2754 bp, Artificial Sequence
  Synthetic Polynucleotides
atggccttaccagtgaccgccttgctcctgccgctggccttgctgctccacgccgccaggccggacatcgtgctgacccagagccctctgagcctggccgtgtctctgggacagcctgccatcatcagctgcaaggccagccagagcgtgtcctttgccggcacctctctgatgcactggtatcaccagaagcccggccagcagcccagactgctgatctacagagccagcaacctggaagccggcgtgcccgatagattttccggcagcggcagcaagaccgacttcaccctgaccatcagccccgtggaagccgaagatgccgccacctactactgccagcagagcagagagtacccctacaccttcggcggaggcaccaagctggaaatcaagaggggcggaggcggaagtggaggcggaggatctggcggcggaggctctcaggtccaactggtgcagagcggagccgaggtcgtgaagcctggcgcttccgtgaagattagctgcaaagccagcggctacacctttaccggctactttatgaactgggtcaagcagagccctggccagagcctggaatggatcggcagaatccacccctacgacggcgacaccttctacaaccagaagttccagggcaaggccaccctgacagtggacaagagcagcaacaccgcccacatggaactgctgagcctgaccagcgaggacttcgccgtgtactactgcaccagatacgacggcagccgggctatggactattggggccagggcaccaccgtgaccgtgtctagtacgcgtgagcagaaactgatctcggaagaggatctggcgaagcccaccacgacgccagcgccgcgaccaccaacaccggcgcccaccatcgcgtcgcagcccctgtccctgcgcccagaggcgtgccggccagcggcggggggcgcagtgcacacgagggggctggacttcgcctgtgacatctacatctgggcgcccttggccgggacttgtggggtccttctcctgtcactggttatcaccctttactgcgggcgcgccagagtgaagttcagcaggagcgcagacgcccccgcgtaccagcagggccagaaccagctctataacgagctgaatctaggacgaagagaggagtacgatgttttggacaagagacgtggccgggaccctgagatggggggaaagccgagaaggaagaaccctcaggaaggcctgtacaatgaactgcagaaagataagatggcggaggcctacagtgagattgggatgaaaggcgagcgccggaggggcaaggggcacgatggcctttaccagggtctcagtacagccaccaaggacacctacgacgcccttcacatgcaggccctgccccctcgctctagaggatctggagcaacaaacttctcactactcaaacaagcaggtgacgtggaggagaatcccgggcctgggatccacatggccacttacgaggttctctgtgaggtggcgcggaaactgggcacggatgacagggaagtggtattgttcctcctaaacgtgttcatacctcaacccacactggcccaattaattggagctcttagagctttaaaggaggagggcaggttaacgtttcccctgttagcggaatgtctgtttcgtgcaggtcgcagagacctcttgcgcgacctgcttcacttagacccgcgttttttagagcgccacctagcgggcacaatgagttatttcagcccttatcagctcactgttctccacgtagacggggagctgtgtgcgagggatattaggtctttgatatttttaagcaaggacactatagggtctcgcagcacaccacagacattcttacactgggtgtactgtatggaaaacttagacctactgggtcccactgacgtggatgccctaatgtcaatgcttagatctttgtcaagagtagacctacagcgccaagtgcaaaccctaatgggccttcacctttccggcccatcacactcccaacactatcgccatacaccactcgagaccgatttctacgactacaaggacgacgatgacaagactagtggctccggcgagggcagaggaagtctactaacctgcggagatgtggaagaaaatcctggcccacatatgaccgagtacaagcccacggtgcgcctcgccacccgcgacgacgtccccagggccgtacgcaccctcgccgccgcgttcgccgactaccccgccacgcgccacaccgtcgatccggaccgccacatcgagcgggtcaccgagctgcaagaactcttcctcacgcgcgtcgggctcgacatcggcaaggtgtgggtcgcggacgacggcgccgcggtggcggtctggaccacgccggagagcgtcgaagcgggggcggtgttcgccgagatcggcccgcgcatggccgagttgagcggttcccggctggccgcgcagcaacagatggaaggcctcctggcgccgcaccggcccaaggagcccgcgtggttcctggccaccgtcggcgtctcgcccgaccaccagggcaagggtctgggcagcgccgtcgtgctccccggagtggaggcggccgagcgcgccggggtgcccgccttcctggagacctccgcgccccgcaacctccccttctacgagcggctcggcttcaccgtcaccgccgacgtcgaggtgcccgaaggaccgcgcacctggtgcatgacccgcaagcccggtgcctga

SEQ ID NO: 1061 - DNA, 2673 bp, Artificial Sequence
  Synthetic Polynucleotides
atggccttaccagtgaccgccttgctcctgccgctggccttgctgctccacgccgccaggccgaacagctgcgagctgaccaacatcacaatcgccatcgagaaagaggaatgccggttctgcatcagcatcaacaccacttggtgcgccggctactgctacacccgcgatctggtgtataaggaccccgccagacctaagatccagaaaacctgcaccttcaaagagctggtctacgagacagtcagagtgcctggatgtgcccaccacgccgatagcctgtacacataccctgtggctacccagtgccactgcggcaagtgtgatagcgacagcaccgattgcaccgtcagaggactgggacccagctactgtagcttcggcgagatgaaggaaggcggaggcggaagtggaggcggaggatctggcggcggaggctctgctcctgatgtgcaggattgccctgagtgcaccctgcaagagaaccccttcttctcccaacctggcgctcctatcctccagtgcatgggctgctgcttcagccgggcttatcccacacctctgcggagcaagaaaaccatgctggtccagaaaaacgtgaccagcgagagcacctgttgtgtggctaagagctacaacagagtgaccgtgatgggcggcttcaaggtggaaaatcacaccgcctgccactgctccacctgttactaccacaagagcacgcgtgagcagaaactgatctcggaagaggatctggcgaagcccaccacgacgccagcgccgcgaccaccaacaccggcgcccaccatcgcgtcgcagcccctgtccctgcgcccagaggcgtgccggccagcggcggggggcgcagtgcacacgagggggctggacttcgcctgtgacatctacatctgggcgcccttggccgggacttgtggggtccttctcctgtcactggttatcaccctttactgcgggcgcgccagagtgaagttcagcaggagcgcagacgcccccgcgtaccagcagggccagaaccagctctataacgagctgaatctaggacgaagagaggagtacgatgttttggacaagagacgtggccgggaccctgagatggggggaaagccgagaaggaagaaccctcaggaaggcctgtacaatgaactgcagaaagataagatggcggaggcctacagtgagattgggatgaaaggcgagcgccggaggggcaaggggcacgatggcctttaccagggtctcagtacagccaccaaggacacctacgacgcccttcacatgcaggccctgccccctcgctctagaggatctggagcaacaaacttctcactactcaaacaagcaggtgacgtggaggagaatcccgggcctgggatccacatggccacttacgaggttctctgtgaggtggcgcggaaactgggcacggatgacagggaagtggtattgttcctcctaaacgtgttcatacctcaacccacactggcccaattaattggagctcttagagctttaaaggaggagggcaggttaacgtttcccctgttagcggaatgtctgtttcgtgcaggtcgcagagacctcttgcgcgacctgcttcacttagacccgcgttttttagagcgccacctagcgggcacaatgagttatttcagcccttatcagctcactgttctccacgtagacggggagctgtgtgcgagggatattaggtctttgatatttttaagcaaggacactatagggtctcgcagcacaccacagacattcttacactgggtgtactgtatggaaaacttagacctactgggtcccactgacgtggatgccctaatgtcaatgcttagatctttgtcaagagtagacctacagcgccaagtgcaaaccctaatgggccttcacctttccggcccatcacactcccaacactatcgccatacaccactcgagaccgatttctacgactacaaggacgacgatgacaagactagtggctccggcgagggcagaggaagtctactaacctgcggagatgtggaagaaaatcctggcccacatatgaccgagtacaagcccacggtgcgcctcgccacccgcgacgacgtccccagggccgtacgcaccctcgccgccgcgttcgccgactaccccgccacgcgccacaccgtcgatccggaccgccacatcgagcgggtcaccgagctgcaagaactcttcctcacgcgcgtcgggctcgacatcggcaaggtgtgggtcgcggacgacggcgccgcggtggcggtctggaccacgccggagagcgtcgaagcgggggcggtgttcgccgagatcggcccgcgcatggccgagttgagcggttcccggctggccgcgcagcaacagatggaaggcctcctggcgccgcaccggcccaaggagcccgcgtggttcctggccaccgtcggcgtctcgcccgaccaccagggcaagggtctgggcagcgccgtcgtgctccccggagtggaggcggccgagcgcgccggggtgcccgccttcctggagacctccgcgccccgcaacctccccttctacgagcggctcggcttcaccgtcaccgccgacgtcgaggtgcccgaaggaccgcgcacctggtgcatgacccgcaagcccggtgcctga

SEQ ID NO: 1062 - DNA, 2766 bp, Artificial Sequence
  Synthetic Polynucleotides
atggccttaccagtgaccgccttgctcctgccgctggccttgctgctccacgccgccaggccggacctggaaaccaccctgacacagagccctgccaccctgagtgtgtccccaggcgagagagtgaccctgagctgtagagccagccagagcgtgggcagcaacctggcctggtatcagcagaagttcggccaggcccccagactgctgatctacgacgccagcacaagagccaccggcatccccgccagattttctggcagcggctccggcaccgagttcaccctgaccatcagcagactggaacccgaggacttcgccgtgtactactgccaccagtacggcagcagccccagaacctttggacagggcaccaaggtggacatcaagcggggcggaggcggaagtggaggcggaggatctggcggcggaggctctcaggtgcaactggtgcagagcggagccgaagtgaagaaacctggggccagcgtgaaggtgtcctgcaaggccagcggctacacctttaccacctacggcatctcttgggtgcgccaggctcctggacagggactggaatggatgggctggatcagcgcctacaacggccacaccaactacgcccagatgctccagggcagagtgaccatgaccaccgacaccagcacctccaccgcctacatggaactgcggggcctgagaagcgacgacaccgccgtgtattattgcgccagagaagcctacgcctcctacggcagcggcagctactggaccgattattggggccagggcaccctcgtgaccgtgtctagtacgcgtgagcagaaactgatctcggaagaggatctggcgaagcccaccacgacgccagcgccgcgaccaccaacaccggcgcccaccatcgcgtcgcagcccctgtccctgcgcccagaggcgtgccggccagcggcggggggcgcagtgcacacgagggggctggacttcgcctgtgacatctacatctgggcgcccttggccgggacttgtggggtccttctcctgtcactggttatcaccctttactgcgggcgcgccagagtgaagttcagcaggagcgcagacgcccccgcgtaccagcagggccagaaccagctctataacgagctgaatctaggacgaagagaggagtacgatgttttggacaagagacgtggccgggaccctgagatggggggaaagccgagaaggaagaaccctcaggaaggcctgtacaatgaactgcagaaagataagatggcggaggcctacagtgagattgggatgaaaggcgagcgccggaggggcaaggggcacgatggcctttaccagggtctcagtacagccaccaaggacacctacgacgcccttcacatgcaggccctgccccctcgctctagaggatctggagcaacaaacttctcactactcaaacaagcaggtgacgtggaggagaatcccgggcctgggatccacatggccacttacgaggttctctgtgaggtggcgcggaaactgggcacggatgacagggaagtggtattgttcctcctaaacgtgttcatacctcaacccacactggcccaattaattggagctcttagagctttaaaggaggagggcaggttaacgtttcccctgttagcggaatgtctgtttcgtgcaggtcgcagagacctcttgcgcgacctgcttcacttagacccgcgttttttagagcgccacctagcgggcacaatgagttatttcagcccttatcagctcactgttctccacgtagacggggagctgtgtgcgagggatattaggtctttgatatttttaagcaaggacactatagggtctcgcagcacaccacagacattcttacactgggtgtactgtatggaaaacttagacctactgggtcccactgacgtggatgccctaatgtcaatgcttagatctttgtcaagagtagacctacagcgccaagtgcaaaccctaatgggccttcacctttccggcccatcacactcccaacactatcgccatacaccactcgagaccgatttctacgactacaaggacgacgatgacaagactagtggctccggcgagggcagaggaagtctactaacctgcggagatgtggaagaaaatcctggcccacatatgaccgagtacaagcccacggtgcgcctcgccacccgcgacgacgtccccagggccgtacgcaccctcgccgccgcgttcgccgactaccccgccacgcgccacaccgtcgatccggaccgccacatcgagcgggtcaccgagctgcaagaactcttcctcacgcgcgtcgggctcgacatcggcaaggtgtgggtcgcggacgacggcgccgcggtggcggtctggaccacgccggagagcgtcgaagcgggggcggtgttcgccgagatcggcccgcgcatggccgagttgagcggttcccggctggccgcgcagcaacagatggaaggcctcctggcgccgcaccggcccaaggagcccgcgtggttcctggccaccgtcggcgtctcgcccgaccaccagggcaagggtctgggcagcgccgtcgtgctccccggagtggaggcggccgagcgcgccggggtgcccgccttcctggagacctccgcgccccgcaacctccccttctacgagcggctcggcttcaccgtcaccgccgacgtcgaggtgcccgaaggaccgcgcacctggtgcatgacccgcaagcccggtgcctga

SEQ ID NO: 1063 - DNA, 2745 bp, Artificial Sequence
  Synthetic Polynucleotides
atggccttaccagtgaccgccttgctcctgccgctggccttgctgctccacgccgccaggccggacgacgttgtgatgacccagacccccctgagcctgcctgtgacacctggcgaacctgccagcatcagctgtcggagcagccagagcctggtgcacagaaacggcaacacctacctgcactggtatctccagaagcccggccagagccccaagctgctgatccacaaggtgtccaacagattcagcggcgtgcccgacagattctccggcagcggctctggcaccgacttcaccctgaagatcagccgggtggaagccgaggacctgggcgtgtacttctgtagccagagcacccatgtgccccccctgacatttggagccggcaccaagctggaactgaagggcggaggcggaagtggaggcggaggatctggcggcggaggctctgaagtgcagctggtgcagtctggcgctgaggtggaaaagcctggggccagcgtgaagattagctgcaaggccagcggcagcagcttcaccggctacaacatgaactgggtgcgccagaacatcggcaagagcctggaatggatcggagccatcgacccctactacggcggcaccagctacaaccagaagttcaagggcagagccaccctgaccgtggacaagagcaccagcaccgcctacatgcacctgaagtccctgcggagcgaggacaccgccgtgtactactgtgtgtccggcatggaatattggggccagggcaccagcgtgaccgtgtctagtacgcgtgagcagaaactgatctcggaagaggatctggcgaagcccaccacgacgccagcgccgcgaccaccaacaccggcgcccaccatcgcgtcgcagcccctgtccctgcgcccagaggcgtgccggccagcggcggggggcgcagtgcacacgagggggctggacttcgcctgtgacatctacatctgggcgcccttggccgggacttgtggggtccttctcctgtcactggttatcaccctttactgcgggcgcgccagagtgaagttcagcaggagcgcagacgcccccgcgtaccagcagggccagaaccagctctataacgagctgaatctaggacgaagagaggagtacgatgttttggacaagagacgtggccgggaccctgagatggggggaaagccgagaaggaagaaccctcaggaaggcctgtacaatgaactgcagaaagataagatggcggaggcctacagtgagattgggatgaaaggcgagcgccggaggggcaaggggcacgatggcctttaccagggtctcagtacagccaccaaggacacctacgacgcccttcacatgcaggccctgccccctcgctctagaggatctggagcaacaaacttctcactactcaaacaagcaggtgacgtggaggagaatcccgggcctgggatccacatggccacttacgaggttctctgtgaggtggcgcggaaactgggcacggatgacagggaagtggtattgttcctcctaaacgtgttcatacctcaacccacactggcccaattaattggagctcttagagctttaaaggaggagggcaggttaacgtttcccctgttagcggaatgtctgtttcgtgcaggtcgcagagacctcttgcgcgacctgcttcacttagacccgcgttttttagagcgccacctagcgggcacaatgagttatttcagcccttatcagctcactgttctccacgtagacggggagctgtgtgcgagggatattaggtctttgatatttttaagcaaggacactatagggtctcgcagcacaccacagacattcttacactgggtgtactgtatggaaaacttagacctactgggtcccactgacgtggatgccctaatgtcaatgcttagatctttgtcaagagtagacctacagcgccaagtgcaaaccctaatgggccttcacctttccggcccatcacactcccaacactatcgccatacaccactcgagaccgatttctacgactacaaggacgacgatgacaagactagtggctccggcgagggcagaggaagtctactaacctgcggagatgtggaagaaaatcctggcccacatatgaccgagtacaagcccacggtgcgcctcgccacccgcgacgacgtccccagggccgtacgcaccctcgccgccgcgttcgccgactaccccgccacgcgccacaccgtcgatccggaccgccacatcgagcgggtcaccgagctgcaagaactcttcctcacgcgcgtcgggctcgacatcggcaaggtgtgggtcgcggacgacggcgccgcggtggcggtctggaccacgccggagagcgtcgaagcgggggcggtgttcgccgagatcggcccgcgcatggccgagttgagcggttcccggctggccgcgcagcaacagatggaaggcctcctggcgccgcaccggcccaaggagcccgcgtggttcctggccaccgtcggcgtctcgcccgaccaccagggcaagggtctgggcagcgccgtcgtgctccccggagtggaggcggccgagcgcgccggggtgcccgccttcctggagacctccgcgccccgcaacctccccttctacgagcggctcggcttcaccgtcaccgccgacgtcgaggtgcccgaaggaccgcgcacctggtgcatgacccgcaagcccggtgcctga

SEQ ID NO: 1064 - DNA, 2739 bp, Artificial Sequence
  Synthetic Polynucleotides
atggccttaccagtgaccgccttgctcctgccgctggccttgctgctccacgccgccaggccggacgagatcgtgatgacccagacccctgccaccctgtctgtgtctgccggcgagagagtgaccattacctgcaaggccagccagagcgtgtccaacgacgtgacctggtatcagcagaagcccggccaggcccccagactgctgatctacagcgccagcaacagatacagcggcgtgcccgccagattttccggcagcggctacggcaccgagttcaccttcaccatcagcagcgtgcagagcgaggacttcgccgtgtacttctgtcagcaagactacagcagcttcggccagggcaccaagctggaaatcaagaggggcggaggcggaagtggaggcggaggatctggcggcggaggctctcaggtgcagctggtggaatctggacctggcgtggtgcagcctggcagaagcctgagaatcagctgtgccgtgtccggcttcagcgtgaccaactacggcgtgcactgggtgcgccagccacctggaaaaggactggaatggctgggcgtgatctgggctggcggcatcaccaactacaacagcgccttcatgtcccggctgaccatctccaaggacaacagcaagaacaccgtgtacctccagatgaacagcctgcgggccgaggacaccgccatgtactactgtgcttccagaggcggccactacggctacgccctggattattggggccagggaaccctcgtgaccgtgtcctctacgcgtgagcagaaactgatctcggaagaggatctggcgaagcccaccacgacgccagcgccgcgaccaccaacaccggcgcccaccatcgcgtcgcagcccctgtccctgcgcccagaggcgtgccggccagcggcggggggcgcagtgcacacgagggggctggacttcgcctgtgacatctacatctgggcgcccttggccgggacttgtggggtccttctcctgtcactggttatcaccctttactgcgggcgcgccagagtgaagttcagcaggagcgcagacgcccccgcgtaccagcagggccagaaccagctctataacgagctgaatctaggacgaagagaggagtacgatgttttggacaagagacgtggccgggaccctgagatggggggaaagccgagaaggaagaaccctcaggaaggcctgtacaatgaactgcagaaagataagatggcggaggcctacagtgagattgggatgaaaggcgagcgccggaggggcaaggggcacgatggcctttaccagggtctcagtacagccaccaaggacacctacgacgcccttcacatgcaggccctgccccctcgctctagaggatctggagcaacaaacttctcactactcaaacaagcaggtgacgtggaggagaatcccgggcctgggatccacatggccacttacgaggttctctgtgaggtggcgcggaaactgggcacggatgacagggaagtggtattgttcctcctaaacgtgttcatacctcaacccacactggcccaattaattggagctcttagagctttaaaggaggagggcaggttaacgtttcccctgttagcggaatgtctgtttcgtgcaggtcgcagagacctcttgcgcgacctgcttcacttagacccgcgttttttagagcgccacctagcgggcacaatgagttatttcagcccttatcagctcactgttctccacgtagacggggagctgtgtgcgagggatattaggtctttgatatttttaagcaaggacactatagggtctcgcagcacaccacagacattcttacactgggtgtactgtatggaaaacttagacctactgggtcccactgacgtggatgccctaatgtcaatgcttagatctttgtcaagagtagacctacagcgccaagtgcaaaccctaatgggccttcacctttccggcccatcacactcccaacactatcgccatacaccactcgagaccgatttctacgactacaaggacgacgatgacaagactagtggctccggcgagggcagaggaagtctactaacctgcggagatgtggaagaaaatcctggcccacatatgaccgagtacaagcccacggtgcgcctcgccacccgcgacgacgtccccagggccgtacgcaccctcgccgccgcgttcgccgactaccccgccacgcgccacaccgtcgatccggaccgccacatcgagcgggtcaccgagctgcaagaactcttcctcacgcgcgtcgggctcgacatcggcaaggtgtgggtcgcggacgacggcgccgcggtggcggtctggaccacgccggagagcgtcgaagcgggggcggtgttcgccgagatcggcccgcgcatggccgagttgagcggttcccggctggccgcgcagcaacagatggaaggcctcctggcgccgcaccggcccaaggagcccgcgtggttcctggccaccgtcggcgtctcgcccgaccaccagggcaagggtctgggcagcgccgtcgtgctccccggagtggaggcggccgagcgcgccggggtgcccgccttcctggagacctccgcgccccgcaacctccccttctacgagcggctcggcttcaccgtcaccgccgacgtcgaggtgcccgaaggaccgcgcacctggtgcatgacccgcaagcccggtgcctga

SEQ ID NO: 1065 - DNA, 2745 bp, Artificial Sequence
  Synthetic Polynucleotides
atggccttaccagtgaccgccttgctcctgccgctggccttgctgctccacgccgccaggccggacatccagatgacccagaccgccagcagcctgcctgcctctctgggcgacagagtgaccatctcctgtagcgccagccaggacatcagcaactacctgaactggtatcagcagaaacccgacggcaccgtgaagctgctgatcttctacagcagcaacctgcacagcggcgtgcccagcagattttctggcggcggaagcggcaccgactacagcctgaccatcagcaatctggaacccgaggacattgccacctacttttgccaccagtacagcaagctgccctggacctttggcggaggcaccaagctggaaatcaagagaggcggaggcggaagtggaggcggaggatctggcggcggaggctctgaagtgaccctggtggaaagcggcggagacttcgtgaagcctggcggctctctgaaggtgtcctgtgccgccagcggcttcgcctttagccactacgccatgagctgggtgcgccagacccctgccaagagactggaatgggtggcctacatcagcagcggcggctccggcacctactactccgatagcgtgaagggccggttcaccatcagccgggacaacgccaagaacaccctgtacctccagatgcggagcctgcggagcgaggacagcgccatgtatttctgcaccagagtgaagctgggcacctattacttcgactcttggggccagggcaccaccctgaccgtgtcatctacgcgtgagcagaaactgatctcggaagaggatctggcgaagcccaccacgacgccagcgccgcgaccaccaacaccggcgcccaccatcgcgtcgcagcccctgtccctgcgcccagaggcgtgccggccagcggcggggggcgcagtgcacacgagggggctggacttcgcctgtgacatctacatctgggcgcccttggccgggacttgtggggtccttctcctgtcactggttatcaccctttactgcgggcgcgccagagtgaagttcagcaggagcgcagacgcccccgcgtaccagcagggccagaaccagctctataacgagctgaatctaggacgaagagaggagtacgatgttttggacaagagacgtggccgggaccctgagatggggggaaagccgagaaggaagaaccctcaggaaggcctgtacaatgaactgcagaaagataagatggcggaggcctacagtgagattgggatgaaaggcgagcgccggaggggcaaggggcacgatggcctttaccagggtctcagtacagccaccaaggacacctacgacgcccttcacatgcaggccctgccccctcgctctagaggatctggagcaacaaacttctcactactcaaacaagcaggtgacgtggaggagaatcccgggcctgggatccacatggccacttacgaggttctctgtgaggtggcgcggaaactgggcacggatgacagggaagtggtattgttcctcctaaacgtgttcatacctcaacccacactggcccaattaattggagctcttagagctttaaaggaggagggcaggttaacgtttcccctgttagcggaatgtctgtttcgtgcaggtcgcagagacctcttgcgcgacctgcttcacttagacccgcgttttttagagcgccacctagcgggcacaatgagttatttcagcccttatcagctcactgttctccacgtagacggggagctgtgtgcgagggatattaggtctttgatatttttaagcaaggacactatagggtctcgcagcacaccacagacattcttacactgggtgtactgtatggaaaacttagacctactgggtcccactgacgtggatgccctaatgtcaatgcttagatctttgtcaagagtagacctacagcgccaagtgcaaaccctaatgggccttcacctttccggcccatcacactcccaacactatcgccatacaccactcgagaccgatttctacgactacaaggacgacgatgacaagactagtggctccggcgagggcagaggaagtctactaacctgcggagatgtggaagaaaatcctggcccacatatgaccgagtacaagcccacggtgcgcctcgccacccgcgacgacgtccccagggccgtacgcaccctcgccgccgcgttcgccgactaccccgccacgcgccacaccgtcgatccggaccgccacatcgagcgggtcaccgagctgcaagaactcttcctcacgcgcgtcgggctcgacatcggcaaggtgtgggtcgcggacgacggcgccgcggtggcggtctggaccacgccggagagcgtcgaagcgggggcggtgttcgccgagatcggcccgcgcatggccgagttgagcggttcccggctggccgcgcagcaacagatggaaggcctcctggcgccgcaccggcccaaggagcccgcgtggttcctggccaccgtcggcgtctcgcccgaccaccagggcaagggtctgggcagcgccgtcgtgctccccggagtggaggcggccgagcgcgccggggtgcccgccttcctggagacctccgcgccccgcaacctccccttctacgagcggctcggcttcaccgtcaccgccgacgtcgaggtgcccgaaggaccgcgcacctggtgcatgacccgcaagcccggtgcctga

SEQ ID NO: 1066 - DNA, 2751 bp, Artificial Sequence
  Synthetic Polynucleotides
atggccttaccagtgaccgccttgctcctgccgctggccttgctgctccacgccgccaggccgcagttcgtgctgacccagagcccttctgcctctgctgccctgggagcctctgccaagctgacctgtacactgagcagcgcccacaagacctacaccatcgactggtatcagcagcagaagggaaaggcccccagatacctgatccaagtgaagtccgacggcacctacacaaaggccaccggcgtgcccgatagattcagcggcagtagcagcggagccgatagatacctgattatccccagcgtgcaggccgacgacgaggccgattactactgcggcaccgattacaccggcggctacgtgttcggcggaggcacacaactgaccgtgacaggcggaggcggaagtggaggcggaggatctggcggcggaggctctgagcaactgaaagagtctggcggcggactgttcaagcccaccgataccctgaccctgacctgcaccgtgtccggcttcagcctgagctactacggcgtgaactgggtgcgccaggcccctggcaatggcctggaatggatcggcacaatcggcggcagcggcgacacctactatgcctcttgggccaagtccagaagcaccatcatcagaaacaccaacgagaacaccgtgaccctgaagatgaccagcctgacagccgccgacaccgccacctacttttgcgtcagatacgccaacatcggctacgagtatttcaacgtgtggggacccggcaccctcgtgaccgtgtcatctacgcgtgagcagaaactgatctcggaagaggatctggcgaagcccaccacgacgccagcgccgcgaccaccaacaccggcgcccaccatcgcgtcgcagcccctgtccctgcgcccagaggcgtgccggccagcggcggggggcgcagtgcacacgagggggctggacttcgcctgtgacatctacatctgggcgcccttggccgggacttgtggggtccttctcctgtcactggttatcaccctttactgcgggcgcgccagagtgaagttcagcaggagcgcagacgcccccgcgtaccagcagggccagaaccagctctataacgagctgaatctaggacgaagagaggagtacgatgttttggacaagagacgtggccgggaccctgagatggggggaaagccgagaaggaagaaccctcaggaaggcctgtacaatgaactgcagaaagataagatggcggaggcctacagtgagattgggatgaaaggcgagcgccggaggggcaaggggcacgatggcctttaccagggtctcagtacagccaccaaggacacctacgacgcccttcacatgcaggccctgccccctcgctctagaggatctggagcaacaaacttctcactactcaaacaagcaggtgacgtggaggagaatcccgggcctgggatccacatggccacttacgaggttctctgtgaggtggcgcggaaactgggcacggatgacagggaagtggtattgttcctcctaaacgtgttcatacctcaacccacactggcccaattaattggagctcttagagctttaaaggaggagggcaggttaacgtttcccctgttagcggaatgtctgtttcgtgcaggtcgcagagacctcttgcgcgacctgcttcacttagacccgcgttttttagagcgccacctagcgggcacaatgagttatttcagcccttatcagctcactgttctccacgtagacggggagctgtgtgcgagggatattaggtctttgatatttttaagcaaggacactatagggtctcgcagcacaccacagacattcttacactgggtgtactgtatggaaaacttagacctactgggtcccactgacgtggatgccctaatgtcaatgcttagatctttgtcaagagtagacctacagcgccaagtgcaaaccctaatgggccttcacctttccggcccatcacactcccaacactatcgccatacaccactcgagaccgatttctacgactacaaggacgacgatgacaagactagtggctccggcgagggcagaggaagtctactaacctgcggagatgtggaagaaaatcctggcccacatatgaccgagtacaagcccacggtgcgcctcgccacccgcgacgacgtccccagggccgtacgcaccctcgccgccgcgttcgccgactaccccgccacgcgccacaccgtcgatccggaccgccacatcgagcgggtcaccgagctgcaagaactcttcctcacgcgcgtcgggctcgacatcggcaaggtgtgggtcgcggacgacggcgccgcggtggcggtctggaccacgccggagagcgtcgaagcgggggcggtgttcgccgagatcggcccgcgcatggccgagttgagcggttcccggctggccgcgcagcaacagatggaaggcctcctggcgccgcaccggcccaaggagcccgcgtggttcctggccaccgtcggcgtctcgcccgaccaccagggcaagggtctgggcagcgccgtcgtgctccccggagtggaggcggccgagcgcgccggggtgcccgccttcctggagacctccgcgccccgcaacctccccttctacgagcggctcggcttcaccgtcaccgccgacgtcgaggtgcccgaaggaccgcgcacctggtgcatgacccgcaagcccggtgcctga

SEQ ID NO: 1067 - DNA, 2766 bp, Artificial Sequence
  Synthetic Polynucleotides
atggccttaccagtgaccgccttgctcctgccgctggccttgctgctccacgccgccaggccgcagttcgtgctgacccagagcccttctgtgtctgccgccctgggagcctctgccaagctgacctgtacactgagcagcgcccacaagacctacaccatcgactggtatcagcagcagcagggcgaggcccccagatacctgatgcaagtgaagtccgacggcagctacaccaagggcaccggcgtgcccgatagattcagcggcagtagcagcggagccgatagatacctgattatccccagcgtgcaggccgacgacgaggccggatatgtgtgcggcgctgacgacaatggcggctacgtgttcggcggaggcacccaactgacagtgacaggcggaggcggaagtggaggcggaggatctggcggcggaggctctcagagcgtgaaagagtctgagggcggcctgttcaagcccaccgataccctgaccctgacctgcaccgtgtccggcttcagcctgagcagacacgccctgacatgggtgcgccaggcccctggaaatggcctggaatggatcggagccatcgacaacgccggcaccacctactatgcctcttgggccaagtccagaagcaccatcacccggaacaccgacctgcacaccgtgaccctgaagatgaccagcctgaccgccagcgacaccgccacctacttttgcgccagagtgttctacgacatcaacagcggctactacctggacggcatggacctgtggggacctggcacacttgtgaccgtgtccagcacgcgtgagcagaaactgatctcggaagaggatctggcgaagcccaccacgacgccagcgccgcgaccaccaacaccggcgcccaccatcgcgtcgcagcccctgtccctgcgcccagaggcgtgccggccagcggcggggggcgcagtgcacacgagggggctggacttcgcctgtgacatctacatctgggcgcccttggccgggacttgtggggtccttctcctgtcactggttatcaccctttactgcgggcgcgccagagtgaagttcagcaggagcgcagacgcccccgcgtaccagcagggccagaaccagctctataacgagctgaatctaggacgaagagaggagtacgatgttttggacaagagacgtggccgggaccctgagatggggggaaagccgagaaggaagaaccctcaggaaggcctgtacaatgaactgcagaaagataagatggcggaggcctacagtgagattgggatgaaaggcgagcgccggaggggcaaggggcacgatggcctttaccagggtctcagtacagccaccaaggacacctacgacgcccttcacatgcaggccctgccccctcgctctagaggatctggagcaacaaacttctcactactcaaacaagcaggtgacgtggaggagaatcccgggcctgggatccacatggccacttacgaggttctctgtgaggtggcgcggaaactgggcacggatgacagggaagtggtattgttcctcctaaacgtgttcatacctcaacccacactggcccaattaattggagctcttagagctttaaaggaggagggcaggttaacgtttcccctgttagcggaatgtctgtttcgtgcaggtcgcagagacctcttgcgcgacctgcttcacttagacccgcgttttttagagcgccacctagcgggcacaatgagttatttcagcccttatcagctcactgttctccacgtagacggggagctgtgtgcgagggatattaggtctttgatatttttaagcaaggacactatagggtctcgcagcacaccacagacattcttacactgggtgtactgtatggaaaacttagacctactgggtcccactgacgtggatgccctaatgtcaatgcttagatctttgtcaagagtagacctacagcgccaagtgcaaaccctaatgggccttcacctttccggcccatcacactcccaacactatcgccatacaccactcgagaccgatttctacgactacaaggacgacgatgacaagactagtggctccggcgagggcagaggaagtctactaacctgcggagatgtggaagaaaatcctggcccacatatgaccgagtacaagcccacggtgcgcctcgccacccgcgacgacgtccccagggccgtacgcaccctcgccgccgcgttcgccgactaccccgccacgcgccacaccgtcgatccggaccgccacatcgagcgggtcaccgagctgcaagaactcttcctcacgcgcgtcgggctcgacatcggcaaggtgtgggtcgcggacgacggcgccgcggtggcggtctggaccacgccggagagcgtcgaagcgggggcggtgttcgccgagatcggcccgcgcatggccgagttgagcggttcccggctggccgcgcagcaacagatggaaggcctcctggcgccgcaccggcccaaggagcccgcgtggttcctggccaccgtcggcgtctcgcccgaccaccagggcaagggtctgggcagcgccgtcgtgctccccggagtggaggcggccgagcgcgccggggtgcccgccttcctggagacctccgcgccccgcaacctccccttctacgagcggctcggcttcaccgtcaccgccgacgtcgaggtgcccgaaggaccgcgcacctggtgcatgacccgcaagcccggtgcctga

SEQ ID NO: 1068 - DNA, 2748 bp, Artificial Sequence
  Synthetic Polynucleotides
atggccttaccagtgaccgccttgctcctgccgctggccttgctgctccacgccgccaggccggacatccagatgacccagagccccagcagcctgtctgccagcgtgggcgacagagtgaccatcacctgtagagccagccagggcatcagctcttggctggcctggtatcagcagaagcccgagaaggcccccaagagcctgatctacgccgcctctagtctccagagcggcgtgcccagcagattttctggcagcggctccggcaccgacttcaccctgacaatcagctccctccagcccgaggacttcgccacctactactgccagcagtacaacagctacccccccacctttggcggaggcaccaaggtggaaatcaagggcggaggcggaagtggaggcggaggatctggcggcggaggctctgaagtgcaactggtggaatcaggcggcggactggtgcagcctggcgagtctctgagactgagctgtgtggcctccggcttcaccttcagccggtacaagatgaactgggtgcgccaggcccctggcaagggactggaatgggtgtcctacatcagccgcagcggcagagacatctactacgccgacagcgtgaagggccggttcaccatcagcagagacaacgccaagaacagcctgtacctccagatgaactccctgcgggacgaggacaccgccgtgtactactgtgccggaaccgtgaccacctattactacttcggcatggacgtgtggggccacggcaccaccgtgacagtgtcatctacgcgtgagcagaaactgatctcggaagaggatctggcgaagcccaccacgacgccagcgccgcgaccaccaacaccggcgcccaccatcgcgtcgcagcccctgtccctgcgcccagaggcgtgccggccagcggcggggggcgcagtgcacacgagggggctggacttcgcctgtgacatctacatctgggcgcccttggccgggacttgtggggtccttctcctgtcactggttatcaccctttactgcgggcgcgccagagtgaagttcagcaggagcgcagacgcccccgcgtaccagcagggccagaaccagctctataacgagctgaatctaggacgaagagaggagtacgatgttttggacaagagacgtggccgggaccctgagatggggggaaagccgagaaggaagaaccctcaggaaggcctgtacaatgaactgcagaaagataagatggcggaggcctacagtgagattgggatgaaaggcgagcgccggaggggcaaggggcacgatggcctttaccagggtctcagtacagccaccaaggacacctacgacgcccttcacatgcaggccctgccccctcgctctagaggatctggagcaacaaacttctcactactcaaacaagcaggtgacgtggaggagaatcccgggcctgggatccacatggccacttacgaggttctctgtgaggtggcgcggaaactgggcacggatgacagggaagtggtattgttcctcctaaacgtgttcatacctcaacccacactggcccaattaattggagctcttagagctttaaaggaggagggcaggttaacgtttcccctgttagcggaatgtctgtttcgtgcaggtcgcagagacctcttgcgcgacctgcttcacttagacccgcgttttttagagcgccacctagcgggcacaatgagttatttcagcccttatcagctcactgttctccacgtagacggggagctgtgtgcgagggatattaggtctttgatatttttaagcaaggacactatagggtctcgcagcacaccacagacattcttacactgggtgtactgtatggaaaacttagacctactgggtcccactgacgtggatgccctaatgtcaatgcttagatctttgtcaagagtagacctacagcgccaagtgcaaaccctaatgggccttcacctttccggcccatcacactcccaacactatcgccatacaccactcgagaccgatttctacgactacaaggacgacgatgacaagactagtggctccggcgagggcagaggaagtctactaacctgcggagatgtggaagaaaatcctggcccacatatgaccgagtacaagcccacggtgcgcctcgccacccgcgacgacgtccccagggccgtacgcaccctcgccgccgcgttcgccgactaccccgccacgcgccacaccgtcgatccggaccgccacatcgagcgggtcaccgagctgcaagaactcttcctcacgcgcgtcgggctcgacatcggcaaggtgtgggtcgcggacgacggcgccgcggtggcggtctggaccacgccggagagcgtcgaagcgggggcggtgttcgccgagatcggcccgcgcatggccgagttgagcggttcccggctggccgcgcagcaacagatggaaggcctcctggcgccgcaccggcccaaggagcccgcgtggttcctggccaccgtcggcgtctcgcccgaccaccagggcaagggtctgggcagcgccgtcgtgctccccggagtggaggcggccgagcgcgccggggtgcccgccttcctggagacctccgcgccccgcaacctccccttctacgagcggctcggcttcaccgtcaccgccgacgtcgaggtgcccgaaggaccgcgcacctggtgcatgacccgcaagcccggtgcctga

SEQ ID NO: 1069 - DNA, 2751 bp, Artificial Sequence
  Synthetic Polynucleotides
atggccttaccagtgaccgccttgctcctgccgctggccttgctgctccacgccgccaggccggacatccagatgacccagagccccagcagcctgtctgccagcgtgggcgacagagtgaccatcacctgtagagccagccagggcatcagctcttggctggcctggtatcagcagaagcccgagaaggcccccaagagcctgatctacgccgcctctagtctccagagcggcgtgcccagcagattttctggcagcggctccggcaccgacttcaccctgacaatcagctccctccagcccgaggacttcgccacctactactgccagcagtacaacagctaccctcccacctttggcggaggcaccaaggtggaaatcaagggcggaggcggaagtggaggcggaggatctggcggcggaggctctgaagtgcaactggtggaatccgggggaggctctgtgcagcctggcgagtctctgagactgagctgtgtggcctccggcttcaccttcagccggtacaagatgaactgggtgcgccaggcccctggcaagggactggaatgggtgtcctacatcagccgcagcggcagagacatctactacgccgacagcgtgaagggccggttcaccatcagcagagacaacgccaagaacagcctgtacctccagatgaactccctgcgggacgaggacaccgccgtgtactactgtgccggaaccgtgaccacctattactacgacttcggcatggacgtgtggggccagggcacaaccgtgacagtgtctagcacgcgtgagcagaaactgatctcggaagaggatctggcgaagcccaccacgacgccagcgccgcgaccaccaacaccggcgcccaccatcgcgtcgcagcccctgtccctgcgcccagaggcgtgccggccagcggcggggggcgcagtgcacacgagggggctggacttcgcctgtgacatctacatctgggcgcccttggccgggacttgtggggtccttctcctgtcactggttatcaccctttactgcgggcgcgccagagtgaagttcagcaggagcgcagacgcccccgcgtaccagcagggccagaaccagctctataacgagctgaatctaggacgaagagaggagtacgatgttttggacaagagacgtggccgggaccctgagatggggggaaagccgagaaggaagaaccctcaggaaggcctgtacaatgaactgcagaaagataagatggcggaggcctacagtgagattgggatgaaaggcgagcgccggaggggcaaggggcacgatggcctttaccagggtctcagtacagccaccaaggacacctacgacgcccttcacatgcaggccctgccccctcgctctagaggatctggagcaacaaacttctcactactcaaacaagcaggtgacgtggaggagaatcccgggcctgggatccacatggccacttacgaggttctctgtgaggtggcgcggaaactgggcacggatgacagggaagtggtattgttcctcctaaacgtgttcatacctcaacccacactggcccaattaattggagctcttagagctttaaaggaggagggcaggttaacgtttcccctgttagcggaatgtctgtttcgtgcaggtcgcagagacctcttgcgcgacctgcttcacttagacccgcgttttttagagcgccacctagcgggcacaatgagttatttcagcccttatcagctcactgttctccacgtagacggggagctgtgtgcgagggatattaggtctttgatatttttaagcaaggacactatagggtctcgcagcacaccacagacattcttacactgggtgtactgtatggaaaacttagacctactgggtcccactgacgtggatgccctaatgtcaatgcttagatctttgtcaagagtagacctacagcgccaagtgcaaaccctaatgggccttcacctttccggcccatcacactcccaacactatcgccatacaccactcgagaccgatttctacgactacaaggacgacgatgacaagactagtggctccggcgagggcagaggaagtctactaacctgcggagatgtggaagaaaatcctggcccacatatgaccgagtacaagcccacggtgcgcctcgccacccgcgacgacgtccccagggccgtacgcaccctcgccgccgcgttcgccgactaccccgccacgcgccacaccgtcgatccggaccgccacatcgagcgggtcaccgagctgcaagaactcttcctcacgcgcgtcgggctcgacatcggcaaggtgtgggtcgcggacgacggcgccgcggtggcggtctggaccacgccggagagcgtcgaagcgggggcggtgttcgccgagatcggcccgcgcatggccgagttgagcggttcccggctggccgcgcagcaacagatggaaggcctcctggcgccgcaccggcccaaggagcccgcgtggttcctggccaccgtcggcgtctcgcccgaccaccagggcaagggtctgggcagcgccgtcgtgctccccggagtggaggcggccgagcgcgccggggtgcccgccttcctggagacctccgcgccccgcaacctccccttctacgagcggctcggcttcaccgtcaccgccgacgtcgaggtgcccgaaggaccgcgcacctggtgcatgacccgcaagcccggtgcctga

SEQ ID NO: 1070 - DNA, 2748 bp, Artificial Sequence
  Synthetic Polynucleotides
atggccttaccagtgaccgccttgctcctgccgctggccttgctgctccacgccgccaggccgcagtctgtgctgacacagcctccatctgcctctggcacacctggacagagagtgaccatcagctgtagcggcagcagaagcaacgtcggcggcaactacgtgttctggtatcagcaggtcccaggcgctacccctaagctgctgatctacagaagcaatcagcggcctagcggcgtgcccgatagatttgccggaagcaagagcggcagctctgccagccttgccatctctggactgagaagcgaggacgaggccgactactactgtgccacctgggatgatagcctgagcggcttcgtgtttggcaccggcaccaaagtgacagtgcttggtggcggaggcggaagtggaggcggaggatctggcggcggaggctctgaagttcagctggttgaatctggcggcggactggttaagcctggcggatctctgagactgtcttgtgccgccagcggcttcaccttcagcgattactacatgagctggatcagacaggcccctggcaaaggactggaatgggtgtcctacatcagcagcagcggctccaccatctactacgccgatagcgtgaagggcagattcaccatcagccgggacaacgccaagaacagcctgtacctccagatgaactccctgagagccgaggacaccgccgtgtactattgcgccagaggctacggcaaagcctacgatcaatggggccagggcacactggtcaccgtttcttctacgcgtgagcagaaactgatctcggaagaggatctggcgaagcccaccacgacgccagcgccgcgaccaccaacaccggcgcccaccatcgcgtcgcagcccctgtccctgcgcccagaggcgtgccggccagcggcggggggcgcagtgcacacgagggggctggacttcgcctgtgacatctacatctgggcgcccttggccgggacttgtggggtccttctcctgtcactggttatcaccctttactgcgggcgcgccagagtgaagttcagcaggagcgcagacgcccccgcgtaccagcagggccagaaccagctctataacgagctgaatctaggacgaagagaggagtacgatgttttggacaagagacgtggccgggaccctgagatggggggaaagccgagaaggaagaaccctcaggaaggcctgtacaatgaactgcagaaagataagatggcggaggcctacagtgagattgggatgaaaggcgagcgccggaggggcaaggggcacgatggcctttaccagggtctcagtacagccaccaaggacacctacgacgcccttcacatgcaggccctgccccctcgctctagaggatctggagcaacaaacttctcactactcaaacaagcaggtgacgtggaggagaatcccgggcctgggatccacatggccacttacgaggttctctgtgaggtggcgcggaaactgggcacggatgacagggaagtggtattgttcctcctaaacgtgttcatacctcaacccacactggcccaattaattggagctcttagagctttaaaggaggagggcaggttaacgtttcccctgttagcggaatgtctgtttcgtgcaggtcgcagagacctcttgcgcgacctgcttcacttagacccgcgttttttagagcgccacctagcgggcacaatgagttatttcagcccttatcagctcactgttctccacgtagacggggagctgtgtgcgagggatattaggtctttgatatttttaagcaaggacactatagggtctcgcagcacaccacagacattcttacactgggtgtactgtatggaaaacttagacctactgggtcccactgacgtggatgccctaatgtcaatgcttagatctttgtcaagagtagacctacagcgccaagtgcaaaccctaatgggccttcacctttccggcccatcacactcccaacactatcgccatacaccactcgagaccgatttctacgactacaaggacgacgatgacaagactagtggctccggcgagggcagaggaagtctactaacctgcggagatgtggaagaaaatcctggcccacatatgaccgagtacaagcccacggtgcgcctcgccacccgcgacgacgtccccagggccgtacgcaccctcgccgccgcgttcgccgactaccccgccacgcgccacaccgtcgatccggaccgccacatcgagcgggtcaccgagctgcaagaactcttcctcacgcgcgtcgggctcgacatcggcaaggtgtgggtcgcggacgacggcgccgcggtggcggtctggaccacgccggagagcgtcgaagcgggggcggtgttcgccgagatcggcccgcgcatggccgagttgagcggttcccggctggccgcgcagcaacagatggaaggcctcctggcgccgcaccggcccaaggagcccgcgtggttcctggccaccgtcggcgtctcgcccgaccaccagggcaagggtctgggcagcgccgtcgtgctccccggagtggaggcggccgagcgcgccggggtgcccgccttcctggagacctccgcgccccgcaacctccccttctacgagcggctcggcttcaccgtcaccgccgacgtcgaggtgcccgaaggaccgcgcacctggtgcatgacccgcaagcccggtgcctga

SEQ ID NO: 1071 - DNA, 2745 bp, Artificial Sequence
  Synthetic Polynucleotides
atggccttaccagtgaccgccttgctcctgccgctggccttgctgctccacgccgccaggccgcagtctgtggtcacacagccacctagcatgtctgccgctccaggccagcaagtgaccatctcttgtagcggcggcaacagcaacatcgagcggaactacgtgtcctggtatctgcaactgcctggcacagcccctaagctggtcatcttcgacaacgacagacggcccagcggcatccccgatagattttctggcagcaagagcggcaccagcgccacactgggaattaccggacttcagacaggcgacgaggccgactactactgtggcacatgggactctagcctgagaggctgggttttcggcggaggcacaaagctgacagtgcttggtggcggaggcggaagtggaggcggaggatctggcggcggaggctctgaagtgcagctcgttgagtctggcggcggactgattcaacctggcggaagcctgagactgagctgtgccgcttccggcttcaccttcagcaactacgccatgaactgggttcgacaggcccctggcaaaggactggaatgggtgtccaccatcaacggcagaggcagcagcaccatctacgccgattctgtgaagggcagattcaccatcagccgggacaacagcaagaacaccctgtacctccagatgaactccctgagagccgaggacaccgccacctattactgtgcccggtacatcagcagaggactgggcgattcttggggccagggcacactggttacagtgacgcgtgagcagaaactgatctcggaagaggatctggcgaagcccaccacgacgccagcgccgcgaccaccaacaccggcgcccaccatcgcgtcgcagcccctgtccctgcgcccagaggcgtgccggccagcggcggggggcgcagtgcacacgagggggctggacttcgcctgtgacatctacatctgggcgcccttggccgggacttgtggggtccttctcctgtcactggttatcaccctttactgcgggcgcgccagagtgaagttcagcaggagcgcagacgcccccgcgtaccagcagggccagaaccagctctataacgagctgaatctaggacgaagagaggagtacgatgttttggacaagagacgtggccgggaccctgagatggggggaaagccgagaaggaagaaccctcaggaaggcctgtacaatgaactgcagaaagataagatggcggaggcctacagtgagattgggatgaaaggcgagcgccggaggggcaaggggcacgatggcctttaccagggtctcagtacagccaccaaggacacctacgacgcccttcacatgcaggccctgccccctcgctctagaggatctggagcaacaaacttctcactactcaaacaagcaggtgacgtggaggagaatcccgggcctgggatccacatggccacttacgaggttctctgtgaggtggcgcggaaactgggcacggatgacagggaagtggtattgttcctcctaaacgtgttcatacctcaacccacactggcccaattaattggagctcttagagctttaaaggaggagggcaggttaacgtttcccctgttagcggaatgtctgtttcgtgcaggtcgcagagacctcttgcgcgacctgcttcacttagacccgcgttttttagagcgccacctagcgggcacaatgagttatttcagcccttatcagctcactgttctccacgtagacggggagctgtgtgcgagggatattaggtctttgatatttttaagcaaggacactatagggtctcgcagcacaccacagacattcttacactgggtgtactgtatggaaaacttagacctactgggtcccactgacgtggatgccctaatgtcaatgcttagatctttgtcaagagtagacctacagcgccaagtgcaaaccctaatgggccttcacctttccggcccatcacactcccaacactatcgccatacaccactcgagaccgatttctacgactacaaggacgacgatgacaagactagtggctccggcgagggcagaggaagtctactaacctgcggagatgtggaagaaaatcctggcccacatatgaccgagtacaagcccacggtgcgcctcgccacccgcgacgacgtccccagggccgtacgcaccctcgccgccgcgttcgccgactaccccgccacgcgccacaccgtcgatccggaccgccacatcgagcgggtcaccgagctgcaagaactcttcctcacgcgcgtcgggctcgacatcggcaaggtgtgggtcgcggacgacggcgccgcggtggcggtctggaccacgccggagagcgtcgaagcgggggcggtgttcgccgagatcggcccgcgcatggccgagttgagcggttcccggctggccgcgcagcaacagatggaaggcctcctggcgccgcaccggcccaaggagcccgcgtggttcctggccaccgtcggcgtctcgcccgaccaccagggcaagggtctgggcagcgccgtcgtgctccccggagtggaggcggccgagcgcgccggggtgcccgccttcctggagacctccgcgccccgcaacctccccttctacgagcggctcggcttcaccgtcaccgccgacgtcgaggtgcccgaaggaccgcgcacctggtgcatgacccgcaagcccggtgcctga

SEQ ID NO: 1072 - DNA, 2745 bp, Artificial Sequence
  Synthetic Polynucleotides
atggccttaccagtgaccgccttgctcctgccgctggccttgctgctccacgccgccaggccgcagtctgtggtcacacagcctccatctgtgtctggcgctccaggccagagagtgaccatctcttgtaccggcagcagcagcaatatcggagccggctatgacgtgcactggtatcagcagctccctggcacagcccctaaactgctgatctacggcaacagcaacagacccagcggcgtgcccgatagattttccggctctaagagcggcacaagcgccagcctggctattactggactccaggccgaggacgaggccgactactactgtcagagctacgacagcagcctgagcggcagctatgtgtttggcaccggcaccaagctgacagtgcttggaggcggaggcggaagtggaggcggaggatctggcggcggaggctctgaagttcaactggtggaaaccggcggcaacctggttcaacctggcgcttctctgagactgagctgtgccgccagcggctttagctttagcggaacagccatgcactgggtccgacaggcacctggcaaaggactggaatgggtgtccaccatcagcagcacaggcagaagcacctactaccgggacagcgtgaagggcagattcaccatctccagagacaacagcaagaacaccctgtacctccagatgaacagcctgagaggcgaggacaccgccgtgtactattgtgccagagtgtccttcgactactggggccagggaaccctggtcacagtctcttctacgcgtgagcagaaactgatctcggaagaggatctggcgaagcccaccacgacgccagcgccgcgaccaccaacaccggcgcccaccatcgcgtcgcagcccctgtccctgcgcccagaggcgtgccggccagcggcggggggcgcagtgcacacgagggggctggacttcgcctgtgacatctacatctgggcgcccttggccgggacttgtggggtccttctcctgtcactggttatcaccctttactgcgggcgcgccagagtgaagttcagcaggagcgcagacgcccccgcgtaccagcagggccagaaccagctctataacgagctgaatctaggacgaagagaggagtacgatgttttggacaagagacgtggccgggaccctgagatggggggaaagccgagaaggaagaaccctcaggaaggcctgtacaatgaactgcagaaagataagatggcggaggcctacagtgagattgggatgaaaggcgagcgccggaggggcaaggggcacgatggcctttaccagggtctcagtacagccaccaaggacacctacgacgcccttcacatgcaggccctgccccctcgctctagaggatctggagcaacaaacttctcactactcaaacaagcaggtgacgtggaggagaatcccgggcctgggatccacatggccacttacgaggttctctgtgaggtggcgcggaaactgggcacggatgacagggaagtggtattgttcctcctaaacgtgttcatacctcaacccacactggcccaattaattggagctcttagagctttaaaggaggagggcaggttaacgtttcccctgttagcggaatgtctgtttcgtgcaggtcgcagagacctcttgcgcgacctgcttcacttagacccgcgttttttagagcgccacctagcgggcacaatgagttatttcagcccttatcagctcactgttctccacgtagacggggagctgtgtgcgagggatattaggtctttgatatttttaagcaaggacactatagggtctcgcagcacaccacagacattcttacactgggtgtactgtatggaaaacttagacctactgggtcccactgacgtggatgccctaatgtcaatgcttagatctttgtcaagagtagacctacagcgccaagtgcaaaccctaatgggccttcacctttccggcccatcacactcccaacactatcgccatacaccactcgagaccgatttctacgactacaaggacgacgatgacaagactagtggctccggcgagggcagaggaagtctactaacctgcggagatgtggaagaaaatcctggcccacatatgaccgagtacaagcccacggtgcgcctcgccacccgcgacgacgtccccagggccgtacgcaccctcgccgccgcgttcgccgactaccccgccacgcgccacaccgtcgatccggaccgccacatcgagcgggtcaccgagctgcaagaactcttcctcacgcgcgtcgggctcgacatcggcaaggtgtgggtcgcggacgacggcgccgcggtggcggtctggaccacgccggagagcgtcgaagcgggggcggtgttcgccgagatcggcccgcgcatggccgagttgagcggttcccggctggccgcgcagcaacagatggaaggcctcctggcgccgcaccggcccaaggagcccgcgtggttcctggccaccgtcggcgtctcgcccgaccaccagggcaagggtctgggcagcgccgtcgtgctccccggagtggaggcggccgagcgcgccggggtgcccgccttcctggagacctccgcgccccgcaacctccccttctacgagcggctcggcttcaccgtcaccgccgacgtcgaggtgcccgaaggaccgcgcacctggtgcatgacccgcaagcccggtgcctga

SEQ ID NO: 1073 - DNA, 2751 bp, Artificial Sequence
  Synthetic Polynucleotides
atggccttaccagtgaccgccttgctcctgccgctggccttgctgctccacgccgccaggccgcagtctgtggttacacagcctgcctccgtgtctggctctcctggccagagcatcaccatcagctgtaccggcaccagctctgatgtcggcggctacaattacgtgtcctggtatcagcagcaccccggcaaggcccctaagctgatgatctacgacgtgtccaagaggcccagcggcgtgtccaatagattcagcggcagcaagagcggcaacaccgccagcctgacaatttctggactgcaagccgaggacgaggccgactactactgtagcagctacaccagcagcagcacactggtgtttggcggaggcaccaagctgacagttcttggaggcggaggcggaagtggaggcggaggatctggcggcggaggctctgaagttcagctggttgaaagcggcggagcctttgttcagcctggcggatctctgagactgagctgtgccgccagcggcttcacattttccagctacgccatgacctgggtccgacaggctcctggcaaaggactggaatgggtgtccaccatctccggcagaggcagaagcaccttctacgccgatagcgtgaagggcagattcacaatcagccgggacaacagcaagaacaccctgtacctccagatgaacagcctgagagccgaggataccgccgtgtactactgtgcccggtactatcacgctggcgcctttgatctttggggccagggaacactggtcaccgtgtcatctacgcgtgagcagaaactgatctcggaagaggatctggcgaagcccaccacgacgccagcgccgcgaccaccaacaccggcgcccaccatcgcgtcgcagcccctgtccctgcgcccagaggcgtgccggccagcggcggggggcgcagtgcacacgagggggctggacttcgcctgtgacatctacatctgggcgcccttggccgggacttgtggggtccttctcctgtcactggttatcaccctttactgcgggcgcgccagagtgaagttcagcaggagcgcagacgcccccgcgtaccagcagggccagaaccagctctataacgagctgaatctaggacgaagagaggagtacgatgttttggacaagagacgtggccgggaccctgagatggggggaaagccgagaaggaagaaccctcaggaaggcctgtacaatgaactgcagaaagataagatggcggaggcctacagtgagattgggatgaaaggcgagcgccggaggggcaaggggcacgatggcctttaccagggtctcagtacagccaccaaggacacctacgacgcccttcacatgcaggccctgccccctcgctctagaggatctggagcaacaaacttctcactactcaaacaagcaggtgacgtggaggagaatcccgggcctgggatccacatggccacttacgaggttctctgtgaggtggcgcggaaactgggcacggatgacagggaagtggtattgttcctcctaaacgtgttcatacctcaacccacactggcccaattaattggagctcttagagctttaaaggaggagggcaggttaacgtttcccctgttagcggaatgtctgtttcgtgcaggtcgcagagacctcttgcgcgacctgcttcacttagacccgcgttttttagagcgccacctagcgggcacaatgagttatttcagcccttatcagctcactgttctccacgtagacggggagctgtgtgcgagggatattaggtctttgatatttttaagcaaggacactatagggtctcgcagcacaccacagacattcttacactgggtgtactgtatggaaaacttagacctactgggtcccactgacgtggatgccctaatgtcaatgcttagatctttgtcaagagtagacctacagcgccaagtgcaaaccctaatgggccttcacctttccggcccatcacactcccaacactatcgccatacaccactcgagaccgatttctacgactacaaggacgacgatgacaagactagtggctccggcgagggcagaggaagtctactaacctgcggagatgtggaagaaaatcctggcccacatatgaccgagtacaagcccacggtgcgcctcgccacccgcgacgacgtccccagggccgtacgcaccctcgccgccgcgttcgccgactaccccgccacgcgccacaccgtcgatccggaccgccacatcgagcgggtcaccgagctgcaagaactcttcctcacgcgcgtcgggctcgacatcggcaaggtgtgggtcgcggacgacggcgccgcggtggcggtctggaccacgccggagagcgtcgaagcgggggcggtgttcgccgagatcggcccgcgcatggccgagttgagcggttcccggctggccgcgcagcaacagatggaaggcctcctggcgccgcaccggcccaaggagcccgcgtggttcctggccaccgtcggcgtctcgcccgaccaccagggcaagggtctgggcagcgccgtcgtgctccccggagtggaggcggccgagcgcgccggggtgcccgccttcctggagacctccgcgccccgcaacctccccttctacgagcggctcggcttcaccgtcaccgccgacgtcgaggtgcccgaaggaccgcgcacctggtgcatgacccgcaagcccggtgcctga

SEQ ID NO: 1074 - DNA, 2745 bp, Artificial Sequence
  Synthetic Polynucleotides
atggccttaccagtgaccgccttgctcctgccgctggccttgctgctccacgccgccaggccggacaacatcgagctgacccagagccccgccatcatgagtgcctctccaggcgagcgcgtgaccatgacatgtagcgccagcagcagcatccggtacatctactggtatcagcagaagcccggcagcagccccagactgctgatctacgacaccagcaacgtggcccctggcgtgccctttagattttccggcagcggctccggcaccagctacagcctgaccatcaaccggatggaagccgaggacgccgccacctactattgtcaggaatggagcggctacccctacaccttcggcggaggcaccaagctggacatcaagagaggcggaggcggaagtggaggcggaggatctggcggcggaggctctcaagtgaagctccaggaatctggcggcggactcgtgaagcctggcggctctctgaagctgagctgtgccgccagcggcttcaccttcagcagctacggcatgagctgggtgcgccagacccccgacaagagactggaatgggtggcaaccatcagcagcggcggcagctacacctactaccccgatagcgtgaagggccggttcaccatctccagagacaacgccaagaacaccctgtacctccagatgagcagcctgaagtccgaggataccgccatgtactactgcgccagaggcaactgggagggctggtacttcgatgtgtggggccagggcaccaccgtgaccgtgtcatctacgcgtgagcagaaactgatctcggaagaggatctggcgaagcccaccacgacgccagcgccgcgaccaccaacaccggcgcccaccatcgcgtcgcagcccctgtccctgcgcccagaggcgtgccggccagcggcggggggcgcagtgcacacgagggggctggacttcgcctgtgacatctacatctgggcgcccttggccgggacttgtggggtccttctcctgtcactggttatcaccctttactgcgggcgcgccagagtgaagttcagcaggagcgcagacgcccccgcgtaccagcagggccagaaccagctctataacgagctgaatctaggacgaagagaggagtacgatgttttggacaagagacgtggccgggaccctgagatggggggaaagccgagaaggaagaaccctcaggaaggcctgtacaatgaactgcagaaagataagatggcggaggcctacagtgagattgggatgaaaggcgagcgccggaggggcaaggggcacgatggcctttaccagggtctcagtacagccaccaaggacacctacgacgcccttcacatgcaggccctgccccctcgctctagaggatctggagcaacaaacttctcactactcaaacaagcaggtgacgtggaggagaatcccgggcctgggatccacatggccacttacgaggttctctgtgaggtggcgcggaaactgggcacggatgacagggaagtggtattgttcctcctaaacgtgttcatacctcaacccacactggcccaattaattggagctcttagagctttaaaggaggagggcaggttaacgtttcccctgttagcggaatgtctgtttcgtgcaggtcgcagagacctcttgcgcgacctgcttcacttagacccgcgttttttagagcgccacctagcgggcacaatgagttatttcagcccttatcagctcactgttctccacgtagacggggagctgtgtgcgagggatattaggtctttgatatttttaagcaaggacactatagggtctcgcagcacaccacagacattcttacactgggtgtactgtatggaaaacttagacctactgggtcccactgacgtggatgccctaatgtcaatgcttagatctttgtcaagagtagacctacagcgccaagtgcaaaccctaatgggccttcacctttccggcccatcacactcccaacactatcgccatacaccactcgagaccgatttctacgactacaaggacgacgatgacaagactagtggctccggcgagggcagaggaagtctactaacctgcggagatgtggaagaaaatcctggcccacatatgaccgagtacaagcccacggtgcgcctcgccacccgcgacgacgtccccagggccgtacgcaccctcgccgccgcgttcgccgactaccccgccacgcgccacaccgtcgatccggaccgccacatcgagcgggtcaccgagctgcaagaactcttcctcacgcgcgtcgggctcgacatcggcaaggtgtgggtcgcggacgacggcgccgcggtggcggtctggaccacgccggagagcgtcgaagcgggggcggtgttcgccgagatcggcccgcgcatggccgagttgagcggttcccggctggccgcgcagcaacagatggaaggcctcctggcgccgcaccggcccaaggagcccgcgtggttcctggccaccgtcggcgtctcgcccgaccaccagggcaagggtctgggcagcgccgtcgtgctccccggagtggaggcggccgagcgcgccggggtgcccgccttcctggagacctccgcgccccgcaacctccccttctacgagcggctcggcttcaccgtcaccgccgacgtcgaggtgcccgaaggaccgcgcacctggtgcatgacccgcaagcccggtgcctga

SEQ ID NO: 1075 - DNA, 2775 bp, Artificial Sequence
  Synthetic Polynucleotides
atggccttaccagtgaccgccttgctcctgccgctggccttgctgctccacgccgccaggccggacaacttcatgctgacccagccccacagcgtgtccgagagccctggcaagaccgtgaccatctcctgtaccggcagcggcggcagcatcgacaacaactacgtgcactggtatcagcagaggcccggcagcgcccctaccaccgtgatgttcgaggacaaccagaggcccagcggcgtgcccgatagattcagcggctctatcgacagcagcagcaacagcgccagcctcgtgatctccggcctgaaaaccgaggacgagggcgactactactgccagagcagcgacggctccaaggtggtgtttggcggaggcaccaagctgaccgtgctgggacagggcggaggcggaagtggaggcggaggatctggcggcggaggctctgaagtgcaactggtgcagagcggcggaggctctctgacactgtcttgtgctgcctccggcgtggtgcagcctggcagattcaccttcagcagctacggaatgcactgggtgcgccaggcccctggaaagggactggaatgggtgtccgtgatctcttacgacggcagcaacaagtattacgccgacagcgtgaagggccggttcaccatctccagagacaacagcaagaacaccctgtacctccagatgaacagcctgcggaccgaggacaccgccgtgtactactgtgccaagaccctgtccgctggcgagtggattggaggcggagccttcgatatctggggccacggcacaatggtcaccgtgtcctctacgcgtgagcagaaactgatctcggaagaggatctggcgaagcccaccacgacgccagcgccgcgaccaccaacaccggcgcccaccatcgcgtcgcagcccctgtccctgcgcccagaggcgtgccggccagcggcggggggcgcagtgcacacgagggggctggacttcgcctgtgacatctacatctgggcgcccttggccgggacttgtggggtccttctcctgtcactggttatcaccctttactgcgggcgcgccagagtgaagttcagcaggagcgcagacgcccccgcgtaccagcagggccagaaccagctctataacgagctgaatctaggacgaagagaggagtacgatgttttggacaagagacgtggccgggaccctgagatggggggaaagccgagaaggaagaaccctcaggaaggcctgtacaatgaactgcagaaagataagatggcggaggcctacagtgagattgggatgaaaggcgagcgccggaggggcaaggggcacgatggcctttaccagggtctcagtacagccaccaaggacacctacgacgcccttcacatgcaggccctgccccctcgctctagaggatctggagcaacaaacttctcactactcaaacaagcaggtgacgtggaggagaatcccgggcctgggatccacatggccacttacgaggttctctgtgaggtggcgcggaaactgggcacggatgacagggaagtggtattgttcctcctaaacgtgttcatacctcaacccacactggcccaattaattggagctcttagagctttaaaggaggagggcaggttaacgtttcccctgttagcggaatgtctgtttcgtgcaggtcgcagagacctcttgcgcgacctgcttcacttagacccgcgttttttagagcgccacctagcgggcacaatgagttatttcagcccttatcagctcactgttctccacgtagacggggagctgtgtgcgagggatattaggtctttgatatttttaagcaaggacactatagggtctcgcagcacaccacagacattcttacactgggtgtactgtatggaaaacttagacctactgggtcccactgacgtggatgccctaatgtcaatgcttagatctttgtcaagagtagacctacagcgccaagtgcaaaccctaatgggccttcacctttccggcccatcacactcccaacactatcgccatacaccactcgagaccgatttctacgactacaaggacgacgatgacaagactagtggctccggcgagggcagaggaagtctactaacctgcggagatgtggaagaaaatcctggcccacatatgaccgagtacaagcccacggtgcgcctcgccacccgcgacgacgtccccagggccgtacgcaccctcgccgccgcgttcgccgactaccccgccacgcgccacaccgtcgatccggaccgccacatcgagcgggtcaccgagctgcaagaactcttcctcacgcgcgtcgggctcgacatcggcaaggtgtgggtcgcggacgacggcgccgcggtggcggtctggaccacgccggagagcgtcgaagcgggggcggtgttcgccgagatcggcccgcgcatggccgagttgagcggttcccggctggccgcgcagcaacagatggaaggcctcctggcgccgcaccggcccaaggagcccgcgtggttcctggccaccgtcggcgtctcgcccgaccaccagggcaagggtctgggcagcgccgtcgtgctccccggagtggaggcggccgagcgcgccggggtgcccgccttcctggagacctccgcgccccgcaacctccccttctacgagcggctcggcttcaccgtcaccgccgacgtcgaggtgcccgaaggaccgcgcacctggtgcatgacccgcaagcccggtgcctga

SEQ ID NO: 1076 - DNA, 2745 bp, Artificial Sequence
  Synthetic Polynucleotides
atggccttaccagtgaccgccttgctcctgccgctggccttgctgctccacgccgccaggccggacgtcgtgatgacccagacccctctgagcctgcctgtgtccctgggcgatcaggccagcatcagctgtagaagcagccagagcctggtgcacagcaacggcaacacctacctgcactggtatctccagaagcccggccagagccccaagctgctgatctacaaggtgtccaacagattcagcggcgtgcccgacagattctccggcagcggctctggcaccgacttcaccctgaagatcagccgggtggaagccgaggacctgggcgtgtacttctgtagccagaacacccccgtgccccccaagtttggcagcggcaccaagctggaaatcaagggcggaggcggaagtggaggcggaggatctggcggcggaggctctcaggtgcagctccagcagtctggcgctgaactcgtgcggcctggcgcttctgtgaagctgtcttgcaaggccagcggctacaccttcaacgactacgagatgcactgggtcaagcagacccctgtgcacggcctgaagtggatcggagccctggaacccaagaccggcgataccgcctacagccagaagttcaagggcaaggccaccctgaccgccgacaagagcagcagcacagcctacatggaactgcggagcctgaccagcgaggacagcgccgtgtactactgcaccagctgctactactacacctacagcggccagggcaccctcgtgacagtgtctgctacgcgtgagcagaaactgatctcggaagaggatctggcgaagcccaccacgacgccagcgccgcgaccaccaacaccggcgcccaccatcgcgtcgcagcccctgtccctgcgcccagaggcgtgccggccagcggcggggggcgcagtgcacacgagggggctggacttcgcctgtgacatctacatctgggcgcccttggccgggacttgtggggtccttctcctgtcactggttatcaccctttactgcgggcgcgccagagtgaagttcagcaggagcgcagacgcccccgcgtaccagcagggccagaaccagctctataacgagctgaatctaggacgaagagaggagtacgatgttttggacaagagacgtggccgggaccctgagatggggggaaagccgagaaggaagaaccctcaggaaggcctgtacaatgaactgcagaaagataagatggcggaggcctacagtgagattgggatgaaaggcgagcgccggaggggcaaggggcacgatggcctttaccagggtctcagtacagccaccaaggacacctacgacgcccttcacatgcaggccctgccccctcgctctagaggatctggagcaacaaacttctcactactcaaacaagcaggtgacgtggaggagaatcccgggcctgggatccacatggccacttacgaggttctctgtgaggtggcgcggaaactgggcacggatgacagggaagtggtattgttcctcctaaacgtgttcatacctcaacccacactggcccaattaattggagctcttagagctttaaaggaggagggcaggttaacgtttcccctgttagcggaatgtctgtttcgtgcaggtcgcagagacctcttgcgcgacctgcttcacttagacccgcgttttttagagcgccacctagcgggcacaatgagttatttcagcccttatcagctcactgttctccacgtagacggggagctgtgtgcgagggatattaggtctttgatatttttaagcaaggacactatagggtctcgcagcacaccacagacattcttacactgggtgtactgtatggaaaacttagacctactgggtcccactgacgtggatgccctaatgtcaatgcttagatctttgtcaagagtagacctacagcgccaagtgcaaaccctaatgggccttcacctttccggcccatcacactcccaacactatcgccatacaccactcgagaccgatttctacgactacaaggacgacgatgacaagactagtggctccggcgagggcagaggaagtctactaacctgcggagatgtggaagaaaatcctggcccacatatgaccgagtacaagcccacggtgcgcctcgccacccgcgacgacgtccccagggccgtacgcaccctcgccgccgcgttcgccgactaccccgccacgcgccacaccgtcgatccggaccgccacatcgagcgggtcaccgagctgcaagaactcttcctcacgcgcgtcgggctcgacatcggcaaggtgtgggtcgcggacgacggcgccgcggtggcggtctggaccacgccggagagcgtcgaagcgggggcggtgttcgccgagatcggcccgcgcatggccgagttgagcggttcccggctggccgcgcagcaacagatggaaggcctcctggcgccgcaccggcccaaggagcccgcgtggttcctggccaccgtcggcgtctcgcccgaccaccagggcaagggtctgggcagcgccgtcgtgctccccggagtggaggcggccgagcgcgccggggtgcccgccttcctggagacctccgcgccccgcaacctccccttctacgagcggctcggcttcaccgtcaccgccgacgtcgaggtgcccgaaggaccgcgcacctggtgcatgacccgcaagcccggtgcctga

SEQ ID NO: 1077 - DNA, 2742 bp, Artificial Sequence
  Synthetic Polynucleotides
atggccttaccagtgaccgccttgctcctgccgctggccttgctgctccacgccgccaggccggacatccaactgacccagagccccagcagcctgtctgcctctgtgggcgacagagtgaccatcacctgtagagccagccagggcatcagaaacgacctgggctggtatcagcagaagcccggcaaggcccccaagcggctgatctatgctgccagctccctccagaatggcgtgcccagcagattttccggcagcggctctggcaccgagttcaccctgaccatcagctccctccagcccgaggacttcgccacctactactgcctccagcacaacacctaccccgccttcggccagggcaccaaggtggaaatcaagagaggcggaggcggaagtggaggcggaggatctggcggcggaggctctcaggtgcaactccaggaatctggccctggcctcgtgaagcctagccagaccctgagcctgacctgtaccgtgtctggcggcagcatcagcagcttcaactactactggtcctggatcagacaccaccctggcaagggcctggaatggatcggctacatctactacagcggcagcacctacagcaaccccagcctgaagtcccgcgtgaccatctccgtggacaccagcaagaaccagtttagcctgaccctgtccagcgtgacagccgccgataccgccgtgtactactgcgccagaggctacaactggaactacttcgactactggggccagggaaccctcgtgaccgtgtctagtacgcgtgagcagaaactgatctcggaagaggatctggcgaagcccaccacgacgccagcgccgcgaccaccaacaccggcgcccaccatcgcgtcgcagcccctgtccctgcgcccagaggcgtgccggccagcggcggggggcgcagtgcacacgagggggctggacttcgcctgtgacatctacatctgggcgcccttggccgggacttgtggggtccttctcctgtcactggttatcaccctttactgcgggcgcgccagagtgaagttcagcaggagcgcagacgcccccgcgtaccagcagggccagaaccagctctataacgagctgaatctaggacgaagagaggagtacgatgttttggacaagagacgtggccgggaccctgagatggggggaaagccgagaaggaagaaccctcaggaaggcctgtacaatgaactgcagaaagataagatggcggaggcctacagtgagattgggatgaaaggcgagcgccggaggggcaaggggcacgatggcctttaccagggtctcagtacagccaccaaggacacctacgacgcccttcacatgcaggccctgccccctcgctctagaggatctggagcaacaaacttctcactactcaaacaagcaggtgacgtggaggagaatcccgggcctgggatccacatggccacttacgaggttctctgtgaggtggcgcggaaactgggcacggatgacagggaagtggtattgttcctcctaaacgtgttcatacctcaacccacactggcccaattaattggagctcttagagctttaaaggaggagggcaggttaacgtttcccctgttagcggaatgtctgtttcgtgcaggtcgcagagacctcttgcgcgacctgcttcacttagacccgcgttttttagagcgccacctagcgggcacaatgagttatttcagcccttatcagctcactgttctccacgtagacggggagctgtgtgcgagggatattaggtctttgatatttttaagcaaggacactatagggtctcgcagcacaccacagacattcttacactgggtgtactgtatggaaaacttagacctactgggtcccactgacgtggatgccctaatgtcaatgcttagatctttgtcaagagtagacctacagcgccaagtgcaaaccctaatgggccttcacctttccggcccatcacactcccaacactatcgccatacaccactcgagaccgatttctacgactacaaggacgacgatgacaagactagtggctccggcgagggcagaggaagtctactaacctgcggagatgtggaagaaaatcctggcccacatatgaccgagtacaagcccacggtgcgcctcgccacccgcgacgacgtccccagggccgtacgcaccctcgccgccgcgttcgccgactaccccgccacgcgccacaccgtcgatccggaccgccacatcgagcgggtcaccgagctgcaagaactcttcctcacgcgcgtcgggctcgacatcggcaaggtgtgggtcgcggacgacggcgccgcggtggcggtctggaccacgccggagagcgtcgaagcgggggcggtgttcgccgagatcggcccgcgcatggccgagttgagcggttcccggctggccgcgcagcaacagatggaaggcctcctggcgccgcaccggcccaaggagcccgcgtggttcctggccaccgtcggcgtctcgcccgaccaccagggcaagggtctgggcagcgccgtcgtgctccccggagtggaggcggccgagcgcgccggggtgcccgccttcctggagacctccgcgccccgcaacctccccttctacgagcggctcggcttcaccgtcaccgccgacgtcgaggtgcccgaaggaccgcgcacctggtgcatgacccgcaagcccggtgcctga

SEQ ID NO: 1078 - DNA, 2748 bp, Artificial Sequence
  Synthetic Polynucleotides
atggccttaccagtgaccgccttgctcctgccgctggccttgctgctccacgccgccaggccggacgacatcgtgctgacccagagccccgccagcctggccgtgagcctgggccagagcgtgaccatcagctgcagagccagcgagagcgtggagtactacggcaccagcctgatgcagtggtaccagcagaagcccggccagccccccaagctgctgatctacgccaccagcaacgtggagagcggcgtgcccgccagattcagcggcagcggcagcggcaccgacttcagcctgaacatccaccccgtggaggaggacgacatcgccatgtacttctgccagcagagcagaaagctgcccagcaccttcggcggcggcaccaagctggagatcaagggcggaggcggaagtggaggcggaggatctggcggcggaggctctgacgtgagactgcaggagagcggccccggccaggtgaagcccagccagaccgtgagcctgacctgcagcgtgaccggctacagcatcaccaacggcaaccactggtggaactggatcagacaggtgagcggcagcaagctggagtggatcggctacatcagcagcagcggcagcaccgacagcaaccccagcctgaagagcagaatcagcatcaccagagacaccagcaagaaccagctgttcctgcagctgaacagcgtgaccaccgaggacatcgccacctactactgcgccagaggctactacttcgactactggggccagggcaccaccctgaccgtgagcagcacgcgtgagcagaaactgatctcggaagaggatctggcgaagcccaccacgacgccagcgccgcgaccaccaacaccggcgcccaccatcgcgtcgcagcccctgtccctgcgcccagaggcgtgccggccagcggcggggggcgcagtgcacacgagggggctggacttcgcctgtgacatctacatctgggcgcccttggccgggacttgtggggtccttctcctgtcactggttatcaccctttactgcgggcgcgccagagtgaagttcagcaggagcgcagacgcccccgcgtaccagcagggccagaaccagctctataacgagctgaatctaggacgaagagaggagtacgatgttttggacaagagacgtggccgggaccctgagatggggggaaagccgagaaggaagaaccctcaggaaggcctgtacaatgaactgcagaaagataagatggcggaggcctacagtgagattgggatgaaaggcgagcgccggaggggcaaggggcacgatggcctttaccagggtctcagtacagccaccaaggacacctacgacgcccttcacatgcaggccctgccccctcgctctagaggatctggagcaacaaacttctcactactcaaacaagcaggtgacgtggaggagaatcccgggcctgggatccacatggccacttacgaggttctctgtgaggtggcgcggaaactgggcacggatgacagggaagtggtattgttcctcctaaacgtgttcatacctcaacccacactggcccaattaattggagctcttagagctttaaaggaggagggcaggttaacgtttcccctgttagcggaatgtctgtttcgtgcaggtcgcagagacctcttgcgcgacctgcttcacttagacccgcgttttttagagcgccacctagcgggcacaatgagttatttcagcccttatcagctcactgttctccacgtagacggggagctgtgtgcgagggatattaggtctttgatatttttaagcaaggacactatagggtctcgcagcacaccacagacattcttacactgggtgtactgtatggaaaacttagacctactgggtcccactgacgtggatgccctaatgtcaatgcttagatctttgtcaagagtagacctacagcgccaagtgcaaaccctaatgggccttcacctttccggcccatcacactcccaacactatcgccatacaccactcgagaccgatttctacgactacaaggacgacgatgacaagactagtggctccggcgagggcagaggaagtctactaacctgcggagatgtggaagaaaatcctggcccacatatgaccgagtacaagcccacggtgcgcctcgccacccgcgacgacgtccccagggccgtacgcaccctcgccgccgcgttcgccgactaccccgccacgcgccacaccgtcgatccggaccgccacatcgagcgggtcaccgagctgcaagaactcttcctcacgcgcgtcgggctcgacatcggcaaggtgtgggtcgcggacgacggcgccgcggtggcggtctggaccacgccggagagcgtcgaagcgggggcggtgttcgccgagatcggcccgcgcatggccgagttgagcggttcccggctggccgcgcagcaacagatggaaggcctcctggcgccgcaccggcccaaggagcccgcgtggttcctggccaccgtcggcgtctcgcccgaccaccagggcaagggtctgggcagcgccgtcgtgctccccggagtggaggcggccgagcgcgccggggtgcccgccttcctggagacctccgcgccccgcaacctccccttctacgagcggctcggcttcaccgtcaccgccgacgtcgaggtgcccgaaggaccgcgcacctggtgcatgacccgcaagcccggtgcctga

SEQ ID NO: 1079 - DNA, 2382 bp, Artificial Sequence
  Synthetic Polynucleotides
atggccctgcccgtgacagccctgctgctgcctctggctctgctgctgcacgccgccagacccgatgaattcgaggtgcaactggtggaaagcggcggaggcctggtgcaggctggcggatctctgagactgagctgtgccgccagcggcatcaccttcagcatcaacacaatgggctggtacagacaggcccctggcaagcagagggaactggtggccctgatctccagcatcggcgacacctactacgccgacagcgtgaagggccggttcaccatcagccgggacaacgccaagaacaccgtgtacctccagatgaacagcctgaagcccgaggacaccgccgtgtactactgcaagcggttcagaacagccgcccagggcaccgattattggggccagggaacacaagtgaccgtgtcctctacgcgtgagcagaaactgatctcggaagaggatctggcgaagcccaccacgacgccagcgccgcgaccaccaacaccggcgcccaccatcgcgtcgcagcccctgtccctgcgcccagaggcgtgccggccagcggcggggggcgcagtgcacacgagggggctggacttcgcctgtgacatctacatctgggcgcccttggccgggacttgtggggtccttctcctgtcactggttatcaccctttactgcgggcgcgccagagtgaagttcagcaggagcgcagacgcccccgcgtaccagcagggccagaaccagctctataacgagctgaatctaggacgaagagaggagtacgatgttttggacaagagacgtggccgggaccctgagatggggggaaagccgagaaggaagaaccctcaggaaggcctgtacaatgaactgcagaaagataagatggcggaggcctacagtgagattgggatgaaaggcgagcgccggaggggcaaggggcacgatggcctttaccagggtctcagtacagccaccaaggacacctacgacgcccttcacatgcaggccctgccccctcgctctagaggatctggagcaacaaacttctcactactcaaacaagcaggtgacgtggaggagaatcccgggcctgggatccacatggccacttacgaggttctctgtgaggtggcgcggaaactgggcacggatgacagggaagtggtattgttcctcctaaacgtgttcatacctcaacccacactggcccaattaattggagctcttagagctttaaaggaggagggcaggttaacgtttcccctgttagcggaatgtctgtttcgtgcaggtcgcagagacctcttgcgcgacctgcttcacttagacccgcgttttttagagcgccacctagcgggcacaatgagttatttcagcccttatcagctcactgttctccacgtagacggggagctgtgtgcgagggatattaggtctttgatatttttaagcaaggacactatagggtctcgcagcacaccacagacattcttacactgggtgtactgtatggaaaacttagacctactgggtcccactgacgtggatgccctaatgtcaatgcttagatctttgtcaagagtagacctacagcgccaagtgcaaaccctaatgggccttcacctttccggcccatcacactcccaacactatcgccatacaccactcgagaccgatttctacgactacaaggacgacgatgacaagactagtggctccggcgagggcagaggaagtctactaacctgcggagatgtggaagaaaatcctggcccacatatgaccgagtacaagcccacggtgcgcctcgccacccgcgacgacgtccccagggccgtacgcaccctcgccgccgcgttcgccgactaccccgccacgcgccacaccgtcgatccggaccgccacatcgagcgggtcaccgagctgcaagaactcttcctcacgcgcgtcgggctcgacatcggcaaggtgtgggtcgcggacgacggcgccgcggtggcggtctggaccacgccggagagcgtcgaagcgggggcggtgttcgccgagatcggcccgcgcatggccgagttgagcggttcccggctggccgcgcagcaacagatggaaggcctcctggcgccgcaccggcccaaggagcccgcgtggttcctggccaccgtcggcgtctcgcccgaccaccagggcaagggtctgggcagcgccgtcgtgctccccggagtggaggcggccgagcgcgccggggtgcccgccttcctggagacctccgcgccccgcaacctccccttctacgagcggctcggcttcaccgtcaccgccgacgtcgaggtgcccgaaggaccgcgcacctggtgcatgacccgcaagcccggtgcctga

SEQ ID NO: 1080 - DNA, 2187 bp, Artificial Sequence
  Synthetic Polynucleotides
atggactggatttggcgcatccttttccttgtcggcgctgctaccggcgcccattccttcgaaggcagcggattcgaatacgccaaagagatgcggaacgcctactgggagatcgccctgctgcccaatctgaccaaccagcagaagagagcccccatcagaaagctgtacgacgacccctcccagagcagcgagctgctgtctgaggctaaaaaactgaacgatagccagacgcgtgagcagaaactgatctcggaagaggatctggcgaagcccaccacgacgccagcgccgcgaccaccaacaccggcgcccaccatcgcgtcgcagcccctgtccctgcgcccagaggcgtgccggccagcggcggggggcgcagtgcacacgagggggctggacttcgcctgtgacatctacatctgggcgcccttggccgggacttgtggggtccttctcctgtcactggttatcaccctttactgcgggcgcgccagagtgaagttcagcaggagcgcagacgcccccgcgtaccagcagggccagaaccagctctataacgagctgaatctaggacgaagagaggagtacgatgttttggacaagagacgtggccgggaccctgagatggggggaaagccgagaaggaagaaccctcaggaaggcctgtacaatgaactgcagaaagataagatggcggaggcctacagtgagattgggatgaaaggcgagcgccggaggggcaaggggcacgatggcctttaccagggtctcagtacagccaccaaggacacctacgacgcccttcacatgcaggccctgccccctcgctctagaggatctggagcaacaaacttctcactactcaaacaagcaggtgacgtggaggagaatcccgggcctgggatccacatggccacttacgaggttctctgtgaggtggcgcggaaactgggcacggatgacagggaagtggtattgttcctcctaaacgtgttcatacctcaacccacactggcccaattaattggagctcttagagctttaaaggaggagggcaggttaacgtttcccctgttagcggaatgtctgtttcgtgcaggtcgcagagacctcttgcgcgacctgcttcacttagacccgcgttttttagagcgccacctagcgggcacaatgagttatttcagcccttatcagctcactgttctccacgtagacggggagctgtgtgcgagggatattaggtctttgatatttttaagcaaggacactatagggtctcgcagcacaccacagacattcttacactgggtgtactgtatggaaaacttagacctactgggtcccactgacgtggatgccctaatgtcaatgcttagatctttgtcaagagtagacctacagcgccaagtgcaaaccctaatgggccttcacctttccggcccatcacactcccaacactatcgccatacaccactcgagaccgatttctacgactacaaggacgacgatgacaagactagtggctccggcgagggcagaggaagtctactaacctgcggagatgtggaagaaaatcctggcccacatatgaccgagtacaagcccacggtgcgcctcgccacccgcgacgacgtccccagggccgtacgcaccctcgccgccgcgttcgccgactaccccgccacgcgccacaccgtcgatccggaccgccacatcgagcgggtcaccgagctgcaagaactcttcctcacgcgcgtcgggctcgacatcggcaaggtgtgggtcgcggacgacggcgccgcggtggcggtctggaccacgccggagagcgtcgaagcgggggcggtgttcgccgagatcggcccgcgcatggccgagttgagcggttcccggctggccgcgcagcaacagatggaaggcctcctggcgccgcaccggcccaaggagcccgcgtggttcctggccaccgtcggcgtctcgcccgaccaccagggcaagggtctgggcagcgccgtcgtgctccccggagtggaggcggccgagcgcgccggggtgcccgccttcctggagacctccgcgccccgcaacctccccttctacgagcggctcggcttcaccgtcaccgccgacgtcgaggtgcccgaaggaccgcgcacctggtgcatgacccgcaagcccggtgcctga

SEQ ID NO: 1081 - DNA, 2400 bp, Artificial Sequence
  Synthetic Polynucleotides
atggccctgcccgtgacagccctgctgctgcctctggctctgctgctgcacgccgccagacccgatgaattcggctctgacctgggcatcaagctgctgttcgccgctgccaagggccaggacgacgaagtgcggattctgctggctgctggggccgacgtgaacgccaaggatttcgagggctacacccccctgcacgtggccgcctatgatggacacctggaaatcgtggaagtgctgctgaaggctggcgctgatgtgaatgccaaagacagccagggccggacccctctgcatgaagccgcctacagcggccatctggaaattgtggaagtgctgctgaaagccggggcagacgtgaacgctcaggacgacgctggcgagacaccagccgatctggctgcagcttggggccacgaagatatcgccgaggtgctgcagaagacgcgtgagcagaaactgatctcggaagaggatctggcgaagcccaccacgacgccagcgccgcgaccaccaacaccggcgcccaccatcgcgtcgcagcccctgtccctgcgcccagaggcgtgccggccagcggcggggggcgcagtgcacacgagggggctggacttcgcctgtgacatctacatctgggcgcccttggccgggacttgtggggtccttctcctgtcactggttatcaccctttactgcgggcgcgccagagtgaagttcagcaggagcgcagacgcccccgcgtaccagcagggccagaaccagctctataacgagctgaatctaggacgaagagaggagtacgatgttttggacaagagacgtggccgggaccctgagatggggggaaagccgagaaggaagaaccctcaggaaggcctgtacaatgaactgcagaaagataagatggcggaggcctacagtgagattgggatgaaaggcgagcgccggaggggcaaggggcacgatggcctttaccagggtctcagtacagccaccaaggacacctacgacgcccttcacatgcaggccctgccccctcgctctagaggatctggagcaacaaacttctcactactcaaacaagcaggtgacgtggaggagaatcccgggcctgggatccacatggccacttacgaggttctctgtgaggtggcgcggaaactgggcacggatgacagggaagtggtattgttcctcctaaacgtgttcatacctcaacccacactggcccaattaattggagctcttagagctttaaaggaggagggcaggttaacgtttcccctgttagcggaatgtctgtttcgtgcaggtcgcagagacctcttgcgcgacctgcttcacttagacccgcgttttttagagcgccacctagcgggcacaatgagttatttcagcccttatcagctcactgttctccacgtagacggggagctgtgtgcgagggatattaggtctttgatatttttaagcaaggacactatagggtctcgcagcacaccacagacattcttacactgggtgtactgtatggaaaacttagacctactgggtcccactgacgtggatgccctaatgtcaatgcttagatctttgtcaagagtagacctacagcgccaagtgcaaaccctaatgggccttcacctttccggcccatcacactcccaacactatcgccatacaccactcgagaccgatttctacgactacaaggacgacgatgacaagactagtggctccggcgagggcagaggaagtctactaacctgcggagatgtggaagaaaatcctggcccacatatgaccgagtacaagcccacggtgcgcctcgccacccgcgacgacgtccccagggccgtacgcaccctcgccgccgcgttcgccgactaccccgccacgcgccacaccgtcgatccggaccgccacatcgagcgggtcaccgagctgcaagaactcttcctcacgcgcgtcgggctcgacatcggcaaggtgtgggtcgcggacgacggcgccgcggtggcggtctggaccacgccggagagcgtcgaagcgggggcggtgttcgccgagatcggcccgcgcatggccgagttgagcggttcccggctggccgcgcagcaacagatggaaggcctcctggcgccgcaccggcccaaggagcccgcgtggttcctggccaccgtcggcgtctcgcccgaccaccagggcaagggtctgggcagcgccgtcgtgctccccggagtggaggcggccgagcgcgccggggtgcccgccttcctggagacctccgcgccccgcaacctccccttctacgagcggctcggcttcaccgtcaccgccgacgtcgaggtgcccgaaggaccgcgcacctggtgcatgacccgcaagcccggtgcctga

SEQ ID NO: 1082 - DNA, 2397 bp, Artificial Sequence
  Synthetic Polynucleotides
atggactggatttggcgcatccttttccttgtcggcgctgctaccggcgcccattccttcgaaagaagcgatctgggaaagaagctgctggaagctgccagagccggacaggatgatgaagtgcgcatcctgatggcaaacggcgcagatgtgaacgcaaaggacgagtacggcctgacccccctgtacctggctacagcccacgggcacctggaaattgtggaagtgctgctgaagaacggcgctgacgtgaacgccgtggacgccatcggctttaccccactgcatctggccgctttcatcgggcatctcgaaatcgcagaggtgctgctgaaacacggggccgatgtgaatgcccaggacaagttcggcaagaccgccttcgacatcagcatcggcaacggcaacgaggacctggccgagatcctgcagaaactgaacacgcgtgagcagaaactgatctcggaagaggatctggcgaagcccaccacgacgccagcgccgcgaccaccaacaccggcgcccaccatcgcgtcgcagcccctgtccctgcgcccagaggcgtgccggccagcggcggggggcgcagtgcacacgagggggctggacttcgcctgtgacatctacatctgggcgcccttggccgggacttgtggggtccttctcctgtcactggttatcaccctttactgcgggcgcgccagagtgaagttcagcaggagcgcagacgcccccgcgtaccagcagggccagaaccagctctataacgagctgaatctaggacgaagagaggagtacgatgttttggacaagagacgtggccgggaccctgagatggggggaaagccgagaaggaagaaccctcaggaaggcctgtacaatgaactgcagaaagataagatggcggaggcctacagtgagattgggatgaaaggcgagcgccggaggggcaaggggcacgatggcctttaccagggtctcagtacagccaccaaggacacctacgacgcccttcacatgcaggccctgccccctcgctctagaggatctggagcaacaaacttctcactactcaaacaagcaggtgacgtggaggagaatcccgggcctgggatccacatggccacttacgaggttctctgtgaggtggcgcggaaactgggcacggatgacagggaagtggtattgttcctcctaaacgtgttcatacctcaacccacactggcccaattaattggagctcttagagctttaaaggaggagggcaggttaacgtttcccctgttagcggaatgtctgtttcgtgcaggtcgcagagacctcttgcgcgacctgcttcacttagacccgcgttttttagagcgccacctagcgggcacaatgagttatttcagcccttatcagctcactgttctccacgtagacggggagctgtgtgcgagggatattaggtctttgatatttttaagcaaggacactatagggtctcgcagcacaccacagacattcttacactgggtgtactgtatggaaaacttagacctactgggtcccactgacgtggatgccctaatgtcaatgcttagatctttgtcaagagtagacctacagcgccaagtgcaaaccctaatgggccttcacctttccggcccatcacactcccaacactatcgccatacaccactcgagaccgatttctacgactacaaggacgacgatgacaagactagtggctccggcgagggcagaggaagtctactaacctgcggagatgtggaagaaaatcctggcccacatatgaccgagtacaagcccacggtgcgcctcgccacccgcgacgacgtccccagggccgtacgcaccctcgccgccgcgttcgccgactaccccgccacgcgccacaccgtcgatccggaccgccacatcgagcgggtcaccgagctgcaagaactcttcctcacgcgcgtcgggctcgacatcggcaaggtgtgggtcgcggacgacggcgccgcggtggcggtctggaccacgccggagagcgtcgaagcgggggcggtgttcgccgagatcggcccgcgcatggccgagttgagcggttcccggctggccgcgcagcaacagatggaaggcctcctggcgccgcaccggcccaaggagcccgcgtggttcctggccaccgtcggcgtctcgcccgaccaccagggcaagggtctgggcagcgccgtcgtgctccccggagtggaggcggccgagcgcgccggggtgcccgccttcctggagacctccgcgccccgcaacctccccttctacgagcggctcggcttcaccgtcaccgccgacgtcgaggtgcccgaaggaccgcgcacctggtgcatgacccgcaagcccggtgcctga

SEQ ID NO: 1083 - DNA, 2853 bp, Artificial Sequence
  Synthetic Polynucleotides
atggccctgcccgtgacagccctgctgctgcctctggctctgctgctgcacgccgccagacccgatgaattcgaggtgcaactggtggaaagcggcggaggcctggtgcaggctggcggatctctgagactgagctgtgccgccagcggcatcaccttcagcatcaacacaatgggctggtacagacaggcccctggcaagcagagggaactggtggccctgatctccagcatcggcgacacctactacgccgacagcgtgaagggccggttcaccatcagccgggacaacgccaagaacaccgtgtacctccagatgaacagcctgaagcccgaggacaccgccgtgtactactgcaagcggttcagaacagccgcccagggcaccgattattggggccagggaacacaagtgaccgtgtcctctctcgagggaggaggcggctccgggggaggcggaagtggaggcggaggatctgggtctggaggaagcggatctggaggctcagggtcagggggctcaggcagtggaggctctttcgaagtgcaactggtggaatctgggggcggactggtgcagccaggcggaagtctgaggctgtcttgtgccgcctccggcagcatcttcggcttcaacgacatggcctggtatcggcaggctcccggaaaacagcgcgagctggtggctctgattagcagagtgggcgtgaccagcagcgccgactctgtgaagggcagattcacaatctccagagtgaacgccaaggatacagtgtacctccagatgaactctctgaaacctgaggatacagcagtgtactattgctacatggaccagcggctggacggcagcacactggcctactggggacagggaactcaagtgacagtgtctagcacgcgtgagcagaaactgatctcggaagaggatctggcgaagcccaccacgacgccagcgccgcgaccaccaacaccggcgcccaccatcgcgtcgcagcccctgtccctgcgcccagaggcgtgccggccagcggcggggggcgcagtgcacacgagggggctggacttcgcctgtgacatctacatctgggcgcccttggccgggacttgtggggtccttctcctgtcactggttatcaccctttactgcgggcgcgccagagtgaagttcagcaggagcgcagacgcccccgcgtaccagcagggccagaaccagctctataacgagctgaatctaggacgaagagaggagtacgatgttttggacaagagacgtggccgggaccctgagatggggggaaagccgagaaggaagaaccctcaggaaggcctgtacaatgaactgcagaaagataagatggcggaggcctacagtgagattgggatgaaaggcgagcgccggaggggcaaggggcacgatggcctttaccagggtctcagtacagccaccaaggacacctacgacgcccttcacatgcaggccctgccccctcgctctagaggatctggagcaacaaacttctcactactcaaacaagcaggtgacgtggaggagaatcccgggcctgggatccacatggccacttacgaggttctctgtgaggtggcgcggaaactgggcacggatgacagggaagtggtattgttcctcctaaacgtgttcatacctcaacccacactggcccaattaattggagctcttagagctttaaaggaggagggcaggttaacgtttcccctgttagcggaatgtctgtttcgtgcaggtcgcagagacctcttgcgcgacctgcttcacttagacccgcgttttttagagcgccacctagcgggcacaatgagttatttcagcccttatcagctcactgttctccacgtagacggggagctgtgtgcgagggatattaggtctttgatatttttaagcaaggacactatagggtctcgcagcacaccacagacattcttacactgggtgtactgtatggaaaacttagacctactgggtcccactgacgtggatgccctaatgtcaatgcttagatctttgtcaagagtagacctacagcgccaagtgcaaaccctaatgggccttcacctttccggcccatcacactcccaacactatcgccatacaccactcgagaccgatttctacgactacaaggacgacgatgacaagactagtggctccggcgagggcagaggaagtctactaacctgcggagatgtggaagaaaatcctggcccacatatgaccgagtacaagcccacggtgcgcctcgccacccgcgacgacgtccccagggccgtacgcaccctcgccgccgcgttcgccgactaccccgccacgcgccacaccgtcgatccggaccgccacatcgagcgggtcaccgagctgcaagaactcttcctcacgcgcgtcgggctcgacatcggcaaggtgtgggtcgcggacgacggcgccgcggtggcggtctggaccacgccggagagcgtcgaagcgggggcggtgttcgccgagatcggcccgcgcatggccgagttgagcggttcccggctggccgcgcagcaacagatggaaggcctcctggcgccgcaccggcccaaggagcccgcgtggttcctggccaccgtcggcgtctcgcccgaccaccagggcaagggtctgggcagcgccgtcgtgctccccggagtggaggcggccgagcgcgccggggtgcccgccttcctggagacctccgcgccccgcaacctccccttctacgagcggctcggcttcaccgtcaccgccgacgtcgaggtgcccgaaggaccgcgcacctggtgcatgacccgcaagcccggtgcctga

SEQ ID NO: 1084 - DNA, 2745 bp, Artificial Sequence
  Synthetic Polynucleotides
atggccttaccagtgaccgccttgctcctgccgctggccttgctgctccacgccgccaggccggacatccagatgacccagagccccagcagcctgtctgccagcgtgggcgacagagtgaccatcacctgtagagccagccaggacgtgaacaccgccgtggcctggtatcagcagaagcctggcaaggcccccaagctgctgatctacagcgccagcttcctggaaagcggcgtgcccagcagattcagcggaagcagaagcggcaccgacttcaccctgaccatcagctccctccagcccgaggacttcgccacctactactgccagcagcactacaccacccctcccaccttcggccagaccaaggtggaaatcaagagaggcggaggcggaagtggaggcggaggatctggcggcggaggctctgaagtgcaactggtggaatctggcggcggactggtgcagcctggcggatctctgagactgagctgtgccgccagcggcttcaacatcaaggacacctacatccactgggtgcgccaggcccctggaaagggactggaatgggtggcccggatctaccccaccaacggctacaccagatacgccgacagcgtgaagggccggttcaccatcagcgccgacaccagcaagaataccgcctacctccagatgaacagcctgcgggccgaggataccgccgtgtactactgctcaagatggggaggcgacggcttctacgctatggacgtgtggggccagggcacccttgtgaccgtgtcatctacgcgtgagcagaaactgatctcggaagaggatctggcgaagcccaccacgacgccagcgccgcgaccaccaacaccggcgcccaccatcgcgtcgcagcccctgtccctgcgcccagaggcgtgccggccagcggcggggggcgcagtgcacacgagggggctggacttcgcctgtgacatctacatctgggcgcccttggccgggacttgtggggtccttctcctgtcactggttatcaccctttactgcgggcgcgccagagtgaagttcagcaggagcgcagacgcccccgcgtaccagcagggccagaaccagctctataacgagctgaatctaggacgaagagaggagtacgatgttttggacaagagacgtggccgggaccctgagatggggggaaagccgagaaggaagaaccctcaggaaggcctgtacaatgaactgcagaaagataagatggcggaggcctacagtgagattgggatgaaaggcgagcgccggaggggcaaggggcacgatggcctttaccagggtctcagtacagccaccaaggacacctacgacgcccttcacatgcaggccctgccccctcgctctagaggatctggagcaacaaacttctcactactcaaacaagcaggtgacgtggaggagaatcccgggcctgggatccacatggccacttacgaggttctctgtgaggtggcgcggaaactgggcacggatgacagggaagtggtattgttcctcctaaacgtgttcatacctcaacccacactggcccaattaattggagctcttagagctttaaaggaggagggcaggttaacgtttcccctgttagcggaatgtctgtttcgtgcaggtcgcagagacctcttgcgcgacctgcttcacttagacccgcgttttttagagcgccacctagcgggcacaatgagttatttcagcccttatcagctcactgttctccacgtagacggggagctgtgtgcgagggatattaggtctttgatatttttaagcaaggacactatagggtctcgcagcacaccacagacattcttacactgggtgtactgtatggaaaacttagacctactgggtcccactgacgtggatgccctaatgtcaatgcttagatctttgtcaagagtagacctacagcgccaagtgcaaaccctaatgggccttcacctttccggcccatcacactcccaacactatcgccatacaccactcgagaccgatttctacgactacaaggacgacgatgacaagactagtggctccggcgagggcagaggaagtctactaacctgcggagatgtggaagaaaatcctggcccacatatgaccgagtacaagcccacggtgcgcctcgccacccgcgacgacgtccccagggccgtacgcaccctcgccgccgcgttcgccgactaccccgccacgcgccacaccgtcgatccggaccgccacatcgagcgggtcaccgagctgcaagaactcttcctcacgcgcgtcgggctcgacatcggcaaggtgtgggtcgcggacgacggcgccgcggtggcggtctggaccacgccggagagcgtcgaagcgggggcggtgttcgccgagatcggcccgcgcatggccgagttgagcggttcccggctggccgcgcagcaacagatggaaggcctcctggcgccgcaccggcccaaggagcccgcgtggttcctggccaccgtcggcgtctcgcccgaccaccagggcaagggtctgggcagcgccgtcgtgctccccggagtggaggcggccgagcgcgccggggtgcccgccttcctggagacctccgcgccccgcaacctccccttctacgagcggctcggcttcaccgtcaccgccgacgtcgaggtgcccgaaggaccgcgcacctggtgcatgacccgcaagcccggtgcctga

SEQ ID NO: 1085 - DNA, 2382 bp, Artificial Sequence
  Synthetic Polynucleotides
atggccctgcccgtgacagccctgctgctgcctctggctctgctgctgcacgccgccagacccgatgaattcgacgtgcaactcgtggaatccggcggaggcctggtgcagcctggcggatctctgagactgagctgtgccgccagcggctctatcggcggactgaatgccatggcctggtacagacaggcccctggcaaagaacgggaactggtggccggcatctttggcgtgggcagcaccagatacgccgacagcgtgaagggccggttcaccatcagccgggacaacagcaagaacaccgtgtacctgcagatgaacagcctgcggcccgaggataccgccgtgtactactgcagaatgtccagcgtgaccagaggctccagcgactactggggccagggaacacttgtgaccgtgtccagtacgcgtgagcagaaactgatctcggaagaggatctggcgaagcccaccacgacgccagcgccgcgaccaccaacaccggcgcccaccatcgcgtcgcagcccctgtccctgcgcccagaggcgtgccggccagcggcggggggcgcagtgcacacgagggggctggacttcgcctgtgacatctacatctgggcgcccttggccgggacttgtggggtccttctcctgtcactggttatcaccctttactgcgggcgcgccagagtgaagttcagcaggagcgcagacgcccccgcgtaccagcagggccagaaccagctctataacgagctgaatctaggacgaagagaggagtacgatgttttggacaagagacgtggccgggaccctgagatggggggaaagccgagaaggaagaaccctcaggaaggcctgtacaatgaactgcagaaagataagatggcggaggcctacagtgagattgggatgaaaggcgagcgccggaggggcaaggggcacgatggcctttaccagggtctcagtacagccaccaaggacacctacgacgcccttcacatgcaggccctgccccctcgctctagaggatctggagcaacaaacttctcactactcaaacaagcaggtgacgtggaggagaatcccgggcctgggatccacatggccacttacgaggttctctgtgaggtggcgcggaaactgggcacggatgacagggaagtggtattgttcctcctaaacgtgttcatacctcaacccacactggcccaattaattggagctcttagagctttaaaggaggagggcaggttaacgtttcccctgttagcggaatgtctgtttcgtgcaggtcgcagagacctcttgcgcgacctgcttcacttagacccgcgttttttagagcgccacctagcgggcacaatgagttatttcagcccttatcagctcactgttctccacgtagacggggagctgtgtgcgagggatattaggtctttgatatttttaagcaaggacactatagggtctcgcagcacaccacagacattcttacactgggtgtactgtatggaaaacttagacctactgggtcccactgacgtggatgccctaatgtcaatgcttagatctttgtcaagagtagacctacagcgccaagtgcaaaccctaatgggccttcacctttccggcccatcacactcccaacactatcgccatacaccactcgagaccgatttctacgactacaaggacgacgatgacaagactagtggctccggcgagggcagaggaagtctactaacctgcggagatgtggaagaaaatcctggcccacatatgaccgagtacaagcccacggtgcgcctcgccacccgcgacgacgtccccagggccgtacgcaccctcgccgccgcgttcgccgactaccccgccacgcgccacaccgtcgatccggaccgccacatcgagcgggtcaccgagctgcaagaactcttcctcacgcgcgtcgggctcgacatcggcaaggtgtgggtcgcggacgacggcgccgcggtggcggtctggaccacgccggagagcgtcgaagcgggggcggtgttcgccgagatcggcccgcgcatggccgagttgagcggttcccggctggccgcgcagcaacagatggaaggcctcctggcgccgcaccggcccaaggagcccgcgtggttcctggccaccgtcggcgtctcgcccgaccaccagggcaagggtctgggcagcgccgtcgtgctccccggagtggaggcggccgagcgcgccggggtgcccgccttcctggagacctccgcgccccgcaacctccccttctacgagcggctcggcttcaccgtcaccgccgacgtcgaggtgcccgaaggaccgcgcacctggtgcatgacccgcaagcccggtgcctga

SEQ ID NO: 1086 - DNA, 2202 bp, Artificial Sequence
  Synthetic Polynucleotides
atggccctgcccgtgacagccctgctgctgcctctggctctgctgctgcacgccgccagacccgatgaattcgtggacaacaagttcaacaaagagcggtacagcgcctactacgagatttggcaactgcccaacctgaacgtgcggcagaaggccgccttcatcggatctctgcaggacgaccctagccagagcgccaatctgctggccgaggccaagaagctgaacgacgcccaggcccctaaaacgcgtgagcagaaactgatctcggaagaggatctggcgaagcccaccacgacgccagcgccgcgaccaccaacaccggcgcccaccatcgcgtcgcagcccctgtccctgcgcccagaggcgtgccggccagcggcggggggcgcagtgcacacgagggggctggacttcgcctgtgacatctacatctgggcgcccttggccgggacttgtggggtccttctcctgtcactggttatcaccctttactgcgggcgcgccagagtgaagttcagcaggagcgcagacgcccccgcgtaccagcagggccagaaccagctctataacgagctgaatctaggacgaagagaggagtacgatgttttggacaagagacgtggccgggaccctgagatggggggaaagccgagaaggaagaaccctcaggaaggcctgtacaatgaactgcagaaagataagatggcggaggcctacagtgagattgggatgaaaggcgagcgccggaggggcaaggggcacgatggcctttaccagggtctcagtacagccaccaaggacacctacgacgcccttcacatgcaggccctgccccctcgctctagaggatctggagcaacaaacttctcactactcaaacaagcaggtgacgtggaggagaatcccgggcctgggatccacatggccacttacgaggttctctgtgaggtggcgcggaaactgggcacggatgacagggaagtggtattgttcctcctaaacgtgttcatacctcaacccacactggcccaattaattggagctcttagagctttaaaggaggagggcaggttaacgtttcccctgttagcggaatgtctgtttcgtgcaggtcgcagagacctcttgcgcgacctgcttcacttagacccgcgttttttagagcgccacctagcgggcacaatgagttatttcagcccttatcagctcactgttctccacgtagacggggagctgtgtgcgagggatattaggtctttgatatttttaagcaaggacactatagggtctcgcagcacaccacagacattcttacactgggtgtactgtatggaaaacttagacctactgggtcccactgacgtggatgccctaatgtcaatgcttagatctttgtcaagagtagacctacagcgccaagtgcaaaccctaatgggccttcacctttccggcccatcacactcccaacactatcgccatacaccactcgagaccgatttctacgactacaaggacgacgatgacaagactagtggctccggcgagggcagaggaagtctactaacctgcggagatgtggaagaaaatcctggcccacatatgaccgagtacaagcccacggtgcgcctcgccacccgcgacgacgtccccagggccgtacgcaccctcgccgccgcgttcgccgactaccccgccacgcgccacaccgtcgatccggaccgccacatcgagcgggtcaccgagctgcaagaactcttcctcacgcgcgtcgggctcgacatcggcaaggtgtgggtcgcggacgacggcgccgcggtggcggtctggaccacgccggagagcgtcgaagcgggggcggtgttcgccgagatcggcccgcgcatggccgagttgagcggttcccggctggccgcgcagcaacagatggaaggcctcctggcgccgcaccggcccaaggagcccgcgtggttcctggccaccgtcggcgtctcgcccgaccaccagggcaagggtctgggcagcgccgtcgtgctccccggagtggaggcggccgagcgcgccggggtgcccgccttcctggagacctccgcgccccgcaacctccccttctacgagcggctcggcttcaccgtcaccgccgacgtcgaggtgcccgaaggaccgcgcacctggtgcatgacccgcaagcccggtgcctga

SEQ ID NO: 1087 - DNA, 2868 bp, Artificial Sequence
  Synthetic Polynucleotides
atggccctgcccgtgacagccctgctgctgcctctggctctgctgctgcacgccgccagacccgatgaattcgacgtgcaactcgtggaatccggcggaggcctggtgcagcctggcggatctctgagactgagctgtgccgccagcggctctatcggcggactgaatgccatggcctggtacagacaggcccctggcaaagaacgggaactggtggccggcatctttggcgtgggcagcaccagatacgccgacagcgtgaagggccggttcaccatcagccgggacaacagcaagaacaccgtgtacctgcagatgaacagcctgcggcccgaggataccgccgtgtactactgcagaatgtccagcgtgaccagaggctccagcgactactggggccagggaacacttgtgaccgtgtccagtctcgagggaggaggcggctccgggggaggcggaagtggaggcggaggatctgggtctggaggaagcggatctggaggctcagggtcagggggctcaggcagtggaggctctttcgaagtgcaactggtggaatctggaggctctctggtgcagccagggggaagcctgagactgtcttgtgccgcttccggcttcaccttcgacgactacgccatgagctgggtgcgccaggtgccaggcaaaggcctggaatgggtgtccagcatcaactggagcggcacccacaccgattacgccgactccgtgaaaggcagattcacaatcagcagaaacaacgccaacaataccctgtacctgcagatgaactccctgaagtctgaggatacagcagtgtattattgcgccaagaactggcgggacgccggcaccacttggtttgagaaaagcggctctgccggacagggaacccaagtgacagtgtcctccacgcgtgagcagaaactgatctcggaagaggatctggcgaagcccaccacgacgccagcgccgcgaccaccaacaccggcgcccaccatcgcgtcgcagcccctgtccctgcgcccagaggcgtgccggccagcggcggggggcgcagtgcacacgagggggctggacttcgcctgtgacatctacatctgggcgcccttggccgggacttgtggggtccttctcctgtcactggttatcaccctttactgcgggcgcgccagagtgaagttcagcaggagcgcagacgcccccgcgtaccagcagggccagaaccagctctataacgagctgaatctaggacgaagagaggagtacgatgttttggacaagagacgtggccgggaccctgagatggggggaaagccgagaaggaagaaccctcaggaaggcctgtacaatgaactgcagaaagataagatggcggaggcctacagtgagattgggatgaaaggcgagcgccggaggggcaaggggcacgatggcctttaccagggtctcagtacagccaccaaggacacctacgacgcccttcacatgcaggccctgccccctcgctctagaggatctggagcaacaaacttctcactactcaaacaagcaggtgacgtggaggagaatcccgggcctgggatccacatggccacttacgaggttctctgtgaggtggcgcggaaactgggcacggatgacagggaagtggtattgttcctcctaaacgtgttcatacctcaacccacactggcccaattaattggagctcttagagctttaaaggaggagggcaggttaacgtttcccctgttagcggaatgtctgtttcgtgcaggtcgcagagacctcttgcgcgacctgcttcacttagacccgcgttttttagagcgccacctagcgggcacaatgagttatttcagcccttatcagctcactgttctccacgtagacggggagctgtgtgcgagggatattaggtctttgatatttttaagcaaggacactatagggtctcgcagcacaccacagacattcttacactgggtgtactgtatggaaaacttagacctactgggtcccactgacgtggatgccctaatgtcaatgcttagatctttgtcaagagtagacctacagcgccaagtgcaaaccctaatgggccttcacctttccggcccatcacactcccaacactatcgccatacaccactcgagaccgatttctacgactacaaggacgacgatgacaagactagtggctccggcgagggcagaggaagtctactaacctgcggagatgtggaagaaaatcctggcccacatatgaccgagtacaagcccacggtgcgcctcgccacccgcgacgacgtccccagggccgtacgcaccctcgccgccgcgttcgccgactaccccgccacgcgccacaccgtcgatccggaccgccacatcgagcgggtcaccgagctgcaagaactcttcctcacgcgcgtcgggctcgacatcggcaaggtgtgggtcgcggacgacggcgccgcggtggcggtctggaccacgccggagagcgtcgaagcgggggcggtgttcgccgagatcggcccgcgcatggccgagttgagcggttcccggctggccgcgcagcaacagatggaaggcctcctggcgccgcaccggcccaaggagcccgcgtggttcctggccaccgtcggcgtctcgcccgaccaccagggcaagggtctgggcagcgccgtcgtgctccccggagtggaggcggccgagcgcgccggggtgcccgccttcctggagacctccgcgccccgcaacctccccttctacgagcggctcggcttcaccgtcaccgccgacgtcgaggtgcccgaaggaccgcgcacctggtgcatgacccgcaagcccggtgcctga

SEQ ID NO: 1088 - DNA, 2742 bp, Artificial Sequence
  Synthetic Polynucleotides
atggccttaccagtgaccgccttgctcctgccgctggccttgctgctccacgccgccaggccggaccagagcgtgctgacacagcctcctagcgtgtcagtggcccctggcaagaccgccagaatcccctgcgagggcaactacatcggcagcagcaacgtgcactggtatcagcagaagcccggccaggctcccgtgctcgtgatccacttcgacagcgacagacccagcggcatccccgacagattcagcggcagcaacagcggcaacatggctaccctgaccatcagcagagtggaagccggggacgaggccgactactactgtcaagtgtgggagaaccacggctgggtgttcggcggaggcaccaagctgacagtgctgtctggcggaggcggaagtggaggcggaggatctggcggcggaggctctgaggtgcaactggtggaaacaggcggcggactggtgcagcctggcgagtctctgagactgagctgtgccgccagcggcttcaccttcagcgactacgagatgaactgggtgcgccaggcccctggaaagggcctggaatgggtgtcctacatcagcagctccggcagcaccatctactacgccgacagcgtgaagggccggtttaccatctaccgggacaacgccaagaacagcctgtacctccagatgaactccctgcgggccgaggacaccgccctgtactattgtgccagagcctggggcgtgggaccccctgattattggggacagggcaccctcgtgaccgtgtcctctacgcgtgagcagaaactgatctcggaagaggatctggcgaagcccaccacgacgccagcgccgcgaccaccaacaccggcgcccaccatcgcgtcgcagcccctgtccctgcgcccagaggcgtgccggccagcggcggggggcgcagtgcacacgagggggctggacttcgcctgtgacatctacatctgggcgcccttggccgggacttgtggggtccttctcctgtcactggttatcaccctttactgcgggcgcgccagagtgaagttcagcaggagcgcagacgcccccgcgtaccagcagggccagaaccagctctataacgagctgaatctaggacgaagagaggagtacgatgttttggacaagagacgtggccgggaccctgagatggggggaaagccgagaaggaagaaccctcaggaaggcctgtacaatgaactgcagaaagataagatggcggaggcctacagtgagattgggatgaaaggcgagcgccggaggggcaaggggcacgatggcctttaccagggtctcagtacagccaccaaggacacctacgacgcccttcacatgcaggccctgccccctcgctctagaggatctggagcaacaaacttctcactactcaaacaagcaggtgacgtggaggagaatcccgggcctgggatccacatggccacttacgaggttctctgtgaggtggcgcggaaactgggcacggatgacagggaagtggtattgttcctcctaaacgtgttcatacctcaacccacactggcccaattaattggagctcttagagctttaaaggaggagggcaggttaacgtttcccctgttagcggaatgtctgtttcgtgcaggtcgcagagacctcttgcgcgacctgcttcacttagacccgcgttttttagagcgccacctagcgggcacaatgagttatttcagcccttatcagctcactgttctccacgtagacggggagctgtgtgcgagggatattaggtctttgatatttttaagcaaggacactatagggtctcgcagcacaccacagacattcttacactgggtgtactgtatggaaaacttagacctactgggtcccactgacgtggatgccctaatgtcaatgcttagatctttgtcaagagtagacctacagcgccaagtgcaaaccctaatgggccttcacctttccggcccatcacactcccaacactatcgccatacaccactcgagaccgatttctacgactacaaggacgacgatgacaagactagtggctccggcgagggcagaggaagtctactaacctgcggagatgtggaagaaaatcctggcccacatatgaccgagtacaagcccacggtgcgcctcgccacccgcgacgacgtccccagggccgtacgcaccctcgccgccgcgttcgccgactaccccgccacgcgccacaccgtcgatccggaccgccacatcgagcgggtcaccgagctgcaagaactcttcctcacgcgcgtcgggctcgacatcggcaaggtgtgggtcgcggacgacggcgccgcggtggcggtctggaccacgccggagagcgtcgaagcgggggcggtgttcgccgagatcggcccgcgcatggccgagttgagcggttcccggctggccgcgcagcaacagatggaaggcctcctggcgccgcaccggcccaaggagcccgcgtggttcctggccaccgtcggcgtctcgcccgaccaccagggcaagggtctgggcagcgccgtcgtgctccccggagtggaggcggccgagcgcgccggggtgcccgccttcctggagacctccgcgccccgcaacctccccttctacgagcggctcggcttcaccgtcaccgccgacgtcgaggtgcccgaaggaccgcgcacctggtgcatgacccgcaagcccggtgcctga

SEQ ID NO: 1089 - DNA, 2766 bp, Artificial Sequence
  Synthetic Polynucleotides
atggccttaccagtgaccgccttgctcctgccgctggccttgctgctccacgccgccaggccggacatccagatgacccagagccccagcagcctgtctgccagcgtgggcgataccgtgaccatcacctgtcaggccaacggctacctgaactggtatcagcagcggagaggcaaggcccccaagctgctgatctacgacggcagcaagctggaaagaggcgtgcccagcagattcagcggcagaagatggggccaggagtacaacctgaccatcaacaacctccagcccgaggatattgccacatacttttgccaggtgtacgagttcgtggtgcccggcacacggctggacctgaagagaacagtggctgctcctggcggaggcggaagtggaggcggaggatctggcggcggaggctctcaggtgcagctgctccagtctggcgctgccgtgacaaagcctggcgcttctgtgcgggtgtcctgtgaagccagcggctacaacatccgggactacttcatccactggtggcggcaggctccaggccagggactccagtgggtgggatggatcaaccccaagaccggccagcccaacaaccccagacagttccagggcagagtgtccctgaccagacacgccagctgggacttcgacaccttcagcttctacatggatctgaaggccctgcggagcgacgataccgccgtgtacttctgcgccagacagagaagcgactactgggatttcgacgtgtggggcagcggcacccaagtgacagtgtctagcgccagcaccaagggacccacgcgtgagcagaaactgatctcggaagaggatctggcgaagcccaccacgacgccagcgccgcgaccaccaacaccggcgcccaccatcgcgtcgcagcccctgtccctgcgcccagaggcgtgccggccagcggcggggggcgcagtgcacacgagggggctggacttcgcctgtgacatctacatctgggcgcccttggccgggacttgtggggtccttctcctgtcactggttatcaccctttactgcgggcgcgccagagtgaagttcagcaggagcgcagacgcccccgcgtaccagcagggccagaaccagctctataacgagctgaatctaggacgaagagaggagtacgatgttttggacaagagacgtggccgggaccctgagatggggggaaagccgagaaggaagaaccctcaggaaggcctgtacaatgaactgcagaaagataagatggcggaggcctacagtgagattgggatgaaaggcgagcgccggaggggcaaggggcacgatggcctttaccagggtctcagtacagccaccaaggacacctacgacgcccttcacatgcaggccctgccccctcgctctagaggatctggagcaacaaacttctcactactcaaacaagcaggtgacgtggaggagaatcccgggcctgggatccacatggccacttacgaggttctctgtgaggtggcgcggaaactgggcacggatgacagggaagtggtattgttcctcctaaacgtgttcatacctcaacccacactggcccaattaattggagctcttagagctttaaaggaggagggcaggttaacgtttcccctgttagcggaatgtctgtttcgtgcaggtcgcagagacctcttgcgcgacctgcttcacttagacccgcgttttttagagcgccacctagcgggcacaatgagttatttcagcccttatcagctcactgttctccacgtagacggggagctgtgtgcgagggatattaggtctttgatatttttaagcaaggacactatagggtctcgcagcacaccacagacattcttacactgggtgtactgtatggaaaacttagacctactgggtcccactgacgtggatgccctaatgtcaatgcttagatctttgtcaagagtagacctacagcgccaagtgcaaaccctaatgggccttcacctttccggcccatcacactcccaacactatcgccatacaccactcgagaccgatttctacgactacaaggacgacgatgacaagactagtggctccggcgagggcagaggaagtctactaacctgcggagatgtggaagaaaatcctggcccacatatgaccgagtacaagcccacggtgcgcctcgccacccgcgacgacgtccccagggccgtacgcaccctcgccgccgcgttcgccgactaccccgccacgcgccacaccgtcgatccggaccgccacatcgagcgggtcaccgagctgcaagaactcttcctcacgcgcgtcgggctcgacatcggcaaggtgtgggtcgcggacgacggcgccgcggtggcggtctggaccacgccggagagcgtcgaagcgggggcggtgttcgccgagatcggcccgcgcatggccgagttgagcggttcccggctggccgcgcagcaacagatggaaggcctcctggcgccgcaccggcccaaggagcccgcgtggttcctggccaccgtcggcgtctcgcccgaccaccagggcaagggtctgggcagcgccgtcgtgctccccggagtggaggcggccgagcgcgccggggtgcccgccttcctggagacctccgcgccccgcaacctccccttctacgagcggctcggcttcaccgtcaccgccgacgtcgaggtgcccgaaggaccgcgcacctggtgcatgacccgcaagcccggtgcctga

SEQ ID NO: 1090 - DNA, 2784 bp, Artificial Sequence
  Synthetic Polynucleotides
atggccttaccagtgaccgccttgctcctgccgctggccttgctgctccacgccgccaggccgcagtctgccctgacacagcctcctagcgcctctggctctcccggccagagcatcaccatcagctgtaccggcaccagcaacaacttcgtgtcctggtatcagcagcacgccggcaaggcccccaagctcgtgatctacgacgtgaacaagcggcccagcggcgtgcccgatagattcagcggcagcaagagcggcaacaccgccagcctgacagtgtctggcctccagaccgatgacgaggccgtgtactactgcggcagcctcgtgggcaactgggacgtgatctttggcggaggcaccaagctgaccgtgctgggcggaggcggaagtggaggcggaggatctggcggcggaggctctcagccccagctccaggaatctggccccacactggtggaagccagcgagacactgagcctgacctgtgccgtgtccggcgattctaccgccgcctgcaatagcttctggggctgggtgcgccagcctcctggaaagggactggaatgggtgggaagcctgagccactgcgccagctattggaaccggggctggacctaccacaaccccagcctgaagtccagactgaccctggccctggacacccccaagaacctggtgttcctgaagctgaacagcgtgacagccgccgacaccgccacctactactgtgccagatttggcggcgaggtgctgcggtacaccgactggcctaaacctgcctgggtggacctgtggggcagaggaacactcgtgaccgtgtccagcacgcgtgagcagaaactgatctcggaagaggatctggcgaagcccaccacgacgccagcgccgcgaccaccaacaccggcgcccaccatcgcgtcgcagcccctgtccctgcgcccagaggcgtgccggccagcggcggggggcgcagtgcacacgagggggctggacttcgcctgtgacatctacatctgggcgcccttggccgggacttgtggggtccttctcctgtcactggttatcaccctttactgcgggcgcgccagagtgaagttcagcaggagcgcagacgcccccgcgtaccagcagggccagaaccagctctataacgagctgaatctaggacgaagagaggagtacgatgttttggacaagagacgtggccgggaccctgagatggggggaaagccgagaaggaagaaccctcaggaaggcctgtacaatgaactgcagaaagataagatggcggaggcctacagtgagattgggatgaaaggcgagcgccggaggggcaaggggcacgatggcctttaccagggtctcagtacagccaccaaggacacctacgacgcccttcacatgcaggccctgccccctcgctctagaggatctggagcaacaaacttctcactactcaaacaagcaggtgacgtggaggagaatcccgggcctgggatccacatggccacttacgaggttctctgtgaggtggcgcggaaactgggcacggatgacagggaagtggtattgttcctcctaaacgtgttcatacctcaacccacactggcccaattaattggagctcttagagctttaaaggaggagggcaggttaacgtttcccctgttagcggaatgtctgtttcgtgcaggtcgcagagacctcttgcgcgacctgcttcacttagacccgcgttttttagagcgccacctagcgggcacaatgagttatttcagcccttatcagctcactgttctccacgtagacggggagctgtgtgcgagggatattaggtctttgatatttttaagcaaggacactatagggtctcgcagcacaccacagacattcttacactgggtgtactgtatggaaaacttagacctactgggtcccactgacgtggatgccctaatgtcaatgcttagatctttgtcaagagtagacctacagcgccaagtgcaaaccctaatgggccttcacctttccggcccatcacactcccaacactatcgccatacaccactcgagaccgatttctacgactacaaggacgacgatgacaagactagtggctccggcgagggcagaggaagtctactaacctgcggagatgtggaagaaaatcctggcccacatatgaccgagtacaagcccacggtgcgcctcgccacccgcgacgacgtccccagggccgtacgcaccctcgccgccgcgttcgccgactaccccgccacgcgccacaccgtcgatccggaccgccacatcgagcgggtcaccgagctgcaagaactcttcctcacgcgcgtcgggctcgacatcggcaaggtgtgggtcgcggacgacggcgccgcggtggcggtctggaccacgccggagagcgtcgaagcgggggcggtgttcgccgagatcggcccgcgcatggccgagttgagcggttcccggctggccgcgcagcaacagatggaaggcctcctggcgccgcaccggcccaaggagcccgcgtggttcctggccaccgtcggcgtctcgcccgaccaccagggcaagggtctgggcagcgccgtcgtgctccccggagtggaggcggccgagcgcgccggggtgcccgccttcctggagacctccgcgccccgcaacctccccttctacgagcggctcggcttcaccgtcaccgccgacgtcgaggtgcccgaaggaccgcgcacctggtgcatgacccgcaagcccggtgcctga

SEQ ID NO: 1091 - DNA, 2739 bp, Artificial Sequence
  Synthetic Polynucleotides
atggccttaccagtgaccgccttgctcctgccgctggccttgctgctccacgccgccaggccggagatcgtgctgacacagagccctggcaccctgagcctgtctccaggcgagacagccatcatcagctgccggacaagccagtacggcagcctggcctggtatcagcagaggccaggacaggcccccagactcgtgatctacagcggcagcacaagagccgccggaatccccgatagattcagcggctccagatggggacccgactacaacctgaccatcagcaacctggaaagcggcgacttcggcgtgtactactgccagcagtacgagttcttcggccagggcaccaaggtgcaggtggacatcaaaagaggcggaggcggaagtggaggcggaggatctggcggcggaggctctcaggtgcagctggtgcagtctggcggccagatgaagaaacccggcgagagcatgagaatcagctgtcgggcctccggctacgagttcatcgactgcaccctgaactggatcagactggcccctggcaagcggcctgagtggatgggatggctgaagcctagaggcggagccgtgaactacgccagacctctccagggcagagtgaccatgaccagggacgtgtacagcgataccgccttcctggaactgcggagcctgaccgtggatgataccgccgtgtacttctgcaccagaggcaagaactgcgattacaactgggacttcgagcactggggcagaggcacccctgtgatcgtgtctagcacgcgtgagcagaaactgatctcggaagaggatctggcgaagcccaccacgacgccagcgccgcgaccaccaacaccggcgcccaccatcgcgtcgcagcccctgtccctgcgcccagaggcgtgccggccagcggcggggggcgcagtgcacacgagggggctggacttcgcctgtgacatctacatctgggcgcccttggccgggacttgtggggtccttctcctgtcactggttatcaccctttactgcgggcgcgccagagtgaagttcagcaggagcgcagacgcccccgcgtaccagcagggccagaaccagctctataacgagctgaatctaggacgaagagaggagtacgatgttttggacaagagacgtggccgggaccctgagatggggggaaagccgagaaggaagaaccctcaggaaggcctgtacaatgaactgcagaaagataagatggcggaggcctacagtgagattgggatgaaaggcgagcgccggaggggcaaggggcacgatggcctttaccagggtctcagtacagccaccaaggacacctacgacgcccttcacatgcaggccctgccccctcgctctagaggatctggagcaacaaacttctcactactcaaacaagcaggtgacgtggaggagaatcccgggcctgggatccacatggccacttacgaggttctctgtgaggtggcgcggaaactgggcacggatgacagggaagtggtattgttcctcctaaacgtgttcatacctcaacccacactggcccaattaattggagctcttagagctttaaaggaggagggcaggttaacgtttcccctgttagcggaatgtctgtttcgtgcaggtcgcagagacctcttgcgcgacctgcttcacttagacccgcgttttttagagcgccacctagcgggcacaatgagttatttcagcccttatcagctcactgttctccacgtagacggggagctgtgtgcgagggatattaggtctttgatatttttaagcaaggacactatagggtctcgcagcacaccacagacattcttacactgggtgtactgtatggaaaacttagacctactgggtcccactgacgtggatgccctaatgtcaatgcttagatctttgtcaagagtagacctacagcgccaagtgcaaaccctaatgggccttcacctttccggcccatcacactcccaacactatcgccatacaccactcgagaccgatttctacgactacaaggacgacgatgacaagactagtggctccggcgagggcagaggaagtctactaacctgcggagatgtggaagaaaatcctggcccacatatgaccgagtacaagcccacggtgcgcctcgccacccgcgacgacgtccccagggccgtacgcaccctcgccgccgcgttcgccgactaccccgccacgcgccacaccgtcgatccggaccgccacatcgagcgggtcaccgagctgcaagaactcttcctcacgcgcgtcgggctcgacatcggcaaggtgtgggtcgcggacgacggcgccgcggtggcggtctggaccacgccggagagcgtcgaagcgggggcggtgttcgccgagatcggcccgcgcatggccgagttgagcggttcccggctggccgcgcagcaacagatggaaggcctcctggcgccgcaccggcccaaggagcccgcgtggttcctggccaccgtcggcgtctcgcccgaccaccagggcaagggtctgggcagcgccgtcgtgctccccggagtggaggcggccgagcgcgccggggtgcccgccttcctggagacctccgcgccccgcaacctccccttctacgagcggctcggcttcaccgtcaccgccgacgtcgaggtgcccgaaggaccgcgcacctggtgcatgacccgcaagcccggtgcctga

SEQ ID NO: 1092 - DNA, 2769 bp, Artificial Sequence
  Synthetic Polynucleotides
atggccttaccagtgaccgccttgctcctgccgctggccttgctgctccacgccgccaggccggagctggtgctgacacagagccctggcaccctgtctctgtctgccggcgaaagagccaccctgagctgtagagccagccagagcgtgtcctctggcagcctggcttggtatcagcagaagccaggccaggcccccagactgctgatctacggcgcttctaccagagccaccggcatccccgatagattcagcggctctggctccggcaccgacttcaccctgacaatcggcagactggaacccgaggacctggccgtgtactactgccagcagtacggcaccagcccctacacattcggccagggcaccaagctggaaatcggcggaggcggaagtggaggcggaggatctggcggcggaggctctctggaacagagcggagccgaagtgaagaaacccggcagcagcgtgcaggtgtcctgcaaagcaagcggcggcaccttctctatgtacggcttcaactgggtgcgccaggctcctggacacggcctggaatggatgggcggcatcatccccatcttcggcacctccaactacgcccagaaattccggggcagagtgaccttcaccgccgaccaggccacaagcaccgcctacatggaactgaccaacctgcggagcgacgacaccgccgtgtattattgcgccagagacttcggccccgactgggaggatggcgacagctacgatggcagcggcagaggcttcttcgacttctggggccagggaacccttgtgaccgtgtcctcaacgcgtgagcagaaactgatctcggaagaggatctggcgaagcccaccacgacgccagcgccgcgaccaccaacaccggcgcccaccatcgcgtcgcagcccctgtccctgcgcccagaggcgtgccggccagcggcggggggcgcagtgcacacgagggggctggacttcgcctgtgacatctacatctgggcgcccttggccgggacttgtggggtccttctcctgtcactggttatcaccctttactgcgggcgcgccagagtgaagttcagcaggagcgcagacgcccccgcgtaccagcagggccagaaccagctctataacgagctgaatctaggacgaagagaggagtacgatgttttggacaagagacgtggccgggaccctgagatggggggaaagccgagaaggaagaaccctcaggaaggcctgtacaatgaactgcagaaagataagatggcggaggcctacagtgagattgggatgaaaggcgagcgccggaggggcaaggggcacgatggcctttaccagggtctcagtacagccaccaaggacacctacgacgcccttcacatgcaggccctgccccctcgctctagaggatctggagcaacaaacttctcactactcaaacaagcaggtgacgtggaggagaatcccgggcctgggatccacatggccacttacgaggttctctgtgaggtggcgcggaaactgggcacggatgacagggaagtggtattgttcctcctaaacgtgttcatacctcaacccacactggcccaattaattggagctcttagagctttaaaggaggagggcaggttaacgtttcccctgttagcggaatgtctgtttcgtgcaggtcgcagagacctcttgcgcgacctgcttcacttagacccgcgttttttagagcgccacctagcgggcacaatgagttatttcagcccttatcagctcactgttctccacgtagacggggagctgtgtgcgagggatattaggtctttgatatttttaagcaaggacactatagggtctcgcagcacaccacagacattcttacactgggtgtactgtatggaaaacttagacctactgggtcccactgacgtggatgccctaatgtcaatgcttagatctttgtcaagagtagacctacagcgccaagtgcaaaccctaatgggccttcacctttccggcccatcacactcccaacactatcgccatacaccactcgagaccgatttctacgactacaaggacgacgatgacaagactagtggctccggcgagggcagaggaagtctactaacctgcggagatgtggaagaaaatcctggcccacatatgaccgagtacaagcccacggtgcgcctcgccacccgcgacgacgtccccagggccgtacgcaccctcgccgccgcgttcgccgactaccccgccacgcgccacaccgtcgatccggaccgccacatcgagcgggtcaccgagctgcaagaactcttcctcacgcgcgtcgggctcgacatcggcaaggtgtgggtcgcggacgacggcgccgcggtggcggtctggaccacgccggagagcgtcgaagcgggggcggtgttcgccgagatcggcccgcgcatggccgagttgagcggttcccggctggccgcgcagcaacagatggaaggcctcctggcgccgcaccggcccaaggagcccgcgtggttcctggccaccgtcggcgtctcgcccgaccaccagggcaagggtctgggcagcgccgtcgtgctccccggagtggaggcggccgagcgcgccggggtgcccgccttcctggagacctccgcgccccgcaacctccccttctacgagcggctcggcttcaccgtcaccgccgacgtcgaggtgcccgaaggaccgcgcacctggtgcatgacccgcaagcccggtgcctga

SEQ ID NO: 1093 - DNA, 2757 bp, Artificial Sequence
  Synthetic Polynucleotides
atggccttaccagtgaccgccttgctcctgccgctggccttgctgctccacgccgccaggccggacgtggtcatgacacagagcccttctagcctgtctgccagcgtgggcgacagagtgacaatcacctgtcagagcagcctggacatcagccactacctgaactggtatcagcagaagcccggcaaggcccctaagctgctgatctacgacgccagcaatctggaaaccggcgtgcccagcagattttctggcagcggaagcggcacccacttcaccttcacaatatccagcctccagcctgaggacttcgccacctactactgccagcagtacgacaacctgcctctgacctttggcggaggcaccaagctggaaatcaagagaggcggaggcggaagtggaggcggaggatctggcggcggaggctctcaagttcaactggttcaatcaggcggaggcgtggtgcaacctggtggctctctgagagtgtcttgtgctgcctctggcgtgaccctgagcgactatggaatgcactgggtccgacaggcccctggcaaaggacttgagtgggtcgccttcatcagaaacgacggcagcgacaagtattacgccgacagcgtgaagggcagattcaccatcagccgggacaacagcgagaaaaccgtgtctctccagatgtctagcctgagagccgaggacaccgccgtgtactactgtgccaagaatggcgagagcggccctctggactactggtatctggatctgtggggcagaggcaccctggtcacagtctcttctacgcgtgagcagaaactgatctcggaagaggatctggcgaagcccaccacgacgccagcgccgcgaccaccaacaccggcgcccaccatcgcgtcgcagcccctgtccctgcgcccagaggcgtgccggccagcggcggggggcgcagtgcacacgagggggctggacttcgcctgtgacatctacatctgggcgcccttggccgggacttgtggggtccttctcctgtcactggttatcaccctttactgcgggcgcgccagagtgaagttcagcaggagcgcagacgcccccgcgtaccagcagggccagaaccagctctataacgagctgaatctaggacgaagagaggagtacgatgttttggacaagagacgtggccgggaccctgagatggggggaaagccgagaaggaagaaccctcaggaaggcctgtacaatgaactgcagaaagataagatggcggaggcctacagtgagattgggatgaaaggcgagcgccggaggggcaaggggcacgatggcctttaccagggtctcagtacagccaccaaggacacctacgacgcccttcacatgcaggccctgccccctcgctctagaggatctggagcaacaaacttctcactactcaaacaagcaggtgacgtggaggagaatcccgggcctgggatccacatggccacttacgaggttctctgtgaggtggcgcggaaactgggcacggatgacagggaagtggtattgttcctcctaaacgtgttcatacctcaacccacactggcccaattaattggagctcttagagctttaaaggaggagggcaggttaacgtttcccctgttagcggaatgtctgtttcgtgcaggtcgcagagacctcttgcgcgacctgcttcacttagacccgcgttttttagagcgccacctagcgggcacaatgagttatttcagcccttatcagctcactgttctccacgtagacggggagctgtgtgcgagggatattaggtctttgatatttttaagcaaggacactatagggtctcgcagcacaccacagacattcttacactgggtgtactgtatggaaaacttagacctactgggtcccactgacgtggatgccctaatgtcaatgcttagatctttgtcaagagtagacctacagcgccaagtgcaaaccctaatgggccttcacctttccggcccatcacactcccaacactatcgccatacaccactcgagaccgatttctacgactacaaggacgacgatgacaagactagtggctccggcgagggcagaggaagtctactaacctgcggagatgtggaagaaaatcctggcccacatatgaccgagtacaagcccacggtgcgcctcgccacccgcgacgacgtccccagggccgtacgcaccctcgccgccgcgttcgccgactaccccgccacgcgccacaccgtcgatccggaccgccacatcgagcgggtcaccgagctgcaagaactcttcctcacgcgcgtcgggctcgacatcggcaaggtgtgggtcgcggacgacggcgccgcggtggcggtctggaccacgccggagagcgtcgaagcgggggcggtgttcgccgagatcggcccgcgcatggccgagttgagcggttcccggctggccgcgcagcaacagatggaaggcctcctggcgccgcaccggcccaaggagcccgcgtggttcctggccaccgtcggcgtctcgcccgaccaccagggcaagggtctgggcagcgccgtcgtgctccccggagtggaggcggccgagcgcgccggggtgcccgccttcctggagacctccgcgccccgcaacctccccttctacgagcggctcggcttcaccgtcaccgccgacgtcgaggtgcccgaaggaccgcgcacctggtgcatgacccgcaagcccggtgcctga

SEQ ID NO: 1094 - DNA, 2757 bp, Artificial Sequence
  Synthetic Polynucleotides
atggccttaccagtgaccgccttgctcctgccgctggccttgctgctccacgccgccaggccggacgacatcgtgatgacccagagccaggacagcatggctaccagcgtgggcgagcgcgtgaccgtgaattgcaaggccagccagaacgtggacaccaacgtggcctggtatcagcagaagcccggccagtctcctgagcccctgctgttcagcgccagctacagatacaccggcgtgcccgacagattcagcggcagcggctctggcaccgacttcaccctgacaatcagcagcgtgcaggccgaggacgtggccgagtatttctgccagcagtacaacagctaccccctgaccttcggccagggcaccaagctggaaatcaagagaggcggaggcggaagtggaggcggaggatctggcggcggaggctctgaagtgcaggtggaagtgtctggcggcggactggtgcagcctggcggatctatgagactgagctgtgccgtgtccggcttcaccttcagcaactactggatgaactgggtgcgccagtcccccgagaagggcctggaatggatcgccgagatccggctgaagtccaacaacttcgcccggtactacgccgagagcgtgaagggcagattcaccatcagccgggacaacagcaagaacagcctgtacctccagatgatctccctgagagccgaggacaccgccatctactactgcaccagctacggcaactacgtgggccactacttcgaccactggggccagggaacactgctgaccgtgtctagcacgcgtgagcagaaactgatctcggaagaggatctggcgaagcccaccacgacgccagcgccgcgaccaccaacaccggcgcccaccatcgcgtcgcagcccctgtccctgcgcccagaggcgtgccggccagcggcggggggcgcagtgcacacgagggggctggacttcgcctgtgacatctacatctgggcgcccttggccgggacttgtggggtccttctcctgtcactggttatcaccctttactgcgggcgcgccagagtgaagttcagcaggagcgcagacgcccccgcgtaccagcagggccagaaccagctctataacgagctgaatctaggacgaagagaggagtacgatgttttggacaagagacgtggccgggaccctgagatggggggaaagccgagaaggaagaaccctcaggaaggcctgtacaatgaactgcagaaagataagatggcggaggcctacagtgagattgggatgaaaggcgagcgccggaggggcaaggggcacgatggcctttaccagggtctcagtacagccaccaaggacacctacgacgcccttcacatgcaggccctgccccctcgctctagaggatctggagcaacaaacttctcactactcaaacaagcaggtgacgtggaggagaatcccgggcctgggatccacatggccacttacgaggttctctgtgaggtggcgcggaaactgggcacggatgacagggaagtggtattgttcctcctaaacgtgttcatacctcaacccacactggcccaattaattggagctcttagagctttaaaggaggagggcaggttaacgtttcccctgttagcggaatgtctgtttcgtgcaggtcgcagagacctcttgcgcgacctgcttcacttagacccgcgttttttagagcgccacctagcgggcacaatgagttatttcagcccttatcagctcactgttctccacgtagacggggagctgtgtgcgagggatattaggtctttgatatttttaagcaaggacactatagggtctcgcagcacaccacagacattcttacactgggtgtactgtatggaaaacttagacctactgggtcccactgacgtggatgccctaatgtcaatgcttagatctttgtcaagagtagacctacagcgccaagtgcaaaccctaatgggccttcacctttccggcccatcacactcccaacactatcgccatacaccactcgagaccgatttctacgactacaaggacgacgatgacaagactagtggctccggcgagggcagaggaagtctactaacctgcggagatgtggaagaaaatcctggcccacatatgaccgagtacaagcccacggtgcgcctcgccacccgcgacgacgtccccagggccgtacgcaccctcgccgccgcgttcgccgactaccccgccacgcgccacaccgtcgatccggaccgccacatcgagcgggtcaccgagctgcaagaactcttcctcacgcgcgtcgggctcgacatcggcaaggtgtgggtcgcggacgacggcgccgcggtggcggtctggaccacgccggagagcgtcgaagcgggggcggtgttcgccgagatcggcccgcgcatggccgagttgagcggttcccggctggccgcgcagcaacagatggaaggcctcctggcgccgcaccggcccaaggagcccgcgtggttcctggccaccgtcggcgtctcgcccgaccaccagggcaagggtctgggcagcgccgtcgtgctccccggagtggaggcggccgagcgcgccggggtgcccgccttcctggagacctccgcgccccgcaacctccccttctacgagcggctcggcttcaccgtcaccgccgacgtcgaggtgcccgaaggaccgcgcacctggtgcatgacccgcaagcccggtgcctga

SEQ ID NO: 1095 - DNA, 2769 bp, Artificial Sequence
  Synthetic Polynucleotides
atggccttaccagtgaccgccttgctcctgccgctggccttgctgctccacgccgccaggccgagctacgagctgacacagcctccatccgtgtctggcacacctggacagagagtggctatctcctgtagcggcagcagcagcaacatcggcaccagaatggtcacctggtatcagcacgtgccaggcacagcccctaagctgctgatcttcaacaacaaccagcggcctagcggcgtgcccgatagattttctgccagcaagagcggcacaagcgccagcctggctatcatcggactccagtctgacgacgaggccgactactactgtgccacctgggacgacaacgtgaagtcctacgtgttcggcaccggcaccaaagtgacagtgcttggaagtagaggcggaggcggaagtggaggcggaggatctggcggcggaggctctcttgaaatggcccaggttcagctccagcagtggggagctggactgctgaagcctagcgagacactgagcctgacctgtgctgtgtacggcggcagcttcagcggctactactggtcctggatcagacagcctcctggcaaaggactggaatggatcggcgagatcaaccacagcggctccaccaactacaaccccagcctgaagtccagagtgaccatcagcgtggacaccagcaagaaccagttctccctgaagctgagcagcgtgacagccgctgataccgccgtgtactattgcgctagagcccctcagtcttggtacgtgggagatgtgtggggccagggcacactggttacagtgtcatctacgcgtgagcagaaactgatctcggaagaggatctggcgaagcccaccacgacgccagcgccgcgaccaccaacaccggcgcccaccatcgcgtcgcagcccctgtccctgcgcccagaggcgtgccggccagcggcggggggcgcagtgcacacgagggggctggacttcgcctgtgacatctacatctgggcgcccttggccgggacttgtggggtccttctcctgtcactggttatcaccctttactgcgggcgcgccagagtgaagttcagcaggagcgcagacgcccccgcgtaccagcagggccagaaccagctctataacgagctgaatctaggacgaagagaggagtacgatgttttggacaagagacgtggccgggaccctgagatggggggaaagccgagaaggaagaaccctcaggaaggcctgtacaatgaactgcagaaagataagatggcggaggcctacagtgagattgggatgaaaggcgagcgccggaggggcaaggggcacgatggcctttaccagggtctcagtacagccaccaaggacacctacgacgcccttcacatgcaggccctgccccctcgctctagaggatctggagcaacaaacttctcactactcaaacaagcaggtgacgtggaggagaatcccgggcctgggatccacatggccacttacgaggttctctgtgaggtggcgcggaaactgggcacggatgacagggaagtggtattgttcctcctaaacgtgttcatacctcaacccacactggcccaattaattggagctcttagagctttaaaggaggagggcaggttaacgtttcccctgttagcggaatgtctgtttcgtgcaggtcgcagagacctcttgcgcgacctgcttcacttagacccgcgttttttagagcgccacctagcgggcacaatgagttatttcagcccttatcagctcactgttctccacgtagacggggagctgtgtgcgagggatattaggtctttgatatttttaagcaaggacactatagggtctcgcagcacaccacagacattcttacactgggtgtactgtatggaaaacttagacctactgggtcccactgacgtggatgccctaatgtcaatgcttagatctttgtcaagagtagacctacagcgccaagtgcaaaccctaatgggccttcacctttccggcccatcacactcccaacactatcgccatacaccactcgagaccgatttctacgactacaaggacgacgatgacaagactagtggctccggcgagggcagaggaagtctactaacctgcggagatgtggaagaaaatcctggcccacatatgaccgagtacaagcccacggtgcgcctcgccacccgcgacgacgtccccagggccgtacgcaccctcgccgccgcgttcgccgactaccccgccacgcgccacaccgtcgatccggaccgccacatcgagcgggtcaccgagctgcaagaactcttcctcacgcgcgtcgggctcgacatcggcaaggtgtgggtcgcggacgacggcgccgcggtggcggtctggaccacgccggagagcgtcgaagcgggggcggtgttcgccgagatcggcccgcgcatggccgagttgagcggttcccggctggccgcgcagcaacagatggaaggcctcctggcgccgcaccggcccaaggagcccgcgtggttcctggccaccgtcggcgtctcgcccgaccaccagggcaagggtctgggcagcgccgtcgtgctccccggagtggaggcggccgagcgcgccggggtgcccgccttcctggagacctccgcgccccgcaacctccccttctacgagcggctcggcttcaccgtcaccgccgacgtcgaggtgcccgaaggaccgcgcacctggtgcatgacccgcaagcccggtgcctga

SEQ ID NO: 1096 - DNA, 2760 bp, Artificial Sequence
  Synthetic Polynucleotides
atggccttaccagtgaccgccttgctcctgccgctggccttgctgctccacgccgccaggccgcagtctgtgctgacacagcctcctagcctgtctgtggcccctggaaagacagccagcatcacatgcggcggcaacaacatcggcatgaagtccgtgcactggtatcagcagaggccaggacaggctcctgtgctggtcatctactacgacagcgacagaccctctggcatccccggcagattttccggcagcaactctggcaataccgccacactgaccatctccagagtggaagctggcgacgaggccgactactactgccaagtgtgggataccaccggcgatcaccctggctatgtgtttggcaccggcaccaaagtgacagtgcttggcggaggcggaagtggaggcggaggatctggcggcggaggctctcaagttcaactggttcagagcggagccgaagtgaagaaacctggcagcagcgtgaaggtgtcctgcaaagcaagcggcggcacctttagcagctacgccatctcttgggtccgacaggcacctggacaaggactggaatggatgggcggcatcatccccatcttcggcacagccaattacgcccagaaattccagggcagagtgaccatcaccgccgacgagtctacaagcaccgcctacatggaactgagcagcctgagaagcgaggacaccgccgtgtactattgtgccagaggcgtgtacggctacagcggctctgccccttatgatgagtggggccagggaaccctggtcaccgtttcttctacgcgtgagcagaaactgatctcggaagaggatctggcgaagcccaccacgacgccagcgccgcgaccaccaacaccggcgcccaccatcgcgtcgcagcccctgtccctgcgcccagaggcgtgccggccagcggcggggggcgcagtgcacacgagggggctggacttcgcctgtgacatctacatctgggcgcccttggccgggacttgtggggtccttctcctgtcactggttatcaccctttactgcgggcgcgccagagtgaagttcagcaggagcgcagacgcccccgcgtaccagcagggccagaaccagctctataacgagctgaatctaggacgaagagaggagtacgatgttttggacaagagacgtggccgggaccctgagatggggggaaagccgagaaggaagaaccctcaggaaggcctgtacaatgaactgcagaaagataagatggcggaggcctacagtgagattgggatgaaaggcgagcgccggaggggcaaggggcacgatggcctttaccagggtctcagtacagccaccaaggacacctacgacgcccttcacatgcaggccctgccccctcgctctagaggatctggagcaacaaacttctcactactcaaacaagcaggtgacgtggaggagaatcccgggcctgggatccacatggccacttacgaggttctctgtgaggtggcgcggaaactgggcacggatgacagggaagtggtattgttcctcctaaacgtgttcatacctcaacccacactggcccaattaattggagctcttagagctttaaaggaggagggcaggttaacgtttcccctgttagcggaatgtctgtttcgtgcaggtcgcagagacctcttgcgcgacctgcttcacttagacccgcgttttttagagcgccacctagcgggcacaatgagttatttcagcccttatcagctcactgttctccacgtagacggggagctgtgtgcgagggatattaggtctttgatatttttaagcaaggacactatagggtctcgcagcacaccacagacattcttacactgggtgtactgtatggaaaacttagacctactgggtcccactgacgtggatgccctaatgtcaatgcttagatctttgtcaagagtagacctacagcgccaagtgcaaaccctaatgggccttcacctttccggcccatcacactcccaacactatcgccatacaccactcgagaccgatttctacgactacaaggacgacgatgacaagactagtggctccggcgagggcagaggaagtctactaacctgcggagatgtggaagaaaatcctggcccacatatgaccgagtacaagcccacggtgcgcctcgccacccgcgacgacgtccccagggccgtacgcaccctcgccgccgcgttcgccgactaccccgccacgcgccacaccgtcgatccggaccgccacatcgagcgggtcaccgagctgcaagaactcttcctcacgcgcgtcgggctcgacatcggcaaggtgtgggtcgcggacgacggcgccgcggtggcggtctggaccacgccggagagcgtcgaagcgggggcggtgttcgccgagatcggcccgcgcatggccgagttgagcggttcccggctggccgcgcagcaacagatggaaggcctcctggcgccgcaccggcccaaggagcccgcgtggttcctggccaccgtcggcgtctcgcccgaccaccagggcaagggtctgggcagcgccgtcgtgctccccggagtggaggcggccgagcgcgccggggtgcccgccttcctggagacctccgcgccccgcaacctccccttctacgagcggctcggcttcaccgtcaccgccgacgtcgaggtgcccgaaggaccgcgcacctggtgcatgacccgcaagcccggtgcctga

SEQ ID NO: 1097 - DNA, 2778 bp, Artificial Sequence
  Synthetic Polynucleotides
atggccttaccagtgaccgccttgctcctgccgctggccttgctgctccacgccgccaggccggacgagatcgtgctgacccagagccctctgagcctgcctgtgacacctggcgagcctgccagcatctcctgtagaagcagccagagcctgctgcacagcaacggctacaactacctggactggtatctccagaagcccggccagagcccccaactgctgatctacctgggcagcaacagagccagcggcgtgcccgatagattttccggcagcggctccggcaccgacttcaccctgaagatcagccgggtggaagccgaggacgtgggcgtgtactactgtatgcaggccctccagaccccccggacctttggacagggcaccaaggtggaaatcaagcggggcggaggcggaagtggaggcggaggatctggcggcggaggctctcaggtgcaactggtgcagtctggcggcggagtggtgcagcctggaagaagcctgagactgagctgtgccgccagcggcttcaccttcagcagctacggaatgcactgggtgcgccaggcccctggcaaaggactggaatgggtggccgtgatctcctacgacggctccaacaagtattacgccgacagcgtgaagggccggttcaccatctccagagacaacagcaagaacaccctgtacctccagatgaacagcctgcgggccgaggacaccgccgtgtactattgcgccagagacttcgactacggcgacagctactactactatggcatggacgtgtggggccagggcacaaccgtgaccgtgtcatctacgcgtgagcagaaactgatctcggaagaggatctggcgaagcccaccacgacgccagcgccgcgaccaccaacaccggcgcccaccatcgcgtcgcagcccctgtccctgcgcccagaggcgtgccggccagcggcggggggcgcagtgcacacgagggggctggacttcgcctgtgacatctacatctgggcgcccttggccgggacttgtggggtccttctcctgtcactggttatcaccctttactgcgggcgcgccagagtgaagttcagcaggagcgcagacgcccccgcgtaccagcagggccagaaccagctctataacgagctgaatctaggacgaagagaggagtacgatgttttggacaagagacgtggccgggaccctgagatggggggaaagccgagaaggaagaaccctcaggaaggcctgtacaatgaactgcagaaagataagatggcggaggcctacagtgagattgggatgaaaggcgagcgccggaggggcaaggggcacgatggcctttaccagggtctcagtacagccaccaaggacacctacgacgcccttcacatgcaggccctgccccctcgctctagaggatctggagcaacaaacttctcactactcaaacaagcaggtgacgtggaggagaatcccgggcctgggatccacatggccacttacgaggttctctgtgaggtggcgcggaaactgggcacggatgacagggaagtggtattgttcctcctaaacgtgttcatacctcaacccacactggcccaattaattggagctcttagagctttaaaggaggagggcaggttaacgtttcccctgttagcggaatgtctgtttcgtgcaggtcgcagagacctcttgcgcgacctgcttcacttagacccgcgttttttagagcgccacctagcgggcacaatgagttatttcagcccttatcagctcactgttctccacgtagacggggagctgtgtgcgagggatattaggtctttgatatttttaagcaaggacactatagggtctcgcagcacaccacagacattcttacactgggtgtactgtatggaaaacttagacctactgggtcccactgacgtggatgccctaatgtcaatgcttagatctttgtcaagagtagacctacagcgccaagtgcaaaccctaatgggccttcacctttccggcccatcacactcccaacactatcgccatacaccactcgagaccgatttctacgactacaaggacgacgatgacaagactagtggctccggcgagggcagaggaagtctactaacctgcggagatgtggaagaaaatcctggcccacatatgaccgagtacaagcccacggtgcgcctcgccacccgcgacgacgtccccagggccgtacgcaccctcgccgccgcgttcgccgactaccccgccacgcgccacaccgtcgatccggaccgccacatcgagcgggtcaccgagctgcaagaactcttcctcacgcgcgtcgggctcgacatcggcaaggtgtgggtcgcggacgacggcgccgcggtggcggtctggaccacgccggagagcgtcgaagcgggggcggtgttcgccgagatcggcccgcgcatggccgagttgagcggttcccggctggccgcgcagcaacagatggaaggcctcctggcgccgcaccggcccaaggagcccgcgtggttcctggccaccgtcggcgtctcgcccgaccaccagggcaagggtctgggcagcgccgtcgtgctccccggagtggaggcggccgagcgcgccggggtgcccgccttcctggagacctccgcgccccgcaacctccccttctacgagcggctcggcttcaccgtcaccgccgacgtcgaggtgcccgaaggaccgcgcacctggtgcatgacccgcaagcccggtgcctga

SEQ ID NO: 1098 - DNA, 2760 bp, Artificial Sequence
  Synthetic Polynucleotides
atggccttaccagtgaccgccttgctcctgccgctggccttgctgctccacgccgccaggccggacgagatcgtgctgacacagagccctgccaccctgtctctgagccctggcgaaagagccaccctgagctgtagagccagccagagcgtgggcagctacctggcctggtatcagcagaagcctggcgctccccggctgctgatctacgatgcctctcacagagccaccggcatccccgccagattttctggcagcggctccggcaccgacttcaccctgacaatcagctccctggaacccgaggacttcgccgtgtactactgccagcagcggagcaactggccccccatgtataccttcggccagggcaccaagctggaaatcaagagaggcggaggcggaagtggaggcggaggatctggcggcggaggctctgaagtgcagctggtgcagtctggcgctgaggtgtccgtgaaggtgtcctgcaaagccagcggcggcaagaagcccggcagcacctttagcagctacaccatcagctgggtgcgccaggcacctggacagggcctggaatggatgggcggcatcatccccatcttcggcaccgccaactacgcccagaaattccagggcagagtgaccatcaccgccgacaagagcaccagcaccgcctacatggaactgagcagcctgcggagcgaggacacagccgtgtattattgtgccggcgacaccgacagcagcggctactatggcgctgtggactattggggccagggaaccctcgtgaccgtgtcctctacgcgtgagcagaaactgatctcggaagaggatctggcgaagcccaccacgacgccagcgccgcgaccaccaacaccggcgcccaccatcgcgtcgcagcccctgtccctgcgcccagaggcgtgccggccagcggcggggggcgcagtgcacacgagggggctggacttcgcctgtgacatctacatctgggcgcccttggccgggacttgtggggtccttctcctgtcactggttatcaccctttactgcgggcgcgccagagtgaagttcagcaggagcgcagacgcccccgcgtaccagcagggccagaaccagctctataacgagctgaatctaggacgaagagaggagtacgatgttttggacaagagacgtggccgggaccctgagatggggggaaagccgagaaggaagaaccctcaggaaggcctgtacaatgaactgcagaaagataagatggcggaggcctacagtgagattgggatgaaaggcgagcgccggaggggcaaggggcacgatggcctttaccagggtctcagtacagccaccaaggacacctacgacgcccttcacatgcaggccctgccccctcgctctagaggatctggagcaacaaacttctcactactcaaacaagcaggtgacgtggaggagaatcccgggcctgggatccacatggccacttacgaggttctctgtgaggtggcgcggaaactgggcacggatgacagggaagtggtattgttcctcctaaacgtgttcatacctcaacccacactggcccaattaattggagctcttagagctttaaaggaggagggcaggttaacgtttcccctgttagcggaatgtctgtttcgtgcaggtcgcagagacctcttgcgcgacctgcttcacttagacccgcgttttttagagcgccacctagcgggcacaatgagttatttcagcccttatcagctcactgttctccacgtagacggggagctgtgtgcgagggatattaggtctttgatatttttaagcaaggacactatagggtctcgcagcacaccacagacattcttacactgggtgtactgtatggaaaacttagacctactgggtcccactgacgtggatgccctaatgtcaatgcttagatctttgtcaagagtagacctacagcgccaagtgcaaaccctaatgggccttcacctttccggcccatcacactcccaacactatcgccatacaccactcgagaccgatttctacgactacaaggacgacgatgacaagactagtggctccggcgagggcagaggaagtctactaacctgcggagatgtggaagaaaatcctggcccacatatgaccgagtacaagcccacggtgcgcctcgccacccgcgacgacgtccccagggccgtacgcaccctcgccgccgcgttcgccgactaccccgccacgcgccacaccgtcgatccggaccgccacatcgagcgggtcaccgagctgcaagaactcttcctcacgcgcgtcgggctcgacatcggcaaggtgtgggtcgcggacgacggcgccgcggtggcggtctggaccacgccggagagcgtcgaagcgggggcggtgttcgccgagatcggcccgcgcatggccgagttgagcggttcccggctggccgcgcagcaacagatggaaggcctcctggcgccgcaccggcccaaggagcccgcgtggttcctggccaccgtcggcgtctcgcccgaccaccagggcaagggtctgggcagcgccgtcgtgctccccggagtggaggcggccgagcgcgccggggtgcccgccttcctggagacctccgcgccccgcaacctccccttctacgagcggctcggcttcaccgtcaccgccgacgtcgaggtgcccgaaggaccgcgcacctggtgcatgacccgcaagcccggtgcctga

SEQ ID NO: 1099 - DNA, 2709 bp, Artificial Sequence
  Synthetic Polynucleotides
atggccttaccagtgaccgccttgctcctgccgctggccttgctgctccacgccgccaggccggacatccagatgacccagagccccagcagcctgtctgccagcgtgggcgacagagtgaccatcacctgtcaggccagccaggacatcaacaactacctgaactggtatcagcagaagcccggcaaggcccccaagctgctgatctacgacgccagcaatctgcagaccggcgtgcccagcagattttccggctctggcagcggcaccgacttcaccttcaccatcgaggacattgccacctactactgccagcagtacaccttcggccctggcaccaaggtggacatcaaaggcggaggcggaagtggaggcggaggatctggcggcggaggctctgaagtgcaactgctggaatctggcggcggactggtgcagcctggcggatctctgagactgagctgtgccgccagcggcttcacctttagctggtacagcatgacctgggtgcgccaggcccctggcaaaggactggaatgggtgtccagcatcgtgccctggggcgatttcacccagtacgccgatagcgtgaagggccggttcaccatcagccgggacaacagcaagaacaccctgtacctgcagatgaacagcctgcgggccgaggacaccgccgtgtactattgtgccaagggacctggctggggcagcttcgatctgtggggcagaggaacccttgtgaccgtgtccagcacgcgtgagcagaaactgatctcggaagaggatctggcgaagcccaccacgacgccagcgccgcgaccaccaacaccggcgcccaccatcgcgtcgcagcccctgtccctgcgcccagaggcgtgccggccagcggcggggggcgcagtgcacacgagggggctggacttcgcctgtgacatctacatctgggcgcccttggccgggacttgtggggtccttctcctgtcactggttatcaccctttactgcgggcgcgccagagtgaagttcagcaggagcgcagacgcccccgcgtaccagcagggccagaaccagctctataacgagctgaatctaggacgaagagaggagtacgatgttttggacaagagacgtggccgggaccctgagatggggggaaagccgagaaggaagaaccctcaggaaggcctgtacaatgaactgcagaaagataagatggcggaggcctacagtgagattgggatgaaaggcgagcgccggaggggcaaggggcacgatggcctttaccagggtctcagtacagccaccaaggacacctacgacgcccttcacatgcaggccctgccccctcgctctagaggatctggagcaacaaacttctcactactcaaacaagcaggtgacgtggaggagaatcccgggcctgggatccacatggccacttacgaggttctctgtgaggtggcgcggaaactgggcacggatgacagggaagtggtattgttcctcctaaacgtgttcatacctcaacccacactggcccaattaattggagctcttagagctttaaaggaggagggcaggttaacgtttcccctgttagcggaatgtctgtttcgtgcaggtcgcagagacctcttgcgcgacctgcttcacttagacccgcgttttttagagcgccacctagcgggcacaatgagttatttcagcccttatcagctcactgttctccacgtagacggggagctgtgtgcgagggatattaggtctttgatatttttaagcaaggacactatagggtctcgcagcacaccacagacattcttacactgggtgtactgtatggaaaacttagacctactgggtcccactgacgtggatgccctaatgtcaatgcttagatctttgtcaagagtagacctacagcgccaagtgcaaaccctaatgggccttcacctttccggcccatcacactcccaacactatcgccatacaccactcgagaccgatttctacgactacaaggacgacgatgacaagactagtggctccggcgagggcagaggaagtctactaacctgcggagatgtggaagaaaatcctggcccacatatgaccgagtacaagcccacggtgcgcctcgccacccgcgacgacgtccccagggccgtacgcaccctcgccgccgcgttcgccgactaccccgccacgcgccacaccgtcgatccggaccgccacatcgagcgggtcaccgagctgcaagaactcttcctcacgcgcgtcgggctcgacatcggcaaggtgtgggtcgcggacgacggcgccgcggtggcggtctggaccacgccggagagcgtcgaagcgggggcggtgttcgccgagatcggcccgcgcatggccgagttgagcggttcccggctggccgcgcagcaacagatggaaggcctcctggcgccgcaccggcccaaggagcccgcgtggttcctggccaccgtcggcgtctcgcccgaccaccagggcaagggtctgggcagcgccgtcgtgctccccggagtggaggcggccgagcgcgccggggtgcccgccttcctggagacctccgcgccccgcaacctccccttctacgagcggctcggcttcaccgtcaccgccgacgtcgaggtgcccgaaggaccgcgcacctggtgcatgacccgcaagcccggtgcctga

SEQ ID NO: 1100 - DNA, 2376 bp, Artificial Sequence
  Synthetic Polynucleotides
atggactggatttggcgcatccttttccttgtcggcgctgctaccggcgcccattccgaggttcagttggtcgaatcaggcgggggcctcgtccaacccggcggaagcctgcggctgtcttgcgcagcaagtggtagtgtgttcaagatcaacgttatggcctggtatcgccaggctccgggaaaagggagagagctggttgcggggatcattagcggtggctccaccagctacgctgacagtgtgaagggaaggttcactatatcacgcgacaacgcaaagaatacattgtacctccagatgaatagcttgcggcccgaagacacggcagtctactattgtgcctttatcacaacagagagcgactatgacctgggccgccggtattgggggcagggaacccttgtgaccgtttcatccacgcgtgagcagaaactgatctcggaagaggatctggcgaagcccaccacgacgccagcgccgcgaccaccaacaccggcgcccaccatcgcgtcgcagcccctgtccctgcgcccagaggcgtgccggccagcggcggggggcgcagtgcacacgagggggctggacttcgcctgtgacatctacatctgggcgcccttggccgggacttgtggggtccttctcctgtcactggttatcaccctttactgcgggcgcgccagagtgaagttcagcaggagcgcagacgcccccgcgtaccagcagggccagaaccagctctataacgagctgaatctaggacgaagagaggagtacgatgttttggacaagagacgtggccgggaccctgagatggggggaaagccgagaaggaagaaccctcaggaaggcctgtacaatgaactgcagaaagataagatggcggaggcctacagtgagattgggatgaaaggcgagcgccggaggggcaaggggcacgatggcctttaccagggtctcagtacagccaccaaggacacctacgacgcccttcacatgcaggccctgccccctcgctctagaggatctggagcaacaaacttctcactactcaaacaagcaggtgacgtggaggagaatcccgggcctgggatccacatggccacttacgaggttctctgtgaggtggcgcggaaactgggcacggatgacagggaagtggtattgttcctcctaaacgtgttcatacctcaacccacactggcccaattaattggagctcttagagctttaaaggaggagggcaggttaacgtttcccctgttagcggaatgtctgtttcgtgcaggtcgcagagacctcttgcgcgacctgcttcacttagacccgcgttttttagagcgccacctagcgggcacaatgagttatttcagcccttatcagctcactgttctccacgtagacggggagctgtgtgcgagggatattaggtctttgatatttttaagcaaggacactatagggtctcgcagcacaccacagacattcttacactgggtgtactgtatggaaaacttagacctactgggtcccactgacgtggatgccctaatgtcaatgcttagatctttgtcaagagtagacctacagcgccaagtgcaaaccctaatgggccttcacctttccggcccatcacactcccaacactatcgccatacaccactcgagaccgatttctacgactacaaggacgacgatgacaagactagtggctccggcgagggcagaggaagtctactaacctgcggagatgtggaagaaaatcctggcccacatatgaccgagtacaagcccacggtgcgcctcgccacccgcgacgacgtccccagggccgtacgcaccctcgccgccgcgttcgccgactaccccgccacgcgccacaccgtcgatccggaccgccacatcgagcgggtcaccgagctgcaagaactcttcctcacgcgcgtcgggctcgacatcggcaaggtgtgggtcgcggacgacggcgccgcggtggcggtctggaccacgccggagagcgtcgaagcgggggcggtgttcgccgagatcggcccgcgcatggccgagttgagcggttcccggctggccgcgcagcaacagatggaaggcctcctggcgccgcaccggcccaaggagcccgcgtggttcctggccaccgtcggcgtctcgcccgaccaccagggcaagggtctgggcagcgccgtcgtgctccccggagtggaggcggccgagcgcgccggggtgcccgccttcctggagacctccgcgccccgcaacctccccttctacgagcggctcggcttcaccgtcaccgccgacgtcgaggtgcccgaaggaccgcgcacctggtgcatgacccgcaagcccggtgcctga

SEQ ID NO: 1101 - DNA, 2739 bp, Artificial Sequence
  Synthetic Polynucleotides
atggccttaccagtgaccgccttgctcctgccgctggccttgctgctccacgccgccaggccggacatccagatgacccagagccccagcagcctgtctgccagcgtgggcgacagagtgaccatcacctgtaccgccagcctgagcgtgtccagcacctacctgcactggtatcagcagaagcccggcagcagccccaagctgtggatctacagcaccagcaacctggcctccggcgtgcccagcagattttctggcagcggctctggcaccagctacaccctgaccatcagctccctccagcccgaggacttcgccacctactactgccaccagtaccacagaagccccctgacctttggcggaggcaccaaggtggaaatcaagagaggcggaggcggaagtggaggcggaggatctggcggcggaggctctgaagtgcaactggtggaatctggcggcggactggtgcagcctggcggatctctgagactgagctgtgccgccagcggcttcagcctgaccaaatacggcgtgcactgggtgcgccaggcccctggaaaaggactggaatgggtgggagtgaagtgggctggcggctccaccgactacaacagcgccctgatgagccggttcaccatcagcaaggacaacgccaagaacagcctgtacctccagatgaactccctgcgggccgaggacaccgccgtgtactactgtgccagagatcaccgggacgctatggactactggggccagggaacactcgtgaccgtgtcctctacgcgtgagcagaaactgatctcggaagaggatctggcgaagcccaccacgacgccagcgccgcgaccaccaacaccggcgcccaccatcgcgtcgcagcccctgtccctgcgcccagaggcgtgccggccagcggcggggggcgcagtgcacacgagggggctggacttcgcctgtgacatctacatctgggcgcccttggccgggacttgtggggtccttctcctgtcactggttatcaccctttactgcgggcgcgccagagtgaagttcagcaggagcgcagacgcccccgcgtaccagcagggccagaaccagctctataacgagctgaatctaggacgaagagaggagtacgatgttttggacaagagacgtggccgggaccctgagatggggggaaagccgagaaggaagaaccctcaggaaggcctgtacaatgaactgcagaaagataagatggcggaggcctacagtgagattgggatgaaaggcgagcgccggaggggcaaggggcacgatggcctttaccagggtctcagtacagccaccaaggacacctacgacgcccttcacatgcaggccctgccccctcgctctagaggatctggagcaacaaacttctcactactcaaacaagcaggtgacgtggaggagaatcccgggcctgggatccacatggccacttacgaggttctctgtgaggtggcgcggaaactgggcacggatgacagggaagtggtattgttcctcctaaacgtgttcatacctcaacccacactggcccaattaattggagctcttagagctttaaaggaggagggcaggttaacgtttcccctgttagcggaatgtctgtttcgtgcaggtcgcagagacctcttgcgcgacctgcttcacttagacccgcgttttttagagcgccacctagcgggcacaatgagttatttcagcccttatcagctcactgttctccacgtagacggggagctgtgtgcgagggatattaggtctttgatatttttaagcaaggacactatagggtctcgcagcacaccacagacattcttacactgggtgtactgtatggaaaacttagacctactgggtcccactgacgtggatgccctaatgtcaatgcttagatctttgtcaagagtagacctacagcgccaagtgcaaaccctaatgggccttcacctttccggcccatcacactcccaacactatcgccatacaccactcgagaccgatttctacgactacaaggacgacgatgacaagactagtggctccggcgagggcagaggaagtctactaacctgcggagatgtggaagaaaatcctggcccacatatgaccgagtacaagcccacggtgcgcctcgccacccgcgacgacgtccccagggccgtacgcaccctcgccgccgcgttcgccgactaccccgccacgcgccacaccgtcgatccggaccgccacatcgagcgggtcaccgagctgcaagaactcttcctcacgcgcgtcgggctcgacatcggcaaggtgtgggtcgcggacgacggcgccgcggtggcggtctggaccacgccggagagcgtcgaagcgggggcggtgttcgccgagatcggcccgcgcatggccgagttgagcggttcccggctggccgcgcagcaacagatggaaggcctcctggcgccgcaccggcccaaggagcccgcgtggttcctggccaccgtcggcgtctcgcccgaccaccagggcaagggtctgggcagcgccgtcgtgctccccggagtggaggcggccgagcgcgccggggtgcccgccttcctggagacctccgcgccccgcaacctccccttctacgagcggctcggcttcaccgtcaccgccgacgtcgaggtgcccgaaggaccgcgcacctggtgcatgacccgcaagcccggtgcctga

SEQ ID NO: 1102 - DNA, 2751 bp, Artificial Sequence
  Synthetic Polynucleotides
atggccttaccagtgaccgccttgctcctgccgctggccttgctgctccacgccgccaggccggacatccagatgacccagagccccagcagcctgtctgccagcgtgggcgacagagtgaccatcacatgcaaggccagccaggacgtgggaacagccgtggcctggtatcagcagaagcctggcaaggcccccaagctgctgatctacagcgccagctacagatccaccggcgtgcccagcagattttccggctctggcagcggcaccgacttcaccctgaccatctctagcctccagcccgaggacttcgccacctactactgccagcaccactactccgccccctggacatttggcggaggcaccaaggtggaaatcaagggcggaggcggaagtggaggcggaggatctggcggcggaggctctgaagtgcaactggtggaatcaggcggcggactggtgcagcctggcggatctctgagactgagctgtgccgccagcggcttcaccttcagcagaaacggcatgagctgggtgcgccaggcccctggaaaaggactggaatgggtggcaaccgtgtccagcggcggcagctacatctactacgccgacagcgtgaagggccggttcaccatctccagagacaacgccaagaacagcctgtacctccagatgaactccctgcgggccgaggacaccgccgtgtactattgtgccagacagggcaccaccgccctggctaccagattcttcgatgtgtggggccagggcaccctcgtgaccgtgtcatctacgcgtgagcagaaactgatctcggaagaggatctggcgaagcccaccacgacgccagcgccgcgaccaccaacaccggcgcccaccatcgcgtcgcagcccctgtccctgcgcccagaggcgtgccggccagcggcggggggcgcagtgcacacgagggggctggacttcgcctgtgacatctacatctgggcgcccttggccgggacttgtggggtccttctcctgtcactggttatcaccctttactgcgggcgcgccagagtgaagttcagcaggagcgcagacgcccccgcgtaccagcagggccagaaccagctctataacgagctgaatctaggacgaagagaggagtacgatgttttggacaagagacgtggccgggaccctgagatggggggaaagccgagaaggaagaaccctcaggaaggcctgtacaatgaactgcagaaagataagatggcggaggcctacagtgagattgggatgaaaggcgagcgccggaggggcaaggggcacgatggcctttaccagggtctcagtacagccaccaaggacacctacgacgcccttcacatgcaggccctgccccctcgctctagaggatctggagcaacaaacttctcactactcaaacaagcaggtgacgtggaggagaatcccgggcctgggatccacatggccacttacgaggttctctgtgaggtggcgcggaaactgggcacggatgacagggaagtggtattgttcctcctaaacgtgttcatacctcaacccacactggcccaattaattggagctcttagagctttaaaggaggagggcaggttaacgtttcccctgttagcggaatgtctgtttcgtgcaggtcgcagagacctcttgcgcgacctgcttcacttagacccgcgttttttagagcgccacctagcgggcacaatgagttatttcagcccttatcagctcactgttctccacgtagacggggagctgtgtgcgagggatattaggtctttgatatttttaagcaaggacactatagggtctcgcagcacaccacagacattcttacactgggtgtactgtatggaaaacttagacctactgggtcccactgacgtggatgccctaatgtcaatgcttagatctttgtcaagagtagacctacagcgccaagtgcaaaccctaatgggccttcacctttccggcccatcacactcccaacactatcgccatacaccactcgagaccgatttctacgactacaaggacgacgatgacaagactagtggctccggcgagggcagaggaagtctactaacctgcggagatgtggaagaaaatcctggcccacatatgaccgagtacaagcccacggtgcgcctcgccacccgcgacgacgtccccagggccgtacgcaccctcgccgccgcgttcgccgactaccccgccacgcgccacaccgtcgatccggaccgccacatcgagcgggtcaccgagctgcaagaactcttcctcacgcgcgtcgggctcgacatcggcaaggtgtgggtcgcggacgacggcgccgcggtggcggtctggaccacgccggagagcgtcgaagcgggggcggtgttcgccgagatcggcccgcgcatggccgagttgagcggttcccggctggccgcgcagcaacagatggaaggcctcctggcgccgcaccggcccaaggagcccgcgtggttcctggccaccgtcggcgtctcgcccgaccaccagggcaagggtctgggcagcgccgtcgtgctccccggagtggaggcggccgagcgcgccggggtgcccgccttcctggagacctccgcgccccgcaacctccccttctacgagcggctcggcttcaccgtcaccgccgacgtcgaggtgcccgaaggaccgcgcacctggtgcatgacccgcaagcccggtgcctga

SEQ ID NO: 1103 - DNA, 2769 bp, Artificial Sequence
  Synthetic Polynucleotides
atggccttaccagtgaccgccttgctcctgccgctggccttgctgctccacgccgccaggccggacatcgtgatgacccagagccccagcagcctgaccatgagcgtgggccagaaagtgaccatgtcctgcaagagcagccacagcctgctgaacagccggaaccagaagaactacctggcctggttccagcagaagcccggccagtcccccaagctgctggtgtacttcgcaagcacccgcgagagcggcgtgcccgacagattcatcggcagcggctccggcaccgacttcaccctgaccatcagcaacgtgcaggccgaggacctggccgactacttctgccagcagcactacaccaccctgcccaccttcggcggaggcaccaagctggaaatcaagggcggaggcggaagtggaggcggaggatctggcggcggaggctctcagatccagctggtgcagagcggccctgacctgaagaaacccggcgagacagtgaagatcagttgcaaggcctccggctacaccttcaccaacacaggcatgaactgggtcaagcaggcccctggcaagggcctgaagtggatgggctggatcaacacctacaccggcgagcccacctacgccgacgacttcaagggccggttcaccttcagcctggaaaccagcgccagcaccgcctacctgcagatcaacaacctgaagaacgaggacaccgccacctatttctgcaccagatggggctacggcagcagcctgtactacgccatggactactggggccagggcaccagcgtgaccgtgtcctctacgcgtgagcagaaactgatctcggaagaggatctggcgaagcccaccacgacgccagcgccgcgaccaccaacaccggcgcccaccatcgcgtcgcagcccctgtccctgcgcccagaggcgtgccggccagcggcggggggcgcagtgcacacgagggggctggacttcgcctgtgacatctacatctgggcgcccttggccgggacttgtggggtccttctcctgtcactggttatcaccctttactgcgggcgcgccagagtgaagttcagcaggagcgcagacgcccccgcgtaccagcagggccagaaccagctctataacgagctgaatctaggacgaagagaggagtacgatgttttggacaagagacgtggccgggaccctgagatggggggaaagccgagaaggaagaaccctcaggaaggcctgtacaatgaactgcagaaagataagatggcggaggcctacagtgagattgggatgaaaggcgagcgccggaggggcaaggggcacgatggcctttaccagggtctcagtacagccaccaaggacacctacgacgcccttcacatgcaggccctgccccctcgctctagaggatctggagcaacaaacttctcactactcaaacaagcaggtgacgtggaggagaatcccgggcctgggatccacatggccacttacgaggttctctgtgaggtggcgcggaaactgggcacggatgacagggaagtggtattgttcctcctaaacgtgttcatacctcaacccacactggcccaattaattggagctcttagagctttaaaggaggagggcaggttaacgtttcccctgttagcggaatgtctgtttcgtgcaggtcgcagagacctcttgcgcgacctgcttcacttagacccgcgttttttagagcgccacctagcgggcacaatgagttatttcagcccttatcagctcactgttctccacgtagacggggagctgtgtgcgagggatattaggtctttgatatttttaagcaaggacactatagggtctcgcagcacaccacagacattcttacactgggtgtactgtatggaaaacttagacctactgggtcccactgacgtggatgccctaatgtcaatgcttagatctttgtcaagagtagacctacagcgccaagtgcaaaccctaatgggccttcacctttccggcccatcacactcccaacactatcgccatacaccactcgagaccgatttctacgactacaaggacgacgatgacaagactagtggctccggcgagggcagaggaagtctactaacctgcggagatgtggaagaaaatcctggcccacatatgaccgagtacaagcccacggtgcgcctcgccacccgcgacgacgtccccagggccgtacgcaccctcgccgccgcgttcgccgactaccccgccacgcgccacaccgtcgatccggaccgccacatcgagcgggtcaccgagctgcaagaactcttcctcacgcgcgtcgggctcgacatcggcaaggtgtgggtcgcggacgacggcgccgcggtggcggtctggaccacgccggagagcgtcgaagcgggggcggtgttcgccgagatcggcccgcgcatggccgagttgagcggttcccggctggccgcgcagcaacagatggaaggcctcctggcgccgcaccggcccaaggagcccgcgtggttcctggccaccgtcggcgtctcgcccgaccaccagggcaagggtctgggcagcgccgtcgtgctccccggagtggaggcggccgagcgcgccggggtgcccgccttcctggagacctccgcgccccgcaacctccccttctacgagcggctcggcttcaccgtcaccgccgacgtcgaggtgcccgaaggaccgcgcacctggtgcatgacccgcaagcccggtgcctga

SEQ ID NO: 1104 - DNA, 2739 bp, Artificial Sequence
  Synthetic Polynucleotides
atggccttaccagtgaccgccttgctcctgccgctggccttgctgctccacgccgccaggccggacatccagatgacccagagcccccctagcctgtctgcctctgtgggcggcaaagtgaccatcacatgcaaggccagccaggacatcgaccgctacatggcctggtatcaggacaagcccggcaagggacccaagctgctgatccacgataccagcaccctccagcccggcatccccagcagattttctggcagcggctccggcagagactacagcttcagcatcagcaacctggaacccgaggacattgccacctactactgcctccagtacgacaacctgtggaccttcggcggaggcaccaagctggaaatcaagagaggcggaggcggaagtggaggcggaggatctggcggcggaggctctcaggtgcaactggtgcagagcggagccgagcttgtgaagcctggcgcttccgtgaagatgagctgcaaagccagcggctacatcttcaccaactacaacatccactgggtcaagaagtccccaggccagggcctggaatggatcggagccatctaccccggaaacggcgacgccccttacagccagaagttccaggacagagccaccctgaccgccgacaccagcagcagcaccacctacatggaactgagcagcctgaccagcgaggacagcgccgtgtactattgcgtgcgggccaactgggatgtggccttcgcctattggggccagggcacactggtgtccgtgtcctctacgcgtgagcagaaactgatctcggaagaggatctggcgaagcccaccacgacgccagcgccgcgaccaccaacaccggcgcccaccatcgcgtcgcagcccctgtccctgcgcccagaggcgtgccggccagcggcggggggcgcagtgcacacgagggggctggacttcgcctgtgacatctacatctgggcgcccttggccgggacttgtggggtccttctcctgtcactggttatcaccctttactgcgggcgcgccagagtgaagttcagcaggagcgcagacgcccccgcgtaccagcagggccagaaccagctctataacgagctgaatctaggacgaagagaggagtacgatgttttggacaagagacgtggccgggaccctgagatggggggaaagccgagaaggaagaaccctcaggaaggcctgtacaatgaactgcagaaagataagatggcggaggcctacagtgagattgggatgaaaggcgagcgccggaggggcaaggggcacgatggcctttaccagggtctcagtacagccaccaaggacacctacgacgcccttcacatgcaggccctgccccctcgctctagaggatctggagcaacaaacttctcactactcaaacaagcaggtgacgtggaggagaatcccgggcctgggatccacatggccacttacgaggttctctgtgaggtggcgcggaaactgggcacggatgacagggaagtggtattgttcctcctaaacgtgttcatacctcaacccacactggcccaattaattggagctcttagagctttaaaggaggagggcaggttaacgtttcccctgttagcggaatgtctgtttcgtgcaggtcgcagagacctcttgcgcgacctgcttcacttagacccgcgttttttagagcgccacctagcgggcacaatgagttatttcagcccttatcagctcactgttctccacgtagacggggagctgtgtgcgagggatattaggtctttgatatttttaagcaaggacactatagggtctcgcagcacaccacagacattcttacactgggtgtactgtatggaaaacttagacctactgggtcccactgacgtggatgccctaatgtcaatgcttagatctttgtcaagagtagacctacagcgccaagtgcaaaccctaatgggccttcacctttccggcccatcacactcccaacactatcgccatacaccactcgagaccgatttctacgactacaaggacgacgatgacaagactagtggctccggcgagggcagaggaagtctactaacctgcggagatgtggaagaaaatcctggcccacatatgaccgagtacaagcccacggtgcgcctcgccacccgcgacgacgtccccagggccgtacgcaccctcgccgccgcgttcgccgactaccccgccacgcgccacaccgtcgatccggaccgccacatcgagcgggtcaccgagctgcaagaactcttcctcacgcgcgtcgggctcgacatcggcaaggtgtgggtcgcggacgacggcgccgcggtggcggtctggaccacgccggagagcgtcgaagcgggggcggtgttcgccgagatcggcccgcgcatggccgagttgagcggttcccggctggccgcgcagcaacagatggaaggcctcctggcgccgcaccggcccaaggagcccgcgtggttcctggccaccgtcggcgtctcgcccgaccaccagggcaagggtctgggcagcgccgtcgtgctccccggagtggaggcggccgagcgcgccggggtgcccgccttcctggagacctccgcgccccgcaacctccccttctacgagcggctcggcttcaccgtcaccgccgacgtcgaggtgcccgaaggaccgcgcacctggtgcatgacccgcaagcccggtgcctga

SEQ ID NO: 1105 - DNA, 2742 bp, Artificial Sequence
  Synthetic Polynucleotides
atggccttaccagtgaccgccttgctcctgccgctggccttgctgctccacgccgccaggccggacatccagatgacccagagccctgccagcctgtctgcctctgtgggcgagacagtgaccatcacctgtcgggtgtccggcaacatccacaactacctggcctggtatcagcagaagcagggcaagagcccccaactgctggtgtacaacgccaagaccctggccgatggcgtgcccagcagattttctggctctggcagcggcacccagtacagcctgaagatcaacagcctccagcccgaggacttcggcagctactactgccagcacttctggtccaacccctacaccttcggcggaggcaccaagctggaaatcaagggcggaggcggaagtggaggcggaggatctggcggcggaggctctcaggtgcaactccagcagtctggcgcttccgtgaaggtgtcctgcaaggccagcgaactcgtgcggcctggcacaggctacgccttcaccaattacctgatcgagtgggtcaagcagaggcccggacagggcctggaatggatcggagtgattaacccaggcagcggcggcaccaactacaacgagaagttcaagggcaaggccaccctgaccgccgacaagagcagcagcacagcctacatgcaactgagcagcctgaccagcgacgacagcgccgtgtacttctgcgcccggtacagaagctacgactggtacttcgacgtgtggggagccggcaccaccgtgacagtgtcatctacgcgtgagcagaaactgatctcggaagaggatctggcgaagcccaccacgacgccagcgccgcgaccaccaacaccggcgcccaccatcgcgtcgcagcccctgtccctgcgcccagaggcgtgccggccagcggcggggggcgcagtgcacacgagggggctggacttcgcctgtgacatctacatctgggcgcccttggccgggacttgtggggtccttctcctgtcactggttatcaccctttactgcgggcgcgccagagtgaagttcagcaggagcgcagacgcccccgcgtaccagcagggccagaaccagctctataacgagctgaatctaggacgaagagaggagtacgatgttttggacaagagacgtggccgggaccctgagatggggggaaagccgagaaggaagaaccctcaggaaggcctgtacaatgaactgcagaaagataagatggcggaggcctacagtgagattgggatgaaaggcgagcgccggaggggcaaggggcacgatggcctttaccagggtctcagtacagccaccaaggacacctacgacgcccttcacatgcaggccctgccccctcgctctagaggatctggagcaacaaacttctcactactcaaacaagcaggtgacgtggaggagaatcccgggcctgggatccacatggccacttacgaggttctctgtgaggtggcgcggaaactgggcacggatgacagggaagtggtattgttcctcctaaacgtgttcatacctcaacccacactggcccaattaattggagctcttagagctttaaaggaggagggcaggttaacgtttcccctgttagcggaatgtctgtttcgtgcaggtcgcagagacctcttgcgcgacctgcttcacttagacccgcgttttttagagcgccacctagcgggcacaatgagttatttcagcccttatcagctcactgttctccacgtagacggggagctgtgtgcgagggatattaggtctttgatatttttaagcaaggacactatagggtctcgcagcacaccacagacattcttacactgggtgtactgtatggaaaacttagacctactgggtcccactgacgtggatgccctaatgtcaatgcttagatctttgtcaagagtagacctacagcgccaagtgcaaaccctaatgggccttcacctttccggcccatcacactcccaacactatcgccatacaccactcgagaccgatttctacgactacaaggacgacgatgacaagactagtggctccggcgagggcagaggaagtctactaacctgcggagatgtggaagaaaatcctggcccacatatgaccgagtacaagcccacggtgcgcctcgccacccgcgacgacgtccccagggccgtacgcaccctcgccgccgcgttcgccgactaccccgccacgcgccacaccgtcgatccggaccgccacatcgagcgggtcaccgagctgcaagaactcttcctcacgcgcgtcgggctcgacatcggcaaggtgtgggtcgcggacgacggcgccgcggtggcggtctggaccacgccggagagcgtcgaagcgggggcggtgttcgccgagatcggcccgcgcatggccgagttgagcggttcccggctggccgcgcagcaacagatggaaggcctcctggcgccgcaccggcccaaggagcccgcgtggttcctggccaccgtcggcgtctcgcccgaccaccagggcaagggtctgggcagcgccgtcgtgctccccggagtggaggcggccgagcgcgccggggtgcccgccttcctggagacctccgcgccccgcaacctccccttctacgagcggctcggcttcaccgtcaccgccgacgtcgaggtgcccgaaggaccgcgcacctggtgcatgacccgcaagcccggtgcctga

SEQ ID NO: 1106 - DNA, 2757 bp, Artificial Sequence
  Synthetic Polynucleotides
atggccttaccagtgaccgccttgctcctgccgctggccttgctgctccacgccgccaggccggacgacatccagatgacccagagccccagcagcctgtctgccagcgtgggcgacagagtgaccatcacctgtcggagcagccagcggatcgtgcacagcaacggcaacacctacctggaatggtatcagcagacccccggcaaggcccccaagctgctgatctacaaggtgtccaacagattcagcggcgtgcccagcaggtttagcggctctggcagcggcaccgactacacccctaccatctctagcctccagcccgaggacattgccacctactactgttttcaaggcagccacgtgccccccaccttcggccagggaacaaagctccagatcaccggcggaggcggaagtggaggcggaggatctggcggcggaggctctgaggtgcaactggtggaatctggcggcggagtggtgcagcctggcagaagcctgagactgagctgtagcagcagcggccctaccttcagcgactactacatgtactgggtgcgccaggcccctggcaagggactggaatgggtggcctacatgagcaacgtgggagccatcaccgattaccccgacaccgtgaagggcagacccaccatcagccgggacaacagcaagaataccctgttcctgatggacagcctgcggcccgaggataccggcgtgtacttttgcgccagaggcaccagggacggcagttggttcgcctattggggccagggcacacccgtgaccgtgtctagtacgcgtgagcagaaactgatctcggaagaggatctggcgaagcccaccacgacgccagcgccgcgaccaccaacaccggcgcccaccatcgcgtcgcagcccctgtccctgcgcccagaggcgtgccggccagcggcggggggcgcagtgcacacgagggggctggacttcgcctgtgacatctacatctgggcgcccttggccgggacttgtggggtccttctcctgtcactggttatcaccctttactgcgggcgcgccagagtgaagttcagcaggagcgcagacgcccccgcgtaccagcagggccagaaccagctctataacgagctgaatctaggacgaagagaggagtacgatgttttggacaagagacgtggccgggaccctgagatggggggaaagccgagaaggaagaaccctcaggaaggcctgtacaatgaactgcagaaagataagatggcggaggcctacagtgagattgggatgaaaggcgagcgccggaggggcaaggggcacgatggcctttaccagggtctcagtacagccaccaaggacacctacgacgcccttcacatgcaggccctgccccctcgctctagaggatctggagcaacaaacttctcactactcaaacaagcaggtgacgtggaggagaatcccgggcctgggatccacatggccacttacgaggttctctgtgaggtggcgcggaaactgggcacggatgacagggaagtggtattgttcctcctaaacgtgttcatacctcaacccacactggcccaattaattggagctcttagagctttaaaggaggagggcaggttaacgtttcccctgttagcggaatgtctgtttcgtgcaggtcgcagagacctcttgcgcgacctgcttcacttagacccgcgttttttagagcgccacctagcgggcacaatgagttatttcagcccttatcagctcactgttctccacgtagacggggagctgtgtgcgagggatattaggtctttgatatttttaagcaaggacactatagggtctcgcagcacaccacagacattcttacactgggtgtactgtatggaaaacttagacctactgggtcccactgacgtggatgccctaatgtcaatgcttagatctttgtcaagagtagacctacagcgccaagtgcaaaccctaatgggccttcacctttccggcccatcacactcccaacactatcgccatacaccactcgagaccgatttctacgactacaaggacgacgatgacaagactagtggctccggcgagggcagaggaagtctactaacctgcggagatgtggaagaaaatcctggcccacatatgaccgagtacaagcccacggtgcgcctcgccacccgcgacgacgtccccagggccgtacgcaccctcgccgccgcgttcgccgactaccccgccacgcgccacaccgtcgatccggaccgccacatcgagcgggtcaccgagctgcaagaactcttcctcacgcgcgtcgggctcgacatcggcaaggtgtgggtcgcggacgacggcgccgcggtggcggtctggaccacgccggagagcgtcgaagcgggggcggtgttcgccgagatcggcccgcgcatggccgagttgagcggttcccggctggccgcgcagcaacagatggaaggcctcctggcgccgcaccggcccaaggagcccgcgtggttcctggccaccgtcggcgtctcgcccgaccaccagggcaagggtctgggcagcgccgtcgtgctccccggagtggaggcggccgagcgcgccggggtgcccgccttcctggagacctccgcgccccgcaacctccccttctacgagcggctcggcttcaccgtcaccgccgacgtcgaggtgcccgaaggaccgcgcacctggtgcatgacccgcaagcccggtgcctga

SEQ ID NO: 1107 - DNA, 2739 bp, Artificial Sequence
  Synthetic Polynucleotides
atggccttaccagtgaccgccttgctcctgccgctggccttgctgctccacgccgccaggccggacatccagatgacccagagcttcagcagcctgagcgccagcgtgggcgacagagtgaccatcacctgtagagccagccaggacatcagcaactacctgaactggtatcagcagaagcccggcaaggcccccaagctgctgatctactacaccagcagactgcacagcggcgtgcccagcagattttctggcagcggctccggcaccgactacaccctgacaatcagctccctgcagcccgaggacttcgctacctacttctgtcagcaaggcaacaccctgccctggacctttggcggaggcaccaagctggaaatcaagagaggcggaggcggaagtggaggcggaggatctggcggcggaggctctgaagtgcaactggtgcagtccggcggagggctggtgcagagcggaggatctctgagactgagctgcagagccagcggctacaccttcacccggtactggatgctgtgggtgcgccagaggccaggcaagggactggaatgggtggccgagatcaacccccggaacgaccggaccaactacaacgagaagttcaagacccggttcaccatcagcgtggacagaagcaagaacaccctgtacctgcagatggacagcctgcgggccgaggataccgccgtgtacttttgtgctctgggaggcggctacgctatggactactggggccagggaacccttgtgaccgtgtcctctacgcgtgagcagaaactgatctcggaagaggatctggcgaagcccaccacgacgccagcgccgcgaccaccaacaccggcgcccaccatcgcgtcgcagcccctgtccctgcgcccagaggcgtgccggccagcggcggggggcgcagtgcacacgagggggctggacttcgcctgtgacatctacatctgggcgcccttggccgggacttgtggggtccttctcctgtcactggttatcaccctttactgcgggcgcgccagagtgaagttcagcaggagcgcagacgcccccgcgtaccagcagggccagaaccagctctataacgagctgaatctaggacgaagagaggagtacgatgttttggacaagagacgtggccgggaccctgagatggggggaaagccgagaaggaagaaccctcaggaaggcctgtacaatgaactgcagaaagataagatggcggaggcctacagtgagattgggatgaaaggcgagcgccggaggggcaaggggcacgatggcctttaccagggtctcagtacagccaccaaggacacctacgacgcccttcacatgcaggccctgccccctcgctctagaggatctggagcaacaaacttctcactactcaaacaagcaggtgacgtggaggagaatcccgggcctgggatccacatggccacttacgaggttctctgtgaggtggcgcggaaactgggcacggatgacagggaagtggtattgttcctcctaaacgtgttcatacctcaacccacactggcccaattaattggagctcttagagctttaaaggaggagggcaggttaacgtttcccctgttagcggaatgtctgtttcgtgcaggtcgcagagacctcttgcgcgacctgcttcacttagacccgcgttttttagagcgccacctagcgggcacaatgagttatttcagcccttatcagctcactgttctccacgtagacggggagctgtgtgcgagggatattaggtctttgatatttttaagcaaggacactatagggtctcgcagcacaccacagacattcttacactgggtgtactgtatggaaaacttagacctactgggtcccactgacgtggatgccctaatgtcaatgcttagatctttgtcaagagtagacctacagcgccaagtgcaaaccctaatgggccttcacctttccggcccatcacactcccaacactatcgccatacaccactcgagaccgatttctacgactacaaggacgacgatgacaagactagtggctccggcgagggcagaggaagtctactaacctgcggagatgtggaagaaaatcctggcccacatatgaccgagtacaagcccacggtgcgcctcgccacccgcgacgacgtccccagggccgtacgcaccctcgccgccgcgttcgccgactaccccgccacgcgccacaccgtcgatccggaccgccacatcgagcgggtcaccgagctgcaagaactcttcctcacgcgcgtcgggctcgacatcggcaaggtgtgggtcgcggacgacggcgccgcggtggcggtctggaccacgccggagagcgtcgaagcgggggcggtgttcgccgagatcggcccgcgcatggccgagttgagcggttcccggctggccgcgcagcaacagatggaaggcctcctggcgccgcaccggcccaaggagcccgcgtggttcctggccaccgtcggcgtctcgcccgaccaccagggcaagggtctgggcagcgccgtcgtgctccccggagtggaggcggccgagcgcgccggggtgcccgccttcctggagacctccgcgccccgcaacctccccttctacgagcggctcggcttcaccgtcaccgccgacgtcgaggtgcccgaaggaccgcgcacctggtgcatgacccgcaagcccggtgcctga

SEQ ID NO: 1108 - DNA, 2700 bp, Artificial Sequence
  Synthetic Polynucleotides
atggaaatgctccagggcctgctgctgctcctgctgctttctatgggcggagcttgggccagcagagagcctcttagaccttggtgtcaccccatcaacgccatcctggccgtggaaaaagagggctgccctgtctgcatcaccgtgaacaccacaatctgcgccggctactgccccaccatgatgagagtgctgcaagccgttctgcctcctctgcctcaggtcgtgtgcacctatcgggacgtccgcttcgagagcatcagactgcctggatgtcctagaggcgtggaccccgtggtgtcttttcctgtggctctgtcctgtagatgcggcccctgtagaagaagcaccagcgattgcggcggacccaaggatcaccctctgacatgcgatcacccacagctgagcggcctgttgtttcttggcggaggcggaagtggaggcggaggatctggcggcggaggctctgctcctgatgtgcaggattgccctgagtgcaccctgcaagagaaccccttcttctcccaacctggcgctcctatcctccagtgcatgggctgctgcttcagccgggcttatcccacacctctgcggagcaagaaaaccatgctggtccagaaaaacgtgaccagcgagagcacctgttgtgtggctaagagctacaacagagtgaccgtgatgggcggcttcaaggtggaaaatcacaccgcctgccactgctccacctgttactaccacaagagcacgcgtgagcagaaactgatctcggaagaggatctggcgaagcccaccacgacgccagcgccgcgaccaccaacaccggcgcccaccatcgcgtcgcagcccctgtccctgcgcccagaggcgtgccggccagcggcggggggcgcagtgcacacgagggggctggacttcgcctgtgacatctacatctgggcgcccttggccgggacttgtggggtccttctcctgtcactggttatcaccctttactgcgggcgcgccagagtgaagttcagcaggagcgcagacgcccccgcgtaccagcagggccagaaccagctctataacgagctgaatctaggacgaagagaggagtacgatgttttggacaagagacgtggccgggaccctgagatggggggaaagccgagaaggaagaaccctcaggaaggcctgtacaatgaactgcagaaagataagatggcggaggcctacagtgagattgggatgaaaggcgagcgccggaggggcaaggggcacgatggcctttaccagggtctcagtacagccaccaaggacacctacgacgcccttcacatgcaggccctgccccctcgctctagaggatctggagcaacaaacttctcactactcaaacaagcaggtgacgtggaggagaatcccgggcctgggatccacatggccacttacgaggttctctgtgaggtggcgcggaaactgggcacggatgacagggaagtggtattgttcctcctaaacgtgttcatacctcaacccacactggcccaattaattggagctcttagagctttaaaggaggagggcaggttaacgtttcccctgttagcggaatgtctgtttcgtgcaggtcgcagagacctcttgcgcgacctgcttcacttagacccgcgttttttagagcgccacctagcgggcacaatgagttatttcagcccttatcagctcactgttctccacgtagacggggagctgtgtgcgagggatattaggtctttgatatttttaagcaaggacactatagggtctcgcagcacaccacagacattcttacactgggtgtactgtatggaaaacttagacctactgggtcccactgacgtggatgccctaatgtcaatgcttagatctttgtcaagagtagacctacagcgccaagtgcaaaccctaatgggccttcacctttccggcccatcacactcccaacactatcgccatacaccactcgagaccgatttctacgactacaaggacgacgatgacaagactagtggctccggcgagggcagaggaagtctactaacctgcggagatgtggaagaaaatcctggcccacatatgaccgagtacaagcccacggtgcgcctcgccacccgcgacgacgtccccagggccgtacgcaccctcgccgccgcgttcgccgactaccccgccacgcgccacaccgtcgatccggaccgccacatcgagcgggtcaccgagctgcaagaactcttcctcacgcgcgtcgggctcgacatcggcaaggtgtgggtcgcggacgacggcgccgcggtggcggtctggaccacgccggagagcgtcgaagcgggggcggtgttcgccgagatcggcccgcgcatggccgagttgagcggttcccggctggccgcgcagcaacagatggaaggcctcctggcgccgcaccggcccaaggagcccgcgtggttcctggccaccgtcggcgtctcgcccgaccaccagggcaagggtctgggcagcgccgtcgtgctccccggagtggaggcggccgagcgcgccggggtgcccgccttcctggagacctccgcgccccgcaacctccccttctacgagcggctcggcttcaccgtcaccgccgacgtcgaggtgcccgaaggaccgcgcacctggtgcatgacccgcaagcccggtgcctga

SEQ ID NO: 1109 - DNA, 2742 bp, Artificial Sequence
  Synthetic Polynucleotides
atggccttaccagtgaccgccttgctcctgccgctggccttgctgctccacgccgccaggccggacatccagatgacacagtctccggcgtcactgtccgcctccgtgggggagactgtgactattatttgtagggcatcagttaacatctactcttatttggcctggtaccagcagaagcaaggcaagagtcctcagctgctggtgtataatgcgaagatcctggcagagggcgtgccgagccggttctccggcagcggctcaggtacccaattttccctcaagatcaattcactgcagccagaggactttggcagttactattgtcaacaccactacggcacattcactttcgggtccggtacaaaattggagattaagcgaggcggaggcggaagtggaggcggaggatctggcggcggaggctctcaggtacagttgaaagaaagcgggcctggactggtagcgccttcccaatctctctccatcacgtgcaccatctctggcttctccctgacttcctatggagttcactgggtgaggcagccccccggcaagggactggaatggctggtcgtcatctggtccgacgggtccacaacctacaactccgctctgaaaagtcggctctctatttctaaagataatagcaagagccaggtgtttctgaaaatgaactctctgcagaccgatgatacggccatttactactgcgcttcacactatggctcaaccttggcattcgcttcctggggccacggaacactggtgaccgtttccgcagccacgcgtgagcagaaactgatctcggaagaggatctggcgaagcccaccacgacgccagcgccgcgaccaccaacaccggcgcccaccatcgcgtcgcagcccctgtccctgcgcccagaggcgtgccggccagcggcggggggcgcagtgcacacgagggggctggacttcgcctgtgacatctacatctgggcgcccttggccgggacttgtggggtccttctcctgtcactggttatcaccctttactgcgggcgcgccagagtgaagttcagcaggagcgcagacgcccccgcgtaccagcagggccagaaccagctctataacgagctgaatctaggacgaagagaggagtacgatgttttggacaagagacgtggccgggaccctgagatggggggaaagccgagaaggaagaaccctcaggaaggcctgtacaatgaactgcagaaagataagatggcggaggcctacagtgagattgggatgaaaggcgagcgccggaggggcaaggggcacgatggcctttaccagggtctcagtacagccaccaaggacacctacgacgcccttcacatgcaggccctgccccctcgctctagaggatctggagcaacaaacttctcactactcaaacaagcaggtgacgtggaggagaatcccgggcctgggatccacatggccacttacgaggttctctgtgaggtggcgcggaaactgggcacggatgacagggaagtggtattgttcctcctaaacgtgttcatacctcaacccacactggcccaattaattggagctcttagagctttaaaggaggagggcaggttaacgtttcccctgttagcggaatgtctgtttcgtgcaggtcgcagagacctcttgcgcgacctgcttcacttagacccgcgttttttagagcgccacctagcgggcacaatgagttatttcagcccttatcagctcactgttctccacgtagacggggagctgtgtgcgagggatattaggtctttgatatttttaagcaaggacactatagggtctcgcagcacaccacagacattcttacactgggtgtactgtatggaaaacttagacctactgggtcccactgacgtggatgccctaatgtcaatgcttagatctttgtcaagagtagacctacagcgccaagtgcaaaccctaatgggccttcacctttccggcccatcacactcccaacactatcgccatacaccactcgagaccgatttctacgactacaaggacgacgatgacaagactagtggctccggcgagggcagaggaagtctactaacctgcggagatgtggaagaaaatcctggcccacatatgaccgagtacaagcccacggtgcgcctcgccacccgcgacgacgtccccagggccgtacgcaccctcgccgccgcgttcgccgactaccccgccacgcgccacaccgtcgatccggaccgccacatcgagcgggtcaccgagctgcaagaactcttcctcacgcgcgtcgggctcgacatcggcaaggtgtgggtcgcggacgacggcgccgcggtggcggtctggaccacgccggagagcgtcgaagcgggggcggtgttcgccgagatcggcccgcgcatggccgagttgagcggttcccggctggccgcgcagcaacagatggaaggcctcctggcgccgcaccggcccaaggagcccgcgtggttcctggccaccgtcggcgtctcgcccgaccaccagggcaagggtctgggcagcgccgtcgtgctccccggagtggaggcggccgagcgcgccggggtgcccgccttcctggagacctccgcgccccgcaacctccccttctacgagcggctcggcttcaccgtcaccgccgacgtcgaggtgcccgaaggaccgcgcacctggtgcatgacccgcaagcccggtgcctga

SEQ ID NO: 1110 - DNA, 2766 bp, Artificial Sequence
  Synthetic Polynucleotides
atggccttaccagtgaccgccttgctcctgccgctggccttgctgctccacgccgccaggccggacattgtgatgacccagtctcacaaattcatgtccacatcagtaggagacagggtcagcgtcacctgcaaggccagtcagaatgtgggtaataatgtagcctggtatcaacagaaaccagggcaatctcctaaagtactgatttactcggcatcctaccggtacagtggagtccctgatcgcttcacaggcagtggatctgggacagatttcactctcaccatcagtaatgtgcagtctgaagacttggcagagtatttctgtcagcaatataacacctatccattcacgttcggctcggggacaaagttggaaataaaaggcggaggcggaagtggaggcggaggatctggcggcggaggctctgaggtacagctggaggaaagcggtggaggactggtgcaacctggagggtctatgaagctctcttgcgtagcttctgggttcacgttctccaattactggatgaactgggtgcggcagtcccccgagaaaggcctggaatgggtagcagaaattcggttcaagtcccataactatgctacacactttgccgagtctgtcaaaggccggttcactattagtcgagacgacagcaagtcttcagtctacctgcagatgaataacttgcgggcagaggacacaggtatctactactgcaccaggagaatcggcaactccgactatgactggtggtactttgacgtctggggagcaggcaccagcgtgacggtgagttcagcctcaacgcgtgagcagaaactgatctcggaagaggatctggcgaagcccaccacgacgccagcgccgcgaccaccaacaccggcgcccaccatcgcgtcgcagcccctgtccctgcgcccagaggcgtgccggccagcggcggggggcgcagtgcacacgagggggctggacttcgcctgtgacatctacatctgggcgcccttggccgggacttgtggggtccttctcctgtcactggttatcaccctttactgcgggcgcgccagagtgaagttcagcaggagcgcagacgcccccgcgtaccagcagggccagaaccagctctataacgagctgaatctaggacgaagagaggagtacgatgttttggacaagagacgtggccgggaccctgagatggggggaaagccgagaaggaagaaccctcaggaaggcctgtacaatgaactgcagaaagataagatggcggaggcctacagtgagattgggatgaaaggcgagcgccggaggggcaaggggcacgatggcctttaccagggtctcagtacagccaccaaggacacctacgacgcccttcacatgcaggccctgccccctcgctctagaggatctggagcaacaaacttctcactactcaaacaagcaggtgacgtggaggagaatcccgggcctgggatccacatggccacttacgaggttctctgtgaggtggcgcggaaactgggcacggatgacagggaagtggtattgttcctcctaaacgtgttcatacctcaacccacactggcccaattaattggagctcttagagctttaaaggaggagggcaggttaacgtttcccctgttagcggaatgtctgtttcgtgcaggtcgcagagacctcttgcgcgacctgcttcacttagacccgcgttttttagagcgccacctagcgggcacaatgagttatttcagcccttatcagctcactgttctccacgtagacggggagctgtgtgcgagggatattaggtctttgatatttttaagcaaggacactatagggtctcgcagcacaccacagacattcttacactgggtgtactgtatggaaaacttagacctactgggtcccactgacgtggatgccctaatgtcaatgcttagatctttgtcaagagtagacctacagcgccaagtgcaaaccctaatgggccttcacctttccggcccatcacactcccaacactatcgccatacaccactcgagaccgatttctacgactacaaggacgacgatgacaagactagtggctccggcgagggcagaggaagtctactaacctgcggagatgtggaagaaaatcctggcccacatatgaccgagtacaagcccacggtgcgcctcgccacccgcgacgacgtccccagggccgtacgcaccctcgccgccgcgttcgccgactaccccgccacgcgccacaccgtcgatccggaccgccacatcgagcgggtcaccgagctgcaagaactcttcctcacgcgcgtcgggctcgacatcggcaaggtgtgggtcgcggacgacggcgccgcggtggcggtctggaccacgccggagagcgtcgaagcgggggcggtgttcgccgagatcggcccgcgcatggccgagttgagcggttcccggctggccgcgcagcaacagatggaaggcctcctggcgccgcaccggcccaaggagcccgcgtggttcctggccaccgtcggcgtctcgcccgaccaccagggcaagggtctgggcagcgccgtcgtgctccccggagtggaggcggccgagcgcgccggggtgcccgccttcctggagacctccgcgccccgcaacctccccttctacgagcggctcggcttcaccgtcaccgccgacgtcgaggtgcccgaaggaccgcgcacctggtgcatgacccgcaagcccggtgcctga

SEQ ID NO: 1111 - DNA, 2754 bp, Artificial Sequence; identical to SEQ ID NO: 996
  Synthetic Polynucleotides

SEQ ID NO: 1112 - DNA, 2772 bp, Artificial Sequence
  Synthetic Polynucleotides
atggccttaccagtgaccgccttgctcctgccgctggccttgctgctccacgccgccaggccggaccagagcgtgctgacacagcctccatccgtgtctggcgctccaggccagagagtgaccatctcctgtaccggcagcagcagcaacatcggagccggctatgacgtgcactggtatcagcaactgcccggcaccgcccccaagctgctgatctacggcaacagcaacagacccagcggcgtgcccgatagattcagcggcagcaagagcggcacaagcgccagcctggctatcactggactccaggccgaggacgaggccgactactactgccagagctacgacaacagcctgtcctcctgggtgttcggcggaggcaccaagctgacagtgctgggccagcctaagggcggaggcggaagtggaggcggaggatctggcggcggaggctctgaagtgcaactccagcagagcggagccgaagtgaagaaacccggcagctccgtgaaggtgtcctgcaaggcttccggcggcaccttcagcagctacgccatttcttgggtgcgccaggcccctggacagggcctggaatggatgggcagaatcatccccatcctgggaatcgccaactacgcccagaaattccagggccgcgtgaccatcaccgccgacaagagcacaagcaccgcctacatggaactgagcagcctgcggagcgaggacaccgccgtgtactactgcgccagagatgtgggcagcggctcctacagcctggactattggggccagggcaccctcgtgaccgtgtctagtacgcgtgagcagaaactgatctcggaagaggatctggcgaagcccaccacgacgccagcgccgcgaccaccaacaccggcgcccaccatcgcgtcgcagcccctgtccctgcgcccagaggcgtgccggccagcggcggggggcgcagtgcacacgagggggctggacttcgcctgtgacatctacatctgggcgcccttggccgggacttgtggggtccttctcctgtcactggttatcaccctttactgcgggcgcgccagagtgaagttcagcaggagcgcagacgcccccgcgtaccagcagggccagaaccagctctataacgagctgaatctaggacgaagagaggagtacgatgttttggacaagagacgtggccgggaccctgagatggggggaaagccgagaaggaagaaccctcaggaaggcctgtacaatgaactgcagaaagataagatggcggaggcctacagtgagattgggatgaaaggcgagcgccggaggggcaaggggcacgatggcctttaccagggtctcagtacagccaccaaggacacctacgacgcccttcacatgcaggccctgccccctcgctctagaggatctggagcaacaaacttctcactactcaaacaagcaggtgacgtggaggagaatcccgggcctgggatccacatggccacttacgaggttctctgtgaggtggcgcggaaactgggcacggatgacagggaagtggtattgttcctcctaaacgtgttcatacctcaacccacactggcccaattaattggagctcttagagctttaaaggaggagggcaggttaacgtttcccctgttagcggaatgtctgtttcgtgcaggtcgcagagacctcttgcgcgacctgcttcacttagacccgcgttttttagagcgccacctagcgggcacaatgagttatttcagcccttatcagctcactgttctccacgtagacggggagctgtgtgcgagggatattaggtctttgatatttttaagcaaggacactatagggtctcgcagcacaccacagacattcttacactgggtgtactgtatggaaaacttagacctactgggtcccactgacgtggatgccctaatgtcaatgcttagatctttgtcaagagtagacctacagcgccaagtgcaaaccctaatgggccttcacctttccggcccatcacactcccaacactatcgccatacaccactcgagaccgatttctacgactacaaggacgacgatgacaagactagtggctccggcgagggcagaggaagtctactaacctgcggagatgtggaagaaaatcctggcccacatatgaccgagtacaagcccacggtgcgcctcgccacccgcgacgacgtccccagggccgtacgcaccctcgccgccgcgttcgccgactaccccgccacgcgccacaccgtcgatccggaccgccacatcgagcgggtcaccgagctgcaagaactcttcctcacgcgcgtcgggctcgacatcggcaaggtgtgggtcgcggacgacggcgccgcggtggcggtctggaccacgccggagagcgtcgaagcgggggcggtgttcgccgagatcggcccgcgcatggccgagttgagcggttcccggctggccgcgcagcaacagatggaaggcctcctggcgccgcaccggcccaaggagcccgcgtggttcctggccaccgtcggcgtctcgcccgaccaccagggcaagggtctgggcagcgccgtcgtgctccccggagtggaggcggccgagcgcgccggggtgcccgccttcctggagacctccgcgccccgcaacctccccttctacgagcggctcggcttcaccgtcaccgccgacgtcgaggtgcccgaaggaccgcgcacctggtgcatgacccgcaagcccggtgcctga

SEQ ID NO: 1113 - DNA, 2763 bp, Artificial Sequence
  Synthetic Polynucleotides
atggccttaccagtgaccgccttgctcctgccgctggccttgctgctccacgccgccaggccggaccagagcgtcgtgacacagcctccatctgtgtctgccgcccctggccggaaagtgaccatctcttgtagcggcagcagcagcaacatcggcagcaactacgtgtcctggtatcagcaggtgcccggcaccgcccctaagctgctgatctacgaggacgacaagcggcccagcggcatccccgatagattcagcggctctaagagcggcaccagcgccacactgggcatcaccggactccagacaggcgacgaggccgactacttctgcgccacctgggacagaaccgtgaacgtggtgcgctttggcggcggaaccagactgacagtgcacagccagcctaagggcggaggcggaagtggaggcggaggatctggcggcggaggctctcaactccaactccaggaaagcggccctggcctcgtgaagcctagcgagacactgagcctgacctgcaccgtgtctggcggcagcatctccagcagctcctactactggggctggatcagacagccccctggcaagggcctggaatggatcggctccatctactacagcggaagcacctactacaaccccagcctgaagtcccgcgtgaccatcagcgtggacaccagcaagaaccagttctccctgaagctgagcagcgtgacagccgccgataccgccgtgtactactgtgccagacatgtgggccacgagctggattactggggccagggcacactcgtgaccgtgtctagtacgcgtgagcagaaactgatctcggaagaggatctggcgaagcccaccacgacgccagcgccgcgaccaccaacaccggcgcccaccatcgcgtcgcagcccctgtccctgcgcccagaggcgtgccggccagcggcggggggcgcagtgcacacgagggggctggacttcgcctgtgacatctacatctgggcgcccttggccgggacttgtggggtccttctcctgtcactggttatcaccctttactgcgggcgcgccagagtgaagttcagcaggagcgcagacgcccccgcgtaccagcagggccagaaccagctctataacgagctgaatctaggacgaagagaggagtacgatgttttggacaagagacgtggccgggaccctgagatggggggaaagccgagaaggaagaaccctcaggaaggcctgtacaatgaactgcagaaagataagatggcggaggcctacagtgagattgggatgaaaggcgagcgccggaggggcaaggggcacgatggcctttaccagggtctcagtacagccaccaaggacacctacgacgcccttcacatgcaggccctgccccctcgctctagaggatctggagcaacaaacttctcactactcaaacaagcaggtgacgtggaggagaatcccgggcctgggatccacatggccacttacgaggttctctgtgaggtggcgcggaaactgggcacggatgacagggaagtggtattgttcctcctaaacgtgttcatacctcaacccacactggcccaattaattggagctcttagagctttaaaggaggagggcaggttaacgtttcccctgttagcggaatgtctgtttcgtgcaggtcgcagagacctcttgcgcgacctgcttcacttagacccgcgttttttagagcgccacctagcgggcacaatgagttatttcagcccttatcagctcactgttctccacgtagacggggagctgtgtgcgagggatattaggtctttgatatttttaagcaaggacactatagggtctcgcagcacaccacagacattcttacactgggtgtactgtatggaaaacttagacctactgggtcccactgacgtggatgccctaatgtcaatgcttagatctttgtcaagagtagacctacagcgccaagtgcaaaccctaatgggccttcacctttccggcccatcacactcccaacactatcgccatacaccactcgagaccgatttctacgactacaaggacgacgatgacaagactagtggctccggcgagggcagaggaagtctactaacctgcggagatgtggaagaaaatcctggcccacatatgaccgagtacaagcccacggtgcgcctcgccacccgcgacgacgtccccagggccgtacgcaccctcgccgccgcgttcgccgactaccccgccacgcgccacaccgtcgatccggaccgccacatcgagcgggtcaccgagctgcaagaactcttcctcacgcgcgtcgggctcgacatcggcaaggtgtgggtcgcggacgacggcgccgcggtggcggtctggaccacgccggagagcgtcgaagcgggggcggtgttcgccgagatcggcccgcgcatggccgagttgagcggttcccggctggccgcgcagcaacagatggaaggcctcctggcgccgcaccggcccaaggagcccgcgtggttcctggccaccgtcggcgtctcgcccgaccaccagggcaagggtctgggcagcgccgtcgtgctccccggagtggaggcggccgagcgcgccggggtgcccgccttcctggagacctccgcgccccgcaacctccccttctacgagcggctcggcttcaccgtcaccgccgacgtcgaggtgcccgaaggaccgcgcacctggtgcatgacccgcaagcccggtgcctga

SEQ ID NO: 1114 - DNA, 2745 bp, Artificial Sequence
  Synthetic Polynucleotides
atggccttaccagtgaccgccttgctcctgccgctggccttgctgctccacgccgccaggccggacatccagatgacccagagccccagcagcctgtctgccagcgtgggcgacagagtgaccatcacctgtagagccagccagagcatcagcagctacctgaactggtatcagcagaagcccggcaaggcccccaaactgctgatctacgccgccagctctctgcagtctggcgtgccatctggctttagcggcagcggctctggcaccgacttcaccctgaccatcagctccctgcagcccgaggacttcgccacctactactgccagcagagctacagcacccccctgacctttggcggaggcaccaaggtggaaatcaagagaggcggcggaggctcaggcggaggcggatctggcgggggaggatctcaggtgcaactgcaggaatctggccctggcctcgtgaagcccagcgagacactgagcctgacctgtaccgtgtctggcggctctgtgtccagcggcagctactactggtcctggatcagacagccccctggcaagggcctggaatggatcggctacatctactacagcggctccaccaactacaaccccagcctgaagtcccgcgtgaccatctccgtggacaccagcaagaaccagttctccctgaagctgagcagcgtgacagccgccgataccgccgtgtactactgtgccagagagggcaagaacggggccttcgacatctggggccagggcacaatggtcaccgtgtcctctacgcgtgagcagaaactgatctcggaagaggatctggcgaagcccaccacgacgccagcgccgcgaccaccaacaccggcgcccaccatcgcgtcgcagcccctgtccctgcgcccagaggcgtgccggccagcggcggggggcgcagtgcacacgagggggctggacttcgcctgtgacatctacatctgggcgcccttggccgggacttgtggggtccttctcctgtcactggttatcaccctttactgcgggcgcgccagagtgaagttcagcaggagcgcagacgcccccgcgtaccagcagggccagaaccagctctataacgagctgaatctaggacgaagagaggagtacgatgttttggacaagagacgtggccgggaccctgagatggggggaaagccgagaaggaagaaccctcaggaaggcctgtacaatgaactgcagaaagataagatggcggaggcctacagtgagattgggatgaaaggcgagcgccggaggggcaaggggcacgatggcctttaccagggtctcagtacagccaccaaggacacctacgacgcccttcacatgcaggccctgccccctcgctctagaggatctggagcaacaaacttctcactactcaaacaagcaggtgacgtggaggagaatcccgggcctgggatccacatggccacttacgaggttctctgtgaggtggcgcggaaactgggcacggatgacagggaagtggtattgttcctcctaaacgtgttcatacctcaacccacactggcccaattaattggagctcttagagctttaaaggaggagggcaggttaacgtttcccctgttagcggaatgtctgtttcgtgcaggtcgcagagacctcttgcgcgacctgcttcacttagacccgcgttttttagagcgccacctagcgggcacaatgagttatttcagcccttatcagctcactgttctccacgtagacggggagctgtgtgcgagggatattaggtctttgatatttttaagcaaggacactatagggtctcgcagcacaccacagacattcttacactgggtgtactgtatggaaaacttagacctactgggtcccactgacgtggatgccctaatgtcaatgcttagatctttgtcaagagtagacctacagcgccaagtgcaaaccctaatgggccttcacctttccggcccatcacactcccaacactatcgccatacaccactcgagaccgatttctacgactacaaggacgacgatgacaagactagtggctccggcgagggcagaggaagtctactaacctgcggagatgtggaagaaaatcctggcccacatatgaccgagtacaagcccacggtgcgcctcgccacccgcgacgacgtccccagggccgtacgcaccctcgccgccgcgttcgccgactaccccgccacgcgccacaccgtcgatccggaccgccacatcgagcgggtcaccgagctgcaagaactcttcctcacgcgcgtcgggctcgacatcggcaaggtgtgggtcgcggacgacggcgccgcggtggcggtctggaccacgccggagagcgtcgaagcgggggcggtgttcgccgagatcggcccgcgcatggccgagttgagcggttcccggctggccgcgcagcaacagatggaaggcctcctggcgccgcaccggcccaaggagcccgcgtggttcctggccaccgtcggcgtctcgcccgaccaccagggcaagggtctgggcagcgccgtcgtgctccccggagtggaggcggccgagcgcgccggggtgcccgccttcctggagacctccgcgccccgcaacctccccttctacgagcggctcggcttcaccgtcaccgccgacgtcgaggtgcccgaaggaccgcgcacctggtgcatgacccgcaagcccggtgcctga

SEQ ID NO: 1115 - DNA, 2403 bp, Artificial Sequence
  Synthetic Polynucleotides
atggccctgcccgtgacagccctgctgctgcctctggctctgctgctgcacgccgccagacccgatgaattcgatgttcagttggtggagtctggtggcggtttggtgcagccaggtggctccctgcgactcagttgtgcagcctccgggttcattctggattactacgctattggttggtttcgacaggcccccggaaaggagagagagggcgtgctctgcattgatgccagcgacgacattacctactacgccgattctgtgaagggccgcttcaccatcagtagagacaatagcaagaatacagtctacctgcagatgaactccctgcgcccagaagacactgccgtctactactgtgctacccctatcgggctttcttcctcttgccttctcgaatatgactacgattactgggggcaggggacgctggtcaccgtgtctagcacgcgtgagcagaaactgatctcggaagaggatctggcgaagcccaccacgacgccagcgccgcgaccaccaacaccggcgcccaccatcgcgtcgcagcccctgtccctgcgcccagaggcgtgccggccagcggcggggggcgcagtgcacacgagggggctggacttcgcctgtgacatctacatctgggcgcccttggccgggacttgtggggtccttctcctgtcactggttatcaccctttactgcgggcgcgccagagtgaagttcagcaggagcgcagacgcccccgcgtaccagcagggccagaaccagctctataacgagctgaatctaggacgaagagaggagtacgatgttttggacaagagacgtggccgggaccctgagatggggggaaagccgagaaggaagaaccctcaggaaggcctgtacaatgaactgcagaaagataagatggcggaggcctacagtgagattgggatgaaaggcgagcgccggaggggcaaggggcacgatggcctttaccagggtctcagtacagccaccaaggacacctacgacgcccttcacatgcaggccctgccccctcgctctagaggatctggagcaacaaacttctcactactcaaacaagcaggtgacgtggaggagaatcccgggcctgggatccacatggccacttacgaggttctctgtgaggtggcgcggaaactgggcacggatgacagggaagtggtattgttcctcctaaacgtgttcatacctcaacccacactggcccaattaattggagctcttagagctttaaaggaggagggcaggttaacgtttcccctgttagcggaatgtctgtttcgtgcaggtcgcagagacctcttgcgcgacctgcttcacttagacccgcgttttttagagcgccacctagcgggcacaatgagttatttcagcccttatcagctcactgttctccacgtagacggggagctgtgtgcgagggatattaggtctttgatatttttaagcaaggacactatagggtctcgcagcacaccacagacattcttacactgggtgtactgtatggaaaacttagacctactgggtcccactgacgtggatgccctaatgtcaatgcttagatctttgtcaagagtagacctacagcgccaagtgcaaaccctaatgggccttcacctttccggcccatcacactcccaacactatcgccatacaccactcgagaccgatttctacgactacaaggacgacgatgacaagactagtggctccggcgagggcagaggaagtctactaacctgcggagatgtggaagaaaatcctggcccacatatgaccgagtacaagcccacggtgcgcctcgccacccgcgacgacgtccccagggccgtacgcaccctcgccgccgcgttcgccgactaccccgccacgcgccacaccgtcgatccggaccgccacatcgagcgggtcaccgagctgcaagaactcttcctcacgcgcgtcgggctcgacatcggcaaggtgtgggtcgcggacgacggcgccgcggtggcggtctggaccacgccggagagcgtcgaagcgggggcggtgttcgccgagatcggcccgcgcatggccgagttgagcggttcccggctggccgcgcagcaacagatggaaggcctcctggcgccgcaccggcccaaggagcccgcgtggttcctggccaccgtcggcgtctcgcccgaccaccagggcaagggtctgggcagcgccgtcgtgctccccggagtggaggcggccgagcgcgccggggtgcccgccttcctggagacctccgcgccccgcaacctccccttctacgagcggctcggcttcaccgtcaccgccgacgtcgaggtgcccgaaggaccgcgcacctggtgcatgacccgcaagcccggtgcctga

SEQ ID NO: 1116 - DNA, 2892 bp, Artificial Sequence
  Synthetic Polynucleotides
atggccctgcccgtgacagccctgctgctgcctctggctctgctgctgcacgccgccagacccgatgaattcgatgttcagttggtggagtctggtggcggtttggtgcagccaggtggctccctgcgactcagttgtgcagcctccgggttcattctggattactacgctattggttggtttcgacaggcccccggaaaggagagagagggcgtgctctgcattgatgccagcgacgacattacctactacgccgattctgtgaagggccgcttcaccatcagtagagacaatagcaagaatacagtctacctgcagatgaactccctgcgcccagaagacactgccgtctactactgtgctacccctatcgggctttcttcctcttgccttctcgaatatgactacgattactgggggcaggggacgctggtcaccgtgtctagcctcgagggaggtagcggctccgggggaggcggaagtggaggcggaggatctgggtctggaggaagcggatctggaggctcagggtcagggggctcaggcagtggaggctctttcgaagtgcaactggtggagtccggcggtggactggtacagcctgggggttcactgcgcctgtcctgcgccgccagcggaagaacctattacctcaatgctatgggttggttccgccaggccccaggaaaggagcgcgagttcgtggcggctattgactggtccgaggggaacaaggactatgctgattccgtgaagggcaggtttaccatcagccgggataattcaaaaaatactgtttatttgcagatgaactctcttagaccagaagacactgctgtctattactgcgccgctgacacccctccttggggaccactgatttatatcgaaagctatgattcctgggggcagggcacactcgtcaccgtgagtagcacgcgtgagcagaaactgatctcggaagaggatctggcgaagcccaccacgacgccagcgccgcgaccaccaacaccggcgcccaccatcgcgtcgcagcccctgtccctgcgcccagaggcgtgccggccagcggcggggggcgcagtgcacacgagggggctggacttcgcctgtgacatctacatctgggcgcccttggccgggacttgtggggtccttctcctgtcactggttatcaccctttactgcgggcgcgccagagtgaagttcagcaggagcgcagacgcccccgcgtaccagcagggccagaaccagctctataacgagctgaatctaggacgaagagaggagtacgatgttttggacaagagacgtggccgggaccctgagatggggggaaagccgagaaggaagaaccctcaggaaggcctgtacaatgaactgcagaaagataagatggcggaggcctacagtgagattgggatgaaaggcgagcgccggaggggcaaggggcacgatggcctttaccagggtctcagtacagccaccaaggacacctacgacgcccttcacatgcaggccctgccccctcgctctagaggatctggagcaacaaacttctcactactcaaacaagcaggtgacgtggaggagaatcccgggcctgggatccacatggccacttacgaggttctctgtgaggtggcgcggaaactgggcacggatgacagggaagtggtattgttcctcctaaacgtgttcatacctcaacccacactggcccaattaattggagctcttagagctttaaaggaggagggcaggttaacgtttcccctgttagcggaatgtctgtttcgtgcaggtcgcagagacctcttgcgcgacctgcttcacttagacccgcgttttttagagcgccacctagcgggcacaatgagttatttcagcccttatcagctcactgttctccacgtagacggggagctgtgtgcgagggatattaggtctttgatatttttaagcaaggacactatagggtctcgcagcacaccacagacattcttacactgggtgtactgtatggaaaacttagacctactgggtcccactgacgtggatgccctaatgtcaatgcttagatctttgtcaagagtagacctacagcgccaagtgcaaaccctaatgggccttcacctttccggcccatcacactcccaacactatcgccatacaccactcgagaccgatttctacgactacaaggacgacgatgacaagactagtggctccggcgagggcagaggaagtctactaacctgcggagatgtggaagaaaatcctggcccacatatgaccgagtacaagcccacggtgcgcctcgccacccgcgacgacgtccccagggccgtacgcaccctcgccgccgcgttcgccgactaccccgccacgcgccacaccgtcgatccggaccgccacatcgagcgggtcaccgagctgcaagaactcttcctcacgcgcgtcgggctcgacatcggcaaggtgtgggtcgcggacgacggcgccgcggtggcggtctggaccacgccggagagcgtcgaagcgggggcggtgttcgccgagatcggcccgcgcatggccgagttgagcggttcccggctggccgcgcagcaacagatggaaggcctcctggcgccgcaccggcccaaggagcccgcgtggttcctggccaccgtcggcgtctcgcccgaccaccagggcaagggtctgggcagcgccgtcgtgctccccggagtggaggcggccgagcgcgccggggtgcccgccttcctggagacctccgcgccccgcaacctccccttctacgagcggctcggcttcaccgtcaccgccgacgtcgaggtgcccgaaggaccgcgcacctggtgcatgacccgcaagcccggtgcctga

SEQ ID NO: 1117 - DNA, 2745 bp, Artificial Sequence
  Synthetic Polynucleotides
atggccttaccagtgaccgccttgctcctgccgctggccttgctgctccacgccgccaggccggaccagatcgtgctgacccagtcccccgctattatgtccgcatcaccgggcgaaaaagtgacgatctcctgtagcgcttcatctagcgtctcctacatgtattggtatcaacagaaacctgggtctagcccaaagccgtggatctacagaaccagtaaccttgccagtggggtgccagcccgcttcagcggtagtggcagtggaacttcctatagcctcacaataagcaacatggaggctgaagatgccgctgcctattactgccagcagtaccacagttacccaaccacgttcggcgggggaactaagctcgaagtaaaaggcggaggcggaagtggaggcggaggatctggcggcggaggctctgaggtgcagctggtggaatctgggggcggcctggtccaacctaagggatcactcaagctctcttgtgcggccagcggattctctttcaatacctatgctatgaattgggtgagacaggcgcccggaaagggcctcgaatggatagcccatatccggtcaaaatcaaacaatttcgcaacctactatgcggactccgtgaaggaccgattttccatctcccgagatgcctccgagaatattctgttcctgcagatgaataacctcaagacagaggacaccgccatgtactactgtgtgcgccagggcggtgactttcccatggattactgggggcaggggaccagcgtgaccgtgagctctacgcgtgagcagaaactgatctcggaagaggatctggcgaagcccaccacgacgccagcgccgcgaccaccaacaccggcgcccaccatcgcgtcgcagcccctgtccctgcgcccagaggcgtgccggccagcggcggggggcgcagtgcacacgagggggctggacttcgcctgtgacatctacatctgggcgcccttggccgggacttgtggggtccttctcctgtcactggttatcaccctttactgcgggcgcgccagagtgaagttcagcaggagcgcagacgcccccgcgtaccagcagggccagaaccagctctataacgagctgaatctaggacgaagagaggagtacgatgttttggacaagagacgtggccgggaccctgagatggggggaaagccgagaaggaagaaccctcaggaaggcctgtacaatgaactgcagaaagataagatggcggaggcctacagtgagattgggatgaaaggcgagcgccggaggggcaaggggcacgatggcctttaccagggtctcagtacagccaccaaggacacctacgacgcccttcacatgcaggccctgccccctcgctctagaggatctggagcaacaaacttctcactactcaaacaagcaggtgacgtggaggagaatcccgggcctgggatccacatggccacttacgaggttctctgtgaggtggcgcggaaactgggcacggatgacagggaagtggtattgttcctcctaaacgtgttcatacctcaacccacactggcccaattaattggagctcttagagctttaaaggaggagggcaggttaacgtttcccctgttagcggaatgtctgtttcgtgcaggtcgcagagacctcttgcgcgacctgcttcacttagacccgcgttttttagagcgccacctagcgggcacaatgagttatttcagcccttatcagctcactgttctccacgtagacggggagctgtgtgcgagggatattaggtctttgatatttttaagcaaggacactatagggtctcgcagcacaccacagacattcttacactgggtgtactgtatggaaaacttagacctactgggtcccactgacgtggatgccctaatgtcaatgcttagatctttgtcaagagtagacctacagcgccaagtgcaaaccctaatgggccttcacctttccggcccatcacactcccaacactatcgccatacaccactcgagaccgatttctacgactacaaggacgacgatgacaagactagtggctccggcgagggcagaggaagtctactaacctgcggagatgtggaagaaaatcctggcccacatatgaccgagtacaagcccacggtgcgcctcgccacccgcgacgacgtccccagggccgtacgcaccctcgccgccgcgttcgccgactaccccgccacgcgccacaccgtcgatccggaccgccacatcgagcgggtcaccgagctgcaagaactcttcctcacgcgcgtcgggctcgacatcggcaaggtgtgggtcgcggacgacggcgccgcggtggcggtctggaccacgccggagagcgtcgaagcgggggcggtgttcgccgagatcggcccgcgcatggccgagttgagcggttcccggctggccgcgcagcaacagatggaaggcctcctggcgccgcaccggcccaaggagcccgcgtggttcctggccaccgtcggcgtctcgcccgaccaccagggcaagggtctgggcagcgccgtcgtgctccccggagtggaggcggccgagcgcgccggggtgcccgccttcctggagacctccgcgccccgcaacctccccttctacgagcggctcggcttcaccgtcaccgccgacgtcgaggtgcccgaaggaccgcgcacctggtgcatgacccgcaagcccggtgcctga

SEQ ID NO: 1118 - DNA, 2742 bp, Artificial Sequence
  Synthetic Polynucleotides
atggccttaccagtgaccgccttgctcctgccgctggccttgctgctccacgccgccaggccggacgacatccagatgacccagagcagcagcagcttcagcgtgagcctgggcgacagagtgaccatcacctgcatggccagcgaggacatctacatcagactggcctggtaccagcagaagcccggcaacgcccccagactgctgatcagcgccgccaccagcctggagaccggcgtgcccagcagattcagcggcagcggcagcggcaaggactacaccctgagcatcaccagcctgcagaccgaggacgtgggcacctactactgccagcagtactggagcagcccctggaccttcggcggcggcaccaagctggagatcaacggcggaggcggaagtggaggcggaggatctggcggcggaggctctgacgtgcagctgcaggagagcggccccggcctggtgaagcccagccagagcctgagcctgacctgcaccgtgaccggctacagcatcaccagcgactacacctggaactggatcagacagttccccggcaacaagctggagtggatgggctacatcacctacagcggcagcaccagctacaaccccagcctgaagagcagaaacagcatcaccagagacaccagcaagaaccagttcttcctgcagctgaacagcgtgaccaccgaggacaccgccacctactactgcgccagactgggcagaagatacacaatggactactggggccagggcaccagcgtgaccgtgagcagcacgcgtgagcagaaactgatctcggaagaggatctggcgaagcccaccacgacgccagcgccgcgaccaccaacaccggcgcccaccatcgcgtcgcagcccctgtccctgcgcccagaggcgtgccggccagcggcggggggcgcagtgcacacgagggggctggacttcgcctgtgacatctacatctgggcgcccttggccgggacttgtggggtccttctcctgtcactggttatcaccctttactgcgggcgcgccagagtgaagttcagcaggagcgcagacgcccccgcgtaccagcagggccagaaccagctctataacgagctgaatctaggacgaagagaggagtacgatgttttggacaagagacgtggccgggaccctgagatggggggaaagccgagaaggaagaaccctcaggaaggcctgtacaatgaactgcagaaagataagatggcggaggcctacagtgagattgggatgaaaggcgagcgccggaggggcaaggggcacgatggcctttaccagggtctcagtacagccaccaaggacacctacgacgcccttcacatgcaggccctgccccctcgctctagaggatctggagcaacaaacttctcactactcaaacaagcaggtgacgtggaggagaatcccgggcctgggatccacatggccacttacgaggttctctgtgaggtggcgcggaaactgggcacggatgacagggaagtggtattgttcctcctaaacgtgttcatacctcaacccacactggcccaattaattggagctcttagagctttaaaggaggagggcaggttaacgtttcccctgttagcggaatgtctgtttcgtgcaggtcgcagagacctcttgcgcgacctgcttcacttagacccgcgttttttagagcgccacctagcgggcacaatgagttatttcagcccttatcagctcactgttctccacgtagacggggagctgtgtgcgagggatattaggtctttgatatttttaagcaaggacactatagggtctcgcagcacaccacagacattcttacactgggtgtactgtatggaaaacttagacctactgggtcccactgacgtggatgccctaatgtcaatgcttagatctttgtcaagagtagacctacagcgccaagtgcaaaccctaatgggccttcacctttccggcccatcacactcccaacactatcgccatacaccactcgagaccgatttctacgactacaaggacgacgatgacaagactagtggctccggcgagggcagaggaagtctactaacctgcggagatgtggaagaaaatcctggcccacatatgaccgagtacaagcccacggtgcgcctcgccacccgcgacgacgtccccagggccgtacgcaccctcgccgccgcgttcgccgactaccccgccacgcgccacaccgtcgatccggaccgccacatcgagcgggtcaccgagctgcaagaactcttcctcacgcgcgtcgggctcgacatcggcaaggtgtgggtcgcggacgacggcgccgcggtggcggtctggaccacgccggagagcgtcgaagcgggggcggtgttcgccgagatcggcccgcgcatggccgagttgagcggttcccggctggccgcgcagcaacagatggaaggcctcctggcgccgcaccggcccaaggagcccgcgtggttcctggccaccgtcggcgtctcgcccgaccaccagggcaagggtctgggcagcgccgtcgtgctccccggagtggaggcggccgagcgcgccggggtgcccgccttcctggagacctccgcgccccgcaacctccccttctacgagcggctcggcttcaccgtcaccgccgacgtcgaggtgcccgaaggaccgcgcacctggtgcatgacccgcaagcccggtgcctga

SEQ ID NO: 1119 - DNA, 2739 bp, Artificial Sequence
  Synthetic Polynucleotides
atggccctgcctgtgacagctctgctgctgcctctggcactgctgctgcacgccgccagacctgatgtgcagctccaggaaagcggccctggcctcgtgaagcctagccagagcctgagcctgacatgcaccgtgaccggctacagcatcaccagcgactacacctggaactggatcagacagttccccggcaacaagctggaatggatgggctacatcacctacagcggcagcaccagctacaaccccagcctgaagtcccggaactccatcaccagagacaccagcaagaaccagttcttcttgcagctgaacagcgtgaccaccgaggacaccgccacctactactgcgccagactgggcagacggtacaccatggactattggggccagggcacctccgtgaccgtgtctagcggaggcggaggaagtggcggcggaggatctgggggaggcggaagcgatatccagatgacccagtccagcagcagcttcagcgtgtccctgggcgacagagtgaccatcacctgtatggcctccgaggacatctacatccggctggcctggtatcagcagaagcccggcaacgcccccagactgctgattagcgccgccacctctctggaaaccggcgtgccaagcagattcagcggctctggcagcggcaaggactacaccctgagcatcacctccttgcagaccgaggacgtgggcacctactattgccagcagtattggagcagcccctggacctttggcggaggcacaaagctggaaatcaacacgcgtgagcagaaactgatctcggaagaggatctggcgaagcccaccacgacgccagcgccgcgaccaccaacaccggcgcccaccatcgcgtcgcagcccctgtccctgcgcccagaggcgtgccggccagcggcggggggcgcagtgcacacgagggggctggacttcgcctgtgacatctacatctgggcgcccttggccgggacttgtggggtccttctcctgtcactggttatcaccctttactgcgggcgcgccagagtgaagttcagcaggagcgcagacgcccccgcgtaccagcagggccagaaccagctctataacgagctgaatctaggacgaagagaggagtacgatgttttggacaagagacgtggccgggaccctgagatggggggaaagccgagaaggaagaaccctcaggaaggcctgtacaatgaactgcagaaagataagatggcggaggcctacagtgagattgggatgaaaggcgagcgccggaggggcaaggggcacgatggcctttaccagggtctcagtacagccaccaaggacacctacgacgcccttcacatgcaggccctgccccctcgctctagaggatctggagcaacaaacttctcactactcaaacaagcaggtgacgtggaggagaatcccgggcctgggatccacatggccacttacgaggttctctgtgaggtggcgcggaaactgggcacggatgacagggaagtggtattgttcctcctaaacgtgttcatacctcaacccacactggcccaattaattggagctcttagagctttaaaggaggagggcaggttaacgtttcccctgttagcggaatgtctgtttcgtgcaggtcgcagagacctcttgcgcgacctgcttcacttagacccgcgttttttagagcgccacctagcgggcacaatgagttatttcagcccttatcagctcactgttctccacgtagacggggagctgtgtgcgagggatattaggtctttgatatttttaagcaaggacactatagggtctcgcagcacaccacagacattcttacactgggtgtactgtatggaaaacttagacctactgggtcccactgacgtggatgccctaatgtcaatgcttagatctttgtcaagagtagacctacagcgccaagtgcaaaccctaatgggccttcacctttccggcccatcacactcccaacactatcgccatacaccactcgagaccgatttctacgactacaaggacgacgatgacaagactagtggctccggcgagggcagaggaagtctactaacctgcggagatgtggaagaaaatcctggcccacatatgaccgagtacaagcccacggtgcgcctcgccacccgcgacgacgtccccagggccgtacgcaccctcgccgccgcgttcgccgactaccccgccacgcgccacaccgtcgatccggaccgccacatcgagcgggtcaccgagctgcaagaactcttcctcacgcgcgtcgggctcgacatcggcaaggtgtgggtcgcggacgacggcgccgcggtggcggtctggaccacgccggagagcgtcgaagcgggggcggtgttcgccgagatcggcccgcgcatggccgagttgagcggttcccggctggccgcgcagcaacagatggaaggcctcctggcgccgcaccggcccaaggagcccgcgtggttcctggccaccgtcggcgtctcgcccgaccaccagggcaagggtctgggcagcgccgtcgtgctccccggagtggaggcggccgagcgcgccggggtgcccgccttcctggagacctccgcgccccgcaacctccccttctacgagcggctcggcttcaccgtcaccgccgacgtcgaggtgcccgaaggaccgcgcacctggtgcatgacccgcaagcccggtgcctga

SEQ ID NO: 1120 - DNA, 2742 bp, Artificial Sequence
  Synthetic Polynucleotides
atggccctgcctgtgacagctctgctgctgcctctggcactgctgctgcacgccgccagacctgacatccagatgacccagagcagcagcagcttcagcgtgtccctgggcgacagagtgaccatcacatgcaaggccagcgaggacatctacatccggctggcctggtatcagcagaagcccggcaacgcccccagactgctgattagcgccgccacctctctggaaaccggcatccccagcagattctccggctctggcagcggcgaggactacaccctgacaatcaccagcctccagaccgaggacgtggcaacctactactgccagcagtattggaccaccccctggacctttggcggaggcaccaagctggaaatcaagagaggcggaggcggaagtggaggcggaggatctggcggcggaggctctgatgtgcagctccaggaatctggccccggactcgtgaagcctagccagagcctgagcctgacatgcaccgtgaccggctacagcatcaccatcgactacacctggaactggatcagacagttccccggcaacaaactggaatggatgggctacatcacctacagcggcagcaccgactacaaccccagcctgaagtccagaagctccatcaccagagacacctctatgaaccagttcttcttgcagctgaacagcgtgaccaccgaggacaccgccacctactattgcgccagactgggcagaagatacgccctggactattggggccagggcaccagcgtgacagtgtcctctacgcgtgagcagaaactgatctcggaagaggatctggcgaagcccaccacgacgccagcgccgcgaccaccaacaccggcgcccaccatcgcgtcgcagcccctgtccctgcgcccagaggcgtgccggccagcggcggggggcgcagtgcacacgagggggctggacttcgcctgtgacatctacatctgggcgcccttggccgggacttgtggggtccttctcctgtcactggttatcaccctttactgcgggcgcgccagagtgaagttcagcaggagcgcagacgcccccgcgtaccagcagggccagaaccagctctataacgagctgaatctaggacgaagagaggagtacgatgttttggacaagagacgtggccgggaccctgagatggggggaaagccgagaaggaagaaccctcaggaaggcctgtacaatgaactgcagaaagataagatggcggaggcctacagtgagattgggatgaaaggcgagcgccggaggggcaaggggcacgatggcctttaccagggtctcagtacagccaccaaggacacctacgacgcccttcacatgcaggccctgccccctcgctctagaggatctggagcaacaaacttctcactactcaaacaagcaggtgacgtggaggagaatcccgggcctgggatccacatggccacttacgaggttctctgtgaggtggcgcggaaactgggcacggatgacagggaagtggtattgttcctcctaaacgtgttcatacctcaacccacactggcccaattaattggagctcttagagctttaaaggaggagggcaggttaacgtttcccctgttagcggaatgtctgtttcgtgcaggtcgcagagacctcttgcgcgacctgcttcacttagacccgcgttttttagagcgccacctagcgggcacaatgagttatttcagcccttatcagctcactgttctccacgtagacggggagctgtgtgcgagggatattaggtctttgatatttttaagcaaggacactatagggtctcgcagcacaccacagacattcttacactgggtgtactgtatggaaaacttagacctactgggtcccactgacgtggatgccctaatgtcaatgcttagatctttgtcaagagtagacctacagcgccaagtgcaaaccctaatgggccttcacctttccggcccatcacactcccaacactatcgccatacaccactcgagaccgatttctacgactacaaggacgacgatgacaagactagtggctccggcgagggcagaggaagtctactaacctgcggagatgtggaagaaaatcctggcccacatatgaccgagtacaagcccacggtgcgcctcgccacccgcgacgacgtccccagggccgtacgcaccctcgccgccgcgttcgccgactaccccgccacgcgccacaccgtcgatccggaccgccacatcgagcgggtcaccgagctgcaagaactcttcctcacgcgcgtcgggctcgacatcggcaaggtgtgggtcgcggacgacggcgccgcggtggcggtctggaccacgccggagagcgtcgaagcgggggcggtgttcgccgagatcggcccgcgcatggccgagttgagcggttcccggctggccgcgcagcaacagatggaaggcctcctggcgccgcaccggcccaaggagcccgcgtggttcctggccaccgtcggcgtctcgcccgaccaccagggcaagggtctgggcagcgccgtcgtgctccccggagtggaggcggccgagcgcgccggggtgcccgccttcctggagacctccgcgccccgcaacctccccttctacgagcggctcggcttcaccgtcaccgccgacgtcgaggtgcccgaaggaccgcgcacctggtgcatgacccgcaagcccggtgcctga

SEQ ID NO: 1121 - DNA, 2745 bp, Artificial Sequence
  Synthetic Polynucleotides
atggccttaccagtgaccgccttgctcctgccgctggccttgctgctccacgccgccaggccggacatcgtaatgacccaggctgccccatccataccagtcactcccggtgaatccgtgtctatatcttgtaggtccgataagagtctgcttcacagcaacggcaatacttatcttttctggtttttgcagcgaccgggacaaagcccacaactgctgatctatagaatgtcaaatcttgcatcaggggtcccagatcgctttagtggatctgggtcaggcacagctttcaccctgagaatctccggagtggaagcagaagacgtaggcgtgtattactgtatgcagcaccttgagtatccttatacctttggaggcggaactaagctcgaaattaaaggcggaggcggaagtggaggcggaggatctggcggcggaggctctcaggttcaactgcagcagtctggacctgaactggtgaagcctggggcctcagtgaagatgtcctgcaaggcttctggctacgcattcagtagttcctggttgaactgggtgaggcagaggcctggaaagggtcttgagtggattggacggatttatcctggagatggagaaaatcactataatgggaaattcaagggcaaggccacactgactgcagacaaatcctccagcacaggctacatgcaactcagcagcctgacgtctgaggactctgcggtctacttctgtgcaagttattatgaagggggttattggggccaagggactctaatcactgtctctgcaacgcgtgagcagaaactgatctcggaagaggatctggcgaagcccaccacgacgccagcgccgcgaccaccaacaccggcgcccaccatcgcgtcgcagcccctgtccctgcgcccagaggcgtgccggccagcggcggggggcgcagtgcacacgagggggctggacttcgcctgtgacatctacatctgggcgcccttggccgggacttgtggggtccttctcctgtcactggttatcaccctttactgcgggcgcgccagagtgaagttcagcaggagcgcagacgcccccgcgtaccagcagggccagaaccagctctataacgagctgaatctaggacgaagagaggagtacgatgttttggacaagagacgtggccgggaccctgagatggggggaaagccgagaaggaagaaccctcaggaaggcctgtacaatgaactgcagaaagataagatggcggaggcctacagtgagattgggatgaaaggcgagcgccggaggggcaaggggcacgatggcctttaccagggtctcagtacagccaccaaggacacctacgacgcccttcacatgcaggccctgccccctcgctctagaggatctggagcaacaaacttctcactactcaaacaagcaggtgacgtggaggagaatcccgggcctgggatccacatggccacttacgaggttctctgtgaggtggcgcggaaactgggcacggatgacagggaagtggtattgttcctcctaaacgtgttcatacctcaacccacactggcccaattaattggagctcttagagctttaaaggaggagggcaggttaacgtttcccctgttagcggaatgtctgtttcgtgcaggtcgcagagacctcttgcgcgacctgcttcacttagacccgcgttttttagagcgccacctagcgggcacaatgagttatttcagcccttatcagctcactgttctccacgtagacggggagctgtgtgcgagggatattaggtctttgatatttttaagcaaggacactatagggtctcgcagcacaccacagacattcttacactgggtgtactgtatggaaaacttagacctactgggtcccactgacgtggatgccctaatgtcaatgcttagatctttgtcaagagtagacctacagcgccaagtgcaaaccctaatgggccttcacctttccggcccatcacactcccaacactatcgccatacaccactcgagaccgatttctacgactacaaggacgacgatgacaagactagtggctccggcgagggcagaggaagtctactaacctgcggagatgtggaagaaaatcctggcccacatatgaccgagtacaagcccacggtgcgcctcgccacccgcgacgacgtccccagggccgtacgcaccctcgccgccgcgttcgccgactaccccgccacgcgccacaccgtcgatccggaccgccacatcgagcgggtcaccgagctgcaagaactcttcctcacgcgcgtcgggctcgacatcggcaaggtgtgggtcgcggacgacggcgccgcggtggcggtctggaccacgccggagagcgtcgaagcgggggcggtgttcgccgagatcggcccgcgcatggccgagttgagcggttcccggctggccgcgcagcaacagatggaaggcctcctggcgccgcaccggcccaaggagcccgcgtggttcctggccaccgtcggcgtctcgcccgaccaccagggcaagggtctgggcagcgccgtcgtgctccccggagtggaggcggccgagcgcgccggggtgcccgccttcctggagacctccgcgccccgcaacctccccttctacgagcggctcggcttcaccgtcaccgccgacgtcgaggtgcccgaaggaccgcgcacctggtgcatgacccgcaagcccggtgcctga

SEQ ID NO: 1122 - DNA, 2742 bp, Artificial Sequence
  Synthetic Polynucleotides
atggccttaccagtgaccgccttgctcctgccgctggccttgctgctccacgccgccaggccggacatcgtactgacacagagccccgcttctctggcagtgtcactgggccagtccgttacaatatcctgtcgggcgagtgaatccgtggaatactatggaacaagtctcatgcagtggtatcagcagaaacctggacagccccccaagctgctcatctacggtgcgtcaaatgtcgagagtggggttccggcccgattcagtggttccgggagtggcacagactttagcctcaacatccatcctgttgaggaagacgatattgccatgtatttttgccaacagtcccgcaaagtcccctggacctttggtggaggaactaagctggagatcaagggcggaggcggaagtggaggcggaggatctggcggcggaggctctgaggtcaagctggtagagagtggaggtgggctggttaaaccaggggggagcagaaaactgagttgtgccgcaagtggcttcaccttttctagctataccatgagctgggtaagacaaactccagcaaagcgccttgagtgggtcgcaacaattagcagcggatcttctactatttattacgctgacactgttaagggccggtttaccatatcaagagacaacgccaagaatacccttttccttcaaatgacttcactgcggtccgaggatacggcaatgtactattgtgcacgacggtggtttctcgactgctggggccaggggactacccttaccgtgtctagtacgcgtgagcagaaactgatctcggaagaggatctggcgaagcccaccacgacgccagcgccgcgaccaccaacaccggcgcccaccatcgcgtcgcagcccctgtccctgcgcccagaggcgtgccggccagcggcggggggcgcagtgcacacgagggggctggacttcgcctgtgacatctacatctgggcgcccttggccgggacttgtggggtccttctcctgtcactggttatcaccctttactgcgggcgcgccagagtgaagttcagcaggagcgcagacgcccccgcgtaccagcagggccagaaccagctctataacgagctgaatctaggacgaagagaggagtacgatgttttggacaagagacgtggccgggaccctgagatggggggaaagccgagaaggaagaaccctcaggaaggcctgtacaatgaactgcagaaagataagatggcggaggcctacagtgagattgggatgaaaggcgagcgccggaggggcaaggggcacgatggcctttaccagggtctcagtacagccaccaaggacacctacgacgcccttcacatgcaggccctgccccctcgctctagaggatctggagcaacaaacttctcactactcaaacaagcaggtgacgtggaggagaatcccgggcctgggatccacatggccacttacgaggttctctgtgaggtggcgcggaaactgggcacggatgacagggaagtggtattgttcctcctaaacgtgttcatacctcaacccacactggcccaattaattggagctcttagagctttaaaggaggagggcaggttaacgtttcccctgttagcggaatgtctgtttcgtgcaggtcgcagagacctcttgcgcgacctgcttcacttagacccgcgttttttagagcgccacctagcgggcacaatgagttatttcagcccttatcagctcactgttctccacgtagacggggagctgtgtgcgagggatattaggtctttgatatttttaagcaaggacactatagggtctcgcagcacaccacagacattcttacactgggtgtactgtatggaaaacttagacctactgggtcccactgacgtggatgccctaatgtcaatgcttagatctttgtcaagagtagacctacagcgccaagtgcaaaccctaatgggccttcacctttccggcccatcacactcccaacactatcgccatacaccactcgagaccgatttctacgactacaaggacgacgatgacaagactagtggctccggcgagggcagaggaagtctactaacctgcggagatgtggaagaaaatcctggcccacatatgaccgagtacaagcccacggtgcgcctcgccacccgcgacgacgtccccagggccgtacgcaccctcgccgccgcgttcgccgactaccccgccacgcgccacaccgtcgatccggaccgccacatcgagcgggtcaccgagctgcaagaactcttcctcacgcgcgtcgggctcgacatcggcaaggtgtgggtcgcggacgacggcgccgcggtggcggtctggaccacgccggagagcgtcgaagcgggggcggtgttcgccgagatcggcccgcgcatggccgagttgagcggttcccggctggccgcgcagcaacagatggaaggcctcctggcgccgcaccggcccaaggagcccgcgtggttcctggccaccgtcggcgtctcgcccgaccaccagggcaagggtctgggcagcgccgtcgtgctccccggagtggaggcggccgagcgcgccggggtgcccgccttcctggagacctccgcgccccgcaacctccccttctacgagcggctcggcttcaccgtcaccgccgacgtcgaggtgcccgaaggaccgcgcacctggtgcatgacccgcaagcccggtgcctga

SEQ ID NO: 1123 - DNA, 2751 bp, Artificial Sequence
  Synthetic Polynucleotides
atggccttaccagtgaccgccttgctcctgccgctggccttgctgctccacgccgccaggccggaccaggtgcagctgcagcagtcgggcccaggactggtgaagccttcggagaccctgtccctcacctgcactgtctctggtgactccatcagtagttactactggagctggatcaggcagcccccagggaagggactggagtggattgggtatatctattacagtgggagcaccaactacaacccctccctcaagagtcgagtcaccatatcagtagacacgtccaagagccagttctccctgaagctgagctctgtgaccgccgcagacacggccgtgtattactgtgcgcgcggcaggtacttcgatgtctggggacgaggcactatggtgactagcagcggcggaggcggaagtggaggcggaggatctggcggcggaggctcttcctcctacgtgctgactcagcctccctccgtgtctgggtctcctggacagtcgatcaccatctcctgcactggaaccagcagtgacgttggtggttataactatgtctcctggtaccaacaacacccaggcaaagcccccaaactcatgatttatgagggcagtaagcggccctcaggggtttctaatcgcttctctggctccaagtctggcaacacggcctccctgacaatctctgggctccaggctgaggacgaggctgattattactgcagctcatatacaaccaggagcacccgagttttcggcggagggaccaagctgaccgtcctaggtgccgccgcaacgcgtgagcagaaactgatctcggaagaggatctggcgaagcccaccacgacgccagcgccgcgaccaccaacaccggcgcccaccatcgcgtcgcagcccctgtccctgcgcccagaggcgtgccggccagcggcggggggcgcagtgcacacgagggggctggacttcgcctgtgacatctacatctgggcgcccttggccgggacttgtggggtccttctcctgtcactggttatcaccctttactgcgggcgcgccagagtgaagttcagcaggagcgcagacgcccccgcgtaccagcagggccagaaccagctctataacgagctgaatctaggacgaagagaggagtacgatgttttggacaagagacgtggccgggaccctgagatggggggaaagccgagaaggaagaaccctcaggaaggcctgtacaatgaactgcagaaagataagatggcggaggcctacagtgagattgggatgaaaggcgagcgccggaggggcaaggggcacgatggcctttaccagggtctcagtacagccaccaaggacacctacgacgcccttcacatgcaggccctgccccctcgctctagaggatctggagcaacaaacttctcactactcaaacaagcaggtgacgtggaggagaatcccgggcctgggatccacatggccacttacgaggttctctgtgaggtggcgcggaaactgggcacggatgacagggaagtggtattgttcctcctaaacgtgttcatacctcaacccacactggcccaattaattggagctcttagagctttaaaggaggagggcaggttaacgtttcccctgttagcggaatgtctgtttcgtgcaggtcgcagagacctcttgcgcgacctgcttcacttagacccgcgttttttagagcgccacctagcgggcacaatgagttatttcagcccttatcagctcactgttctccacgtagacggggagctgtgtgcgagggatattaggtctttgatatttttaagcaaggacactatagggtctcgcagcacaccacagacattcttacactgggtgtactgtatggaaaacttagacctactgggtcccactgacgtggatgccctaatgtcaatgcttagatctttgtcaagagtagacctacagcgccaagtgcaaaccctaatgggccttcacctttccggcccatcacactcccaacactatcgccatacaccactcgagaccgatttctacgactacaaggacgacgatgacaagactagtggctccggcgagggcagaggaagtctactaacctgcggagatgtggaagaaaatcctggcccacatatgaccgagtacaagcccacggtgcgcctcgccacccgcgacgacgtccccagggccgtacgcaccctcgccgccgcgttcgccgactaccccgccacgcgccacaccgtcgatccggaccgccacatcgagcgggtcaccgagctgcaagaactcttcctcacgcgcgtcgggctcgacatcggcaaggtgtgggtcgcggacgacggcgccgcggtggcggtctggaccacgccggagagcgtcgaagcgggggcggtgttcgccgagatcggcccgcgcatggccgagttgagcggttcccggctggccgcgcagcaacagatggaaggcctcctggcgccgcaccggcccaaggagcccgcgtggttcctggccaccgtcggcgtctcgcccgaccaccagggcaagggtctgggcagcgccgtcgtgctccccggagtggaggcggccgagcgcgccggggtgcccgccttcctggagacctccgcgccccgcaacctccccttctacgagcggctcggcttcaccgtcaccgccgacgtcgaggtgcccgaaggaccgcgcacctggtgcatgacccgcaagcccggtgcctga

SEQ ID NO: 1124 - DNA, 2754 bp, Artificial Sequence
  Synthetic Polynucleotides
atggccttaccagtgaccgccttgctcctgccgctggccttgctgctccacgccgccaggccggacatcgtaatgacacagtctcccctgtccctccctgtcacaccaggtgaacctgccagtatttcttgtagatccagtaagtcacttctgcactccaatgggaacacctacctgtattggttccagcaaaagcctggtcaggcacctcgcttgcttatttataggatgtccaatcttgcatccggcgtgccagaccgattctcaggctccggctctggtactgcatttaccctgaaaatctcccgcgtggaagcagaagatgtgggcgtgtactactgtatgcagcacatcgagtaccccttcacgtttggtcaaggcacaaagctggaaatcaaaggcggaggcggaagtggaggcggaggatctggcggcggaggctctcaggtccagctcgtccagtctggacccgaagtcaagaagccaggcgcctctgtgaaggtttcttgtaaggccagcggatatacattcactaattcatggatgaactgggtgaggcagcgccctggcaaggggcttgagtggatcgggcggatttacccaggggatggcgagacaatttacaacgggaaatttcgggtgagagtgacgatcaccgcagacgaatctacaagcacggcctacatggagttgtcctctctcaggagtgaggacaccgccgtctactattgtgctagaggttatgacgactattcattcgcatactggggccagggcaccaccgtcacagtatcatctacgcgtgagcagaaactgatctcggaagaggatctggcgaagcccaccacgacgccagcgccgcgaccaccaacaccggcgcccaccatcgcgtcgcagcccctgtccctgcgcccagaggcgtgccggccagcggcggggggcgcagtgcacacgagggggctggacttcgcctgtgacatctacatctgggcgcccttggccgggacttgtggggtccttctcctgtcactggttatcaccctttactgcgggcgcgccagagtgaagttcagcaggagcgcagacgcccccgcgtaccagcagggccagaaccagctctataacgagctgaatctaggacgaagagaggagtacgatgttttggacaagagacgtggccgggaccctgagatggggggaaagccgagaaggaagaaccctcaggaaggcctgtacaatgaactgcagaaagataagatggcggaggcctacagtgagattgggatgaaaggcgagcgccggaggggcaaggggcacgatggcctttaccagggtctcagtacagccaccaaggacacctacgacgcccttcacatgcaggccctgccccctcgctctagaggatctggagcaacaaacttctcactactcaaacaagcaggtgacgtggaggagaatcccgggcctgggatccacatggccacttacgaggttctctgtgaggtggcgcggaaactgggcacggatgacagggaagtggtattgttcctcctaaacgtgttcatacctcaacccacactggcccaattaattggagctcttagagctttaaaggaggagggcaggttaacgtttcccctgttagcggaatgtctgtttcgtgcaggtcgcagagacctcttgcgcgacctgcttcacttagacccgcgttttttagagcgccacctagcgggcacaatgagttatttcagcccttatcagctcactgttctccacgtagacggggagctgtgtgcgagggatattaggtctttgatatttttaagcaaggacactatagggtctcgcagcacaccacagacattcttacactgggtgtactgtatggaaaacttagacctactgggtcccactgacgtggatgccctaatgtcaatgcttagatctttgtcaagagtagacctacagcgccaagtgcaaaccctaatgggccttcacctttccggcccatcacactcccaacactatcgccatacaccactcgagaccgatttctacgactacaaggacgacgatgacaagactagtggctccggcgagggcagaggaagtctactaacctgcggagatgtggaagaaaatcctggcccacatatgaccgagtacaagcccacggtgcgcctcgccacccgcgacgacgtccccagggccgtacgcaccctcgccgccgcgttcgccgactaccccgccacgcgccacaccgtcgatccggaccgccacatcgagcgggtcaccgagctgcaagaactcttcctcacgcgcgtcgggctcgacatcggcaaggtgtgggtcgcggacgacggcgccgcggtggcggtctggaccacgccggagagcgtcgaagcgggggcggtgttcgccgagatcggcccgcgcatggccgagttgagcggttcccggctggccgcgcagcaacagatggaaggcctcctggcgccgcaccggcccaaggagcccgcgtggttcctggccaccgtcggcgtctcgcccgaccaccagggcaagggtctgggcagcgccgtcgtgctccccggagtggaggcggccgagcgcgccggggtgcccgccttcctggagacctccgcgccccgcaacctccccttctacgagcggctcggcttcaccgtcaccgccgacgtcgaggtgcccgaaggaccgcgcacctggtgcatgacccgcaagcccggtgcctga

SEQ ID NO: 1125 - DNA, 2754 bp, Artificial Sequence
  Synthetic Polynucleotides
atggccttaccagtgaccgccttgctcctgccgctggccttgctgctccacgccgccaggccggacgagatcgtgatgacccagagccctgccaccctgtctctgagccctggcgaaagagccaccctgagctgtagagccagccagagcgtgtccagctacctggcctggtatcagcagaagcccggccaggctccccggctgctgatctacgatgccagcaatagagccaccggcatccccgccagattttccggctctggcagcggcaccgacttcaccctgaccatcagctccctggaacccgaggacttcgccgtgtactactgccaccagtacggcagcagcccccagacctttggacagggcaccaaggtggaaatcaagcggggcggaggcggaagtggaggcggaggatctggcggcggaggctctgaagtgcagctggtgcagtctggggccgaagtgaagaaacccggcagctccgtgaaggtgtcctgcaaggcttccggcggcaccttcagcagctacgccatttcttgggtgcgccaggcccctggacagggactggaatggatgggcggcatcatccccatcttcggcaccgccaactacgcccagaaattccagggcagagtgaccatcaccgccgacgagagcaccagcaccgcctacatggaactgagcagcctgcggagcgaggacacagccgtgtattattgcgccgtgcactacggcgactacgtgttcagcagcatggacgtgtggggccagggcacaaccgtgaccgtgtcatctacgcgtgagcagaaactgatctcggaagaggatctggcgaagcccaccacgacgccagcgccgcgaccaccaacaccggcgcccaccatcgcgtcgcagcccctgtccctgcgcccagaggcgtgccggccagcggcggggggcgcagtgcacacgagggggctggacttcgcctgtgacatctacatctgggcgcccttggccgggacttgtggggtccttctcctgtcactggttatcaccctttactgcgggcgcgccagagtgaagttcagcaggagcgcagacgcccccgcgtaccagcagggccagaaccagctctataacgagctgaatctaggacgaagagaggagtacgatgttttggacaagagacgtggccgggaccctgagatggggggaaagccgagaaggaagaaccctcaggaaggcctgtacaatgaactgcagaaagataagatggcggaggcctacagtgagattgggatgaaaggcgagcgccggaggggcaaggggcacgatggcctttaccagggtctcagtacagccaccaaggacacctacgacgcccttcacatgcaggccctgccccctcgctctagaggatctggagcaacaaacttctcactactcaaacaagcaggtgacgtggaggagaatcccgggcctgggatccacatggccacttacgaggttctctgtgaggtggcgcggaaactgggcacggatgacagggaagtggtattgttcctcctaaacgtgttcatacctcaacccacactggcccaattaattggagctcttagagctttaaaggaggagggcaggttaacgtttcccctgttagcggaatgtctgtttcgtgcaggtcgcagagacctcttgcgcgacctgcttcacttagacccgcgttttttagagcgccacctagcgggcacaatgagttatttcagcccttatcagctcactgttctccacgtagacggggagctgtgtgcgagggatattaggtctttgatatttttaagcaaggacactatagggtctcgcagcacaccacagacattcttacactgggtgtactgtatggaaaacttagacctactgggtcccactgacgtggatgccctaatgtcaatgcttagatctttgtcaagagtagacctacagcgccaagtgcaaaccctaatgggccttcacctttccggcccatcacactcccaacactatcgccatacaccactcgagaccgatttctacgactacaaggacgacgatgacaagactagtggctccggcgagggcagaggaagtctactaacctgcggagatgtggaagaaaatcctggcccacatatgaccgagtacaagcccacggtgcgcctcgccacccgcgacgacgtccccagggccgtacgcaccctcgccgccgcgttcgccgactaccccgccacgcgccacaccgtcgatccggaccgccacatcgagcgggtcaccgagctgcaagaactcttcctcacgcgcgtcgggctcgacatcggcaaggtgtgggtcgcggacgacggcgccgcggtggcggtctggaccacgccggagagcgtcgaagcgggggcggtgttcgccgagatcggcccgcgcatggccgagttgagcggttcccggctggccgcgcagcaacagatggaaggcctcctggcgccgcaccggcccaaggagcccgcgtggttcctggccaccgtcggcgtctcgcccgaccaccagggcaagggtctgggcagcgccgtcgtgctccccggagtggaggcggccgagcgcgccggggtgcccgccttcctggagacctccgcgccccgcaacctccccttctacgagcggctcggcttcaccgtcaccgccgacgtcgaggtgcccgaaggaccgcgcacctggtgcatgacccgcaagcccggtgcctga

SEQ ID NO: 1126 - DNA, 2763 bp, Artificial Sequence
  Synthetic Polynucleotides
atggccttaccagtgaccgccttgctcctgccgctggccttgctgctccacgccgccaggccggacgagacaaccctgacacagagccctggcaccctgagcctgtctccaggcgaaagagccacactgagctgtcgggccagccagagcgtgtccagctcttacctggcctggtatcagcagaagcccggccaggctccccggctgctgatctatggcgcttctagcagagccaccggcatccccgatagattcagcggctctggcagcggcaccgacttcaccctgaccatcagcagactggaacccgaggacttcgccgtgtactactgccagcagtacggcagcagccccagaacattcggccagggcaccaaggtggaaatcaagagaggcggaggcggaagtggaggcggaggatctggcggcggaggctctgaagtgcaactggtgcagagcggagccgaagtgaagaaacccggcagctccgtgaaggtgtcctgcaaggcttccggcggcaccttcagcagctacgccatttcttgggtgcgccaggcccctggacagggcctggaatggatgggcggcatcatccccatcttcggcaccgccaactacgcccagaaattccagggcagagtgaccatcaccgccgacgagagcaccagcaccgcctacatggaactgagcagcctgcggagcgaggacacagccgtgtattattgcgccagaggccccgagtattgcatcaacggcgtgtgcagcctggacgtgtggggccagggaacaaccgtgaccgtgtctagcacgcgtgagcagaaactgatctcggaagaggatctggcgaagcccaccacgacgccagcgccgcgaccaccaacaccggcgcccaccatcgcgtcgcagcccctgtccctgcgcccagaggcgtgccggccagcggcggggggcgcagtgcacacgagggggctggacttcgcctgtgacatctacatctgggcgcccttggccgggacttgtggggtccttctcctgtcactggttatcaccctttactgcgggcgcgccagagtgaagttcagcaggagcgcagacgcccccgcgtaccagcagggccagaaccagctctataacgagctgaatctaggacgaagagaggagtacgatgttttggacaagagacgtggccgggaccctgagatggggggaaagccgagaaggaagaaccctcaggaaggcctgtacaatgaactgcagaaagataagatggcggaggcctacagtgagattgggatgaaaggcgagcgccggaggggcaaggggcacgatggcctttaccagggtctcagtacagccaccaaggacacctacgacgcccttcacatgcaggccctgccccctcgctctagaggatctggagcaacaaacttctcactactcaaacaagcaggtgacgtggaggagaatcccgggcctgggatccacatggccacttacgaggttctctgtgaggtggcgcggaaactgggcacggatgacagggaagtggtattgttcctcctaaacgtgttcatacctcaacccacactggcccaattaattggagctcttagagctttaaaggaggagggcaggttaacgtttcccctgttagcggaatgtctgtttcgtgcaggtcgcagagacctcttgcgcgacctgcttcacttagacccgcgttttttagagcgccacctagcgggcacaatgagttatttcagcccttatcagctcactgttctccacgtagacggggagctgtgtgcgagggatattaggtctttgatatttttaagcaaggacactatagggtctcgcagcacaccacagacattcttacactgggtgtactgtatggaaaacttagacctactgggtcccactgacgtggatgccctaatgtcaatgcttagatctttgtcaagagtagacctacagcgccaagtgcaaaccctaatgggccttcacctttccggcccatcacactcccaacactatcgccatacaccactcgagaccgatttctacgactacaaggacgacgatgacaagactagtggctccggcgagggcagaggaagtctactaacctgcggagatgtggaagaaaatcctggcccacatatgaccgagtacaagcccacggtgcgcctcgccacccgcgacgacgtccccagggccgtacgcaccctcgccgccgcgttcgccgactaccccgccacgcgccacaccgtcgatccggaccgccacatcgagcgggtcaccgagctgcaagaactcttcctcacgcgcgtcgggctcgacatcggcaaggtgtgggtcgcggacgacggcgccgcggtggcggtctggaccacgccggagagcgtcgaagcgggggcggtgttcgccgagatcggcccgcgcatggccgagttgagcggttcccggctggccgcgcagcaacagatggaaggcctcctggcgccgcaccggcccaaggagcccgcgtggttcctggccaccgtcggcgtctcgcccgaccaccagggcaagggtctgggcagcgccgtcgtgctccccggagtggaggcggccgagcgcgccggggtgcccgccttcctggagacctccgcgccccgcaacctccccttctacgagcggctcggcttcaccgtcaccgccgacgtcgaggtgcccgaaggaccgcgcacctggtgcatgacccgcaagcccggtgcctga

SEQ ID NO: 1127 - DNA, 2769 bp, Artificial Sequence
  Synthetic Polynucleotides
atggccttaccagtgaccgccttgctcctgccgctggccttgctgctccacgccgccaggccggacatcgagctgacccagagccctagcagcctggctgtgtctgccggcgagaaagtgaccatgagctgcaagagcagccagagcctgctgaacagccggacccggaagaatcaactggcctggtatcagcagaagcccggccagtctcccgagctgctgatctactgggccagcaccagacagagcggcgtgcccgatagattcacaggcagcggctccggcaccgacttcaccctgacaatcagcagcgtgcaggccgaggacctggccgtgtactactgccagcagagctacaacctgctgaccttcggccctggcaccaagctggaagtgaagagaggcggaggcggaagtggaggcggaggatctggcggcggaggctctgtgaagctgcaggaatctggcggcggattcgtgaagcctggcggctctctgaaggtgtcctgtgccgccagcggcttcaccttcagcagctacgccatgtcctgggtgcgcctgagccccgagatgagactggaatgggtggcaaccatcagctccgcaggcggctacatcttctacagcgactccgtgcagggccggttcaccatctccagagacaacgccaagaacaccctgcatctgcagatgggcagcctgagaagcggcgacaccgccatgtactattgcgccagacagggcttcggcaactacggcgactactacgctatggactactggggccagggaaccaccgtgaccgtgtctagtacgcgtgagcagaaactgatctcggaagaggatctggcgaagcccaccacgacgccagcgccgcgaccaccaacaccggcgcccaccatcgcgtcgcagcccctgtccctgcgcccagaggcgtgccggccagcggcggggggcgcagtgcacacgagggggctggacttcgcctgtgacatctacatctgggcgcccttggccgggacttgtggggtccttctcctgtcactggttatcaccctttactgcgggcgcgccagagtgaagttcagcaggagcgcagacgcccccgcgtaccagcagggccagaaccagctctataacgagctgaatctaggacgaagagaggagtacgatgttttggacaagagacgtggccgggaccctgagatggggggaaagccgagaaggaagaaccctcaggaaggcctgtacaatgaactgcagaaagataagatggcggaggcctacagtgagattgggatgaaaggcgagcgccggaggggcaaggggcacgatggcctttaccagggtctcagtacagccaccaaggacacctacgacgcccttcacatgcaggccctgccccctcgctctagaggatctggagcaacaaacttctcactactcaaacaagcaggtgacgtggaggagaatcccgggcctgggatccacatggccacttacgaggttctctgtgaggtggcgcggaaactgggcacggatgacagggaagtggtattgttcctcctaaacgtgttcatacctcaacccacactggcccaattaattggagctcttagagctttaaaggaggagggcaggttaacgtttcccctgttagcggaatgtctgtttcgtgcaggtcgcagagacctcttgcgcgacctgcttcacttagacccgcgttttttagagcgccacctagcgggcacaatgagttatttcagcccttatcagctcactgttctccacgtagacggggagctgtgtgcgagggatattaggtctttgatatttttaagcaaggacactatagggtctcgcagcacaccacagacattcttacactgggtgtactgtatggaaaacttagacctactgggtcccactgacgtggatgccctaatgtcaatgcttagatctttgtcaagagtagacctacagcgccaagtgcaaaccctaatgggccttcacctttccggcccatcacactcccaacactatcgccatacaccactcgagaccgatttctacgactacaaggacgacgatgacaagactagtggctccggcgagggcagaggaagtctactaacctgcggagatgtggaagaaaatcctggcccacatatgaccgagtacaagcccacggtgcgcctcgccacccgcgacgacgtccccagggccgtacgcaccctcgccgccgcgttcgccgactaccccgccacgcgccacaccgtcgatccggaccgccacatcgagcgggtcaccgagctgcaagaactcttcctcacgcgcgtcgggctcgacatcggcaaggtgtgggtcgcggacgacggcgccgcggtggcggtctggaccacgccggagagcgtcgaagcgggggcggtgttcgccgagatcggcccgcgcatggccgagttgagcggttcccggctggccgcgcagcaacagatggaaggcctcctggcgccgcaccggcccaaggagcccgcgtggttcctggccaccgtcggcgtctcgcccgaccaccagggcaagggtctgggcagcgccgtcgtgctccccggagtggaggcggccgagcgcgccggggtgcccgccttcctggagacctccgcgccccgcaacctccccttctacgagcggctcggcttcaccgtcaccgccgacgtcgaggtgcccgaaggaccgcgcacctggtgcatgacccgcaagcccggtgcctga

SEQ ID NO: 1128 - DNA, 2766 bp, Artificial Sequence
  Synthetic Polynucleotides
atggccttaccagtgaccgccttgctcctgccgctggccttgctgctccacgccgccaggccggacatccagatgacccagagccccagcagcctgtctgccagcgtgggcgacagagtgaccatcacctgtcggagcagccagaacatcgtgcacagcaacggcaacacctacctggactggtatcagcagacccccggcaaggcccccaagctgctgatctacaaggtgtccaacagattcagcggcgtgcccagcaggtttagcggctctggcagcggcaccgacttcaccttcaccatcagctccctccagcccgaggacattgccacctactactgcttccagtacagccacgtgccctggaccttcggccagggcacaaagctccagatcggcggaggcggaagtggaggcggaggatctggcggcggaggctctcaggtgcagctccagcagtctggggccgaagtgaagaaacccggcagcagcgtgaaggtgtcctgcaaggccagcggctacacctttaccaactactacatctactgggtgcgccaggccccaggccagggactggaatggatcggcggcatcaatcctaccagcggcggcagcaacttcaacgagaagttcaagacccgcgtgacaatcaccgccgacgagagcagcaccaccgcctacatggaactgagcagcctgcggagcgaggataccgccttctacttctgcacccggcagggcctgtggttcgactctgatggcagaggcttcgacttctggggccagggaaccaccgtgaccgtgtctagtacgcgtgagcagaaactgatctcggaagaggatctggcgaagcccaccacgacgccagcgccgcgaccaccaacaccggcgcccaccatcgcgtcgcagcccctgtccctgcgcccagaggcgtgccggccagcggcggggggcgcagtgcacacgagggggctggacttcgcctgtgacatctacatctgggcgcccttggccgggacttgtggggtccttctcctgtcactggttatcaccctttactgcgggcgcgccagagtgaagttcagcaggagcgcagacgcccccgcgtaccagcagggccagaaccagctctataacgagctgaatctaggacgaagagaggagtacgatgttttggacaagagacgtggccgggaccctgagatggggggaaagccgagaaggaagaaccctcaggaaggcctgtacaatgaactgcagaaagataagatggcggaggcctacagtgagattgggatgaaaggcgagcgccggaggggcaaggggcacgatggcctttaccagggtctcagtacagccaccaaggacacctacgacgcccttcacatgcaggccctgccccctcgctctagaggatctggagcaacaaacttctcactactcaaacaagcaggtgacgtggaggagaatcccgggcctgggatccacatggccacttacgaggttctctgtgaggtggcgcggaaactgggcacggatgacagggaagtggtattgttcctcctaaacgtgttcatacctcaacccacactggcccaattaattggagctcttagagctttaaaggaggagggcaggttaacgtttcccctgttagcggaatgtctgtttcgtgcaggtcgcagagacctcttgcgcgacctgcttcacttagacccgcgttttttagagcgccacctagcgggcacaatgagttatttcagcccttatcagctcactgttctccacgtagacggggagctgtgtgcgagggatattaggtctttgatatttttaagcaaggacactatagggtctcgcagcacaccacagacattcttacactgggtgtactgtatggaaaacttagacctactgggtcccactgacgtggatgccctaatgtcaatgcttagatctttgtcaagagtagacctacagcgccaagtgcaaaccctaatgggccttcacctttccggcccatcacactcccaacactatcgccatacaccactcgagaccgatttctacgactacaaggacgacgatgacaagactagtggctccggcgagggcagaggaagtctactaacctgcggagatgtggaagaaaatcctggcccacatatgaccgagtacaagcccacggtgcgcctcgccacccgcgacgacgtccccagggccgtacgcaccctcgccgccgcgttcgccgactaccccgccacgcgccacaccgtcgatccggaccgccacatcgagcgggtcaccgagctgcaagaactcttcctcacgcgcgtcgggctcgacatcggcaaggtgtgggtcgcggacgacggcgccgcggtggcggtctggaccacgccggagagcgtcgaagcgggggcggtgttcgccgagatcggcccgcgcatggccgagttgagcggttcccggctggccgcgcagcaacagatggaaggcctcctggcgccgcaccggcccaaggagcccgcgtggttcctggccaccgtcggcgtctcgcccgaccaccagggcaagggtctgggcagcgccgtcgtgctccccggagtggaggcggccgagcgcgccggggtgcccgccttcctggagacctccgcgccccgcaacctccccttctacgagcggctcggcttcaccgtcaccgccgacgtcgaggtgcccgaaggaccgcgcacctggtgcatgacccgcaagcccggtgcctga

SEQ ID NO: 1129 - DNA, 2454 bp, Artificial Sequence
  Synthetic Polynucleotides
atggccttaccagtgaccgccttgctcctgccgctggccttgctgctccacgccgccaggccgctgttcaaccaggaagtgcagatccccctgaccgagagctactgcggcccctgccccaagaactggatctgctacaagaacaactgctaccagttcttcgacgagagcaagaattggtacgagagccaggcttcctgcatgagccagaacgccagcctgctgaaggtgtacagcaaagaggaccaggatctgctgaagctggtcaagagctaccactggatgggcctggtgcacatccccaccaacggctcttggcagtgggaggacggcagcatcctgagccccaacctgctgaccatcatcgagatgcagaagggcgactgcgccctgtacgccagcagcttcaagggctacatcgagaactgctccacccccaacacctacatctgtatgcagcggaccgtgggcggaggcggaagtggaggcggaggagacacgcgtgagcagaaactgatctcggaagaggatctggcgaagcccaccacgacgccagcgccgcgaccaccaacaccggcgcccaccatcgcgtcgcagcccctgtccctgcgcccagaggcgtgccggccagcggcggggggcgcagtgcacacgagggggctggacttcgcctgtgacatctacatctgggcgcccttggccgggacttgtggggtccttctcctgtcactggttatcaccctttactgcgggcgcgccagagtgaagttcagcaggagcgcagacgcccccgcgtaccagcagggccagaaccagctctataacgagctgaatctaggacgaagagaggagtacgatgttttggacaagagacgtggccgggaccctgagatggggggaaagccgagaaggaagaaccctcaggaaggcctgtacaatgaactgcagaaagataagatggcggaggcctacagtgagattgggatgaaaggcgagcgccggaggggcaaggggcacgatggcctttaccagggtctcagtacagccaccaaggacacctacgacgcccttcacatgcaggccctgccccctcgctctagaggatctggagcaacaaacttctcactactcaaacaagcaggtgacgtggaggagaatcccgggcctgggatccacatggccacttacgaggttctctgtgaggtggcgcggaaactgggcacggatgacagggaagtggtattgttcctcctaaacgtgttcatacctcaacccacactggcccaattaattggagctcttagagctttaaaggaggagggcaggttaacgtttcccctgttagcggaatgtctgtttcgtgcaggtcgcagagacctcttgcgcgacctgcttcacttagacccgcgttttttagagcgccacctagcgggcacaatgagttatttcagcccttatcagctcactgttctccacgtagacggggagctgtgtgcgagggatattaggtctttgatatttttaagcaaggacactatagggtctcgcagcacaccacagacattcttacactgggtgtactgtatggaaaacttagacctactgggtcccactgacgtggatgccctaatgtcaatgcttagatctttgtcaagagtagacctacagcgccaagtgcaaaccctaatgggccttcacctttccggcccatcacactcccaacactatcgccatacaccactcgagaccgatttctacgactacaaggacgacgatgacaagactagtggctccggcgagggcagaggaagtctactaacctgcggagatgtggaagaaaatcctggcccacatatgaccgagtacaagcccacggtgcgcctcgccacccgcgacgacgtccccagggccgtacgcaccctcgccgccgcgttcgccgactaccccgccacgcgccacaccgtcgatccggaccgccacatcgagcgggtcaccgagctgcaagaactcttcctcacgcgcgtcgggctcgacatcggcaaggtgtgggtcgcggacgacggcgccgcggtggcggtctggaccacgccggagagcgtcgaagcgggggcggtgttcgccgagatcggcccgcgcatggccgagttgagcggttcccggctggccgcgcagcaacagatggaaggcctcctggcgccgcaccggcccaaggagcccgcgtggttcctggccaccgtcggcgtctcgcccgaccaccagggcaagggtctgggcagcgccgtcgtgctccccggagtggaggcggccgagcgcgccggggtgcccgccttcctggagacctccgcgccccgcaacctccccttctacgagcggctcggcttcaccgtcaccgccgacgtcgaggtgcccgaaggaccgcgcacctggtgcatgacccgcaagcccggtgcctga

SEQ ID NO: 1130 - DNA, 2736 bp, Artificial Sequence
  Synthetic Polynucleotides
atggccttaccagtgaccgccttgctcctgccgctggccttgctgctccacgccgccaggccggagatcgtgctgacacagagccctggcaccctgagcctgtctccaggcgaaagagccacactgagctgtcgggccagccagagcgtgtccagctcttacctggcctggtatcagcagaagcccggccaggctccccggctgctgatctatggcgcttctagcagagccaccggcatccccgatagattcagcggctctggcagcggcaccgacttcaccctgaccatcagcagactggaacccgaggacttcgccgtgtactactgccagcagtacggcagcagcccctggacctttggacagggcaccaaggtggaaatcaagagaggcggaggcggaagtggaggcggaggatctggcggcggaggctctcaagtgcatctccaggaaagcggacccggcctcgtgaagcctagcgagacactgagcctgacctgcaccgtgtccgacgacagcatcagcagctactactggtcctggatcagacagccccctggcaagggcctggaatggatcggccacatcagctacagcggcagcgccaactacaaccccagcctgaagtccagagtgaccatctccgtggacaccagcaagaaccagttctccctgaagctgagcagcgtgacagccgccgacaccgccgtgtattattgcgccaactgggacgacgccttcaacatctggggccagggcacaatggtcaccgtgtctagcacgcgtgagcagaaactgatctcggaagaggatctggcgaagcccaccacgacgccagcgccgcgaccaccaacaccggcgcccaccatcgcgtcgcagcccctgtccctgcgcccagaggcgtgccggccagcggcggggggcgcagtgcacacgagggggctggacttcgcctgtgacatctacatctgggcgcccttggccgggacttgtggggtccttctcctgtcactggttatcaccctttactgcgggcgcgccagagtgaagttcagcaggagcgcagacgcccccgcgtaccagcagggccagaaccagctctataacgagctgaatctaggacgaagagaggagtacgatgttttggacaagagacgtggccgggaccctgagatggggggaaagccgagaaggaagaaccctcaggaaggcctgtacaatgaactgcagaaagataagatggcggaggcctacagtgagattgggatgaaaggcgagcgccggaggggcaaggggcacgatggcctttaccagggtctcagtacagccaccaaggacacctacgacgcccttcacatgcaggccctgccccctcgctctagaggatctggagcaacaaacttctcactactcaaacaagcaggtgacgtggaggagaatcccgggcctgggatccacatggccacttacgaggttctctgtgaggtggcgcggaaactgggcacggatgacagggaagtggtattgttcctcctaaacgtgttcatacctcaacccacactggcccaattaattggagctcttagagctttaaaggaggagggcaggttaacgtttcccctgttagcggaatgtctgtttcgtgcaggtcgcagagacctcttgcgcgacctgcttcacttagacccgcgttttttagagcgccacctagcgggcacaatgagttatttcagcccttatcagctcactgttctccacgtagacggggagctgtgtgcgagggatattaggtctttgatatttttaagcaaggacactatagggtctcgcagcacaccacagacattcttacactgggtgtactgtatggaaaacttagacctactgggtcccactgacgtggatgccctaatgtcaatgcttagatctttgtcaagagtagacctacagcgccaagtgcaaaccctaatgggccttcacctttccggcccatcacactcccaacactatcgccatacaccactcgagaccgatttctacgactacaaggacgacgatgacaagactagtggctccggcgagggcagaggaagtctactaacctgcggagatgtggaagaaaatcctggcccacatatgaccgagtacaagcccacggtgcgcctcgccacccgcgacgacgtccccagggccgtacgcaccctcgccgccgcgttcgccgactaccccgccacgcgccacaccgtcgatccggaccgccacatcgagcgggtcaccgagctgcaagaactcttcctcacgcgcgtcgggctcgacatcggcaaggtgtgggtcgcggacgacggcgccgcggtggcggtctggaccacgccggagagcgtcgaagcgggggcggtgttcgccgagatcggcccgcgcatggccgagttgagcggttcccggctggccgcgcagcaacagatggaaggcctcctggcgccgcaccggcccaaggagcccgcgtggttcctggccaccgtcggcgtctcgcccgaccaccagggcaagggtctgggcagcgccgtcgtgctccccggagtggaggcggccgagcgcgccggggtgcccgccttcctggagacctccgcgccccgcaacctccccttctacgagcggctcggcttcaccgtcaccgccgacgtcgaggtgcccgaaggaccgcgcacctggtgcatgacccgcaagcccggtgcctga

SEQ ID NO: 1131 - DNA, 2742 bp, Artificial Sequence
  Synthetic Polynucleotides
atggccttaccagtgaccgccttgctcctgccgctggccttgctgctccacgccgccaggccggacgtcgtgatgacccagacccctctgaccctgagcgtgaccattggacagcccgccagcatctcctgcaagagcagccagagcctgctggacagcgacggcaagacctatctccactggctgttgcaacggccaggtcagagccccaagagactgatcttcctggtgtccaagctggactccggcgtgcccgatagattcacaggcagcggctccggcaccgacttcaccctgaagatcagccgggtggaagccgaggacctgggcgtgtactactgttggcagggcacccacttcccccagacctttggcggcggaacaaagctggaaatcaagggcggaggcggaagtggaggcggaggatctggcggcggaggctctgtgcaactccaagagtccggccctgacctcgtgaagcctagccagtctctgagcctgacctgcaccgtgaccggctacagcatcaccagcggctactcttggcactggatcagacagttccccggcaacaagctggaatggatgggctacatccactacagcggcgacaccgactacaaccccagcctgaagtcccggttctccatcaccagagacaccagcaagaaccagttcttcttgcaactgaactccgtgaccaccgaggacaccgccacctactactgtgccacccctggcggctttgtgtactggggccagggaacactcgtgaccgtgtcctctacgcgtgagcagaaactgatctcggaagaggatctggcgaagcccaccacgacgccagcgccgcgaccaccaacaccggcgcccaccatcgcgtcgcagcccctgtccctgcgcccagaggcgtgccggccagcggcggggggcgcagtgcacacgagggggctggacttcgcctgtgacatctacatctgggcgcccttggccgggacttgtggggtccttctcctgtcactggttatcaccctttactgcgggcgcgccagagtgaagttcagcaggagcgcagacgcccccgcgtaccagcagggccagaaccagctctataacgagctgaatctaggacgaagagaggagtacgatgttttggacaagagacgtggccgggaccctgagatggggggaaagccgagaaggaagaaccctcaggaaggcctgtacaatgaactgcagaaagataagatggcggaggcctacagtgagattgggatgaaaggcgagcgccggaggggcaaggggcacgatggcctttaccagggtctcagtacagccaccaaggacacctacgacgcccttcacatgcaggccctgccccctcgctctagaggatctggagcaacaaacttctcactactcaaacaagcaggtgacgtggaggagaatcccgggcctgggatccacatggccacttacgaggttctctgtgaggtggcgcggaaactgggcacggatgacagggaagtggtattgttcctcctaaacgtgttcatacctcaacccacactggcccaattaattggagctcttagagctttaaaggaggagggcaggttaacgtttcccctgttagcggaatgtctgtttcgtgcaggtcgcagagacctcttgcgcgacctgcttcacttagacccgcgttttttagagcgccacctagcgggcacaatgagttatttcagcccttatcagctcactgttctccacgtagacggggagctgtgtgcgagggatattaggtctttgatatttttaagcaaggacactatagggtctcgcagcacaccacagacattcttacactgggtgtactgtatggaaaacttagacctactgggtcccactgacgtggatgccctaatgtcaatgcttagatctttgtcaagagtagacctacagcgccaagtgcaaaccctaatgggccttcacctttccggcccatcacactcccaacactatcgccatacaccactcgagaccgatttctacgactacaaggacgacgatgacaagactagtggctccggcgagggcagaggaagtctactaacctgcggagatgtggaagaaaatcctggcccacatatgaccgagtacaagcccacggtgcgcctcgccacccgcgacgacgtccccagggccgtacgcaccctcgccgccgcgttcgccgactaccccgccacgcgccacaccgtcgatccggaccgccacatcgagcgggtcaccgagctgcaagaactcttcctcacgcgcgtcgggctcgacatcggcaaggtgtgggtcgcggacgacggcgccgcggtggcggtctggaccacgccggagagcgtcgaagcgggggcggtgttcgccgagatcggcccgcgcatggccgagttgagcggttcccggctggccgcgcagcaacagatggaaggcctcctggcgccgcaccggcccaaggagcccgcgtggttcctggccaccgtcggcgtctcgcccgaccaccagggcaagggtctgggcagcgccgtcgtgctccccggagtggaggcggccgagcgcgccggggtgcccgccttcctggagacctccgcgccccgcaacctccccttctacgagcggctcggcttcaccgtcaccgccgacgtcgaggtgcccgaaggaccgcgcacctggtgcatgacccgcaagcccggtgcctga

SEQ ID NO: 1132 - DNA, 2754 bp, Artificial Sequence
  Synthetic Polynucleotides
atggccttaccagtgaccgccttgctcctgccgctggccttgctgctccacgccgccaggccggaccagagcgagctgacccagcctagaagcgtgtccggcagccctggacagagcgtgaccatcagctgtaccggcaccgagagagatgtgggcggctacaactacgtgtcctggtatcagcagcaccccggcaaggcccccaagctgatcatccacgacgtgatcgagcggagcagcggcgtgcccgatagattcagcggcagcaagagcggcaacaccgccagcctgacaatcagcggactgcaggccgaggacgaggccgactactactgctggtctttcgctggcggctactacgtgttcggcaccggcacagatgtgaccgtgctgggcggaggcggaagtggaggcggaggatctggcggcggaggctctttcgaagtgcagctgctggaatctggcggcggactggtgcagcctggcggatctctgagactgagctgtgccgcctccggcttcaccttcagcacctaccagatgagctgggtgcgccaggcccctggcaaaggactggaatgggtgtccgggatcgtgtccagcggcggctctacagcctacgccgatagcgtgaagggccggttcaccatcagccgggacaacagcaagaacaccctgtacctgcagatgaacagcctgagagccgaggacaccgccgtgtactattgtgccggcgagctgctgccctactacggcatggatgtgtggggccagggcaccaccgtgaccgtgtcatctacgcgtgagcagaaactgatctcggaagaggatctggcgaagcccaccacgacgccagcgccgcgaccaccaacaccggcgcccaccatcgcgtcgcagcccctgtccctgcgcccagaggcgtgccggccagcggcggggggcgcagtgcacacgagggggctggacttcgcctgtgacatctacatctgggcgcccttggccgggacttgtggggtccttctcctgtcactggttatcaccctttactgcgggcgcgccagagtgaagttcagcaggagcgcagacgcccccgcgtaccagcagggccagaaccagctctataacgagctgaatctaggacgaagagaggagtacgatgttttggacaagagacgtggccgggaccctgagatggggggaaagccgagaaggaagaaccctcaggaaggcctgtacaatgaactgcagaaagataagatggcggaggcctacagtgagattgggatgaaaggcgagcgccggaggggcaaggggcacgatggcctttaccagggtctcagtacagccaccaaggacacctacgacgcccttcacatgcaggccctgccccctcgctctagaggatctggagcaacaaacttctcactactcaaacaagcaggtgacgtggaggagaatcccgggcctgggatccacatggccacttacgaggttctctgtgaggtggcgcggaaactgggcacggatgacagggaagtggtattgttcctcctaaacgtgttcatacctcaacccacactggcccaattaattggagctcttagagctttaaaggaggagggcaggttaacgtttcccctgttagcggaatgtctgtttcgtgcaggtcgcagagacctcttgcgcgacctgcttcacttagacccgcgttttttagagcgccacctagcgggcacaatgagttatttcagcccttatcagctcactgttctccacgtagacggggagctgtgtgcgagggatattaggtctttgatatttttaagcaaggacactatagggtctcgcagcacaccacagacattcttacactgggtgtactgtatggaaaacttagacctactgggtcccactgacgtggatgccctaatgtcaatgcttagatctttgtcaagagtagacctacagcgccaagtgcaaaccctaatgggccttcacctttccggcccatcacactcccaacactatcgccatacaccactcgagaccgatttctacgactacaaggacgacgatgacaagactagtggctccggcgagggcagaggaagtctactaacctgcggagatgtggaagaaaatcctggcccacatatgaccgagtacaagcccacggtgcgcctcgccacccgcgacgacgtccccagggccgtacgcaccctcgccgccgcgttcgccgactaccccgccacgcgccacaccgtcgatccggaccgccacatcgagcgggtcaccgagctgcaagaactcttcctcacgcgcgtcgggctcgacatcggcaaggtgtgggtcgcggacgacggcgccgcggtggcggtctggaccacgccggagagcgtcgaagcgggggcggtgttcgccgagatcggcccgcgcatggccgagttgagcggttcccggctggccgcgcagcaacagatggaaggcctcctggcgccgcaccggcccaaggagcccgcgtggttcctggccaccgtcggcgtctcgcccgaccaccagggcaagggtctgggcagcgccgtcgtgctccccggagtggaggcggccgagcgcgccggggtgcccgccttcctggagacctccgcgccccgcaacctccccttctacgagcggctcggcttcaccgtcaccgccgacgtcgaggtgcccgaaggaccgcgcacctggtgcatgacccgcaagcccggtgcctga

SEQ ID NO: 1133 - DNA, 2751 bp, Artificial Sequence
  Synthetic Polynucleotides
atggccttaccagtgaccgccttgctcctgccgctggccttgctgctccacgccgccaggccggaccagagcgagctgacccagcctagaagcgtgtccggcagccctggacagagcgtgaccatcagctgtaccggcaccgagagagatgtgggcggctacaactacgtgtcctggtatcagcagcaccccggcaaggcccccaagctgatcatccacgacgtgatcgagcggagcagcggcgtgcccgatagattcagcggcagcaagagcggcaacaccgccagcctgacaatcagcggactgcaggccgaggacgaggccgactactactgctggtctttcgctggcggctactacgtgttcggcaccggcacagatgtgaccgtgctgggcggaggcggaagtggaggcggaggatctggcggcggaggctctgaagtgcagctgctggaatctggcggcggactggtgcagcctggcggatctctgagactgagctgtgccgccagcggcttcaccttcagcacctacgagatgcactgggtgcgccaggcccctggcaaaggactggaatgggtgtccgtgatcctgagcagcggcggagagacaaactacgccgacagcgtgaagggccggttcaccatcagccgggacaacagcaagaacaccctgtacctccagatgaacagcctgcgggccgaggacaccgccgtgtactattgtgccggaatgctgctgccctactacggcatggatgtgtggggccagggcaccaccgtgaccgtgtcatctacgcgtgagcagaaactgatctcggaagaggatctggcgaagcccaccacgacgccagcgccgcgaccaccaacaccggcgcccaccatcgcgtcgcagcccctgtccctgcgcccagaggcgtgccggccagcggcggggggcgcagtgcacacgagggggctggacttcgcctgtgacatctacatctgggcgcccttggccgggacttgtggggtccttctcctgtcactggttatcaccctttactgcgggcgcgccagagtgaagttcagcaggagcgcagacgcccccgcgtaccagcagggccagaaccagctctataacgagctgaatctaggacgaagagaggagtacgatgttttggacaagagacgtggccgggaccctgagatggggggaaagccgagaaggaagaaccctcaggaaggcctgtacaatgaactgcagaaagataagatggcggaggcctacagtgagattgggatgaaaggcgagcgccggaggggcaaggggcacgatggcctttaccagggtctcagtacagccaccaaggacacctacgacgcccttcacatgcaggccctgccccctcgctctagaggatctggagcaacaaacttctcactactcaaacaagcaggtgacgtggaggagaatcccgggcctgggatccacatggccacttacgaggttctctgtgaggtggcgcggaaactgggcacggatgacagggaagtggtattgttcctcctaaacgtgttcatacctcaacccacactggcccaattaattggagctcttagagctttaaaggaggagggcaggttaacgtttcccctgttagcggaatgtctgtttcgtgcaggtcgcagagacctcttgcgcgacctgcttcacttagacccgcgttttttagagcgccacctagcgggcacaatgagttatttcagcccttatcagctcactgttctccacgtagacggggagctgtgtgcgagggatattaggtctttgatatttttaagcaaggacactatagggtctcgcagcacaccacagacattcttacactgggtgtactgtatggaaaacttagacctactgggtcccactgacgtggatgccctaatgtcaatgcttagatctttgtcaagagtagacctacagcgccaagtgcaaaccctaatgggccttcacctttccggcccatcacactcccaacactatcgccatacaccactcgagaccgatttctacgactacaaggacgacgatgacaagactagtggctccggcgagggcagaggaagtctactaacctgcggagatgtggaagaaaatcctggcccacatatgaccgagtacaagcccacggtgcgcctcgccacccgcgacgacgtccccagggccgtacgcaccctcgccgccgcgttcgccgactaccccgccacgcgccacaccgtcgatccggaccgccacatcgagcgggtcaccgagctgcaagaactcttcctcacgcgcgtcgggctcgacatcggcaaggtgtgggtcgcggacgacggcgccgcggtggcggtctggaccacgccggagagcgtcgaagcgggggcggtgttcgccgagatcggcccgcgcatggccgagttgagcggttcccggctggccgcgcagcaacagatggaaggcctcctggcgccgcaccggcccaaggagcccgcgtggttcctggccaccgtcggcgtctcgcccgaccaccagggcaagggtctgggcagcgccgtcgtgctccccggagtggaggcggccgagcgcgccggggtgcccgccttcctggagacctccgcgccccgcaacctccccttctacgagcggctcggcttcaccgtcaccgccgacgtcgaggtgcccgaaggaccgcgcacctggtgcatgacccgcaagcccggtgcctga

SEQ ID NO: 1134 - DNA, 2457 bp, Artificial Sequence
  Synthetic Polynucleotides
atggccttaccagtgaccgccttgctcctgccgctggccttgctgctccacgccgccaggccgggctggtttctggacagccctgacagaccctggaatcctccaacattcagccccgctctgctggtggttaccgagggcgataatgccaccttcacctgtagcttcagcaacaccagcgagagcttcgtgctgaactggtacagaatgagccccagcaaccagaccgacaagctggccgcctttcctgaggatagaagccagcctggacaggactgccggttcagagttacccagctgcctaacggcagagacttccacatgagcgttgtgcgggccagaagaaacgacagcggcacatatctgtgcggagccatctctctggcccctaaggctcagatcaaagagagcctgagagccgagctgagagtgacagaaagacgggccgaagtgcccacagctcacccttcaccttctccaagacctgccggccagttccagacgcgtgagcagaaactgatctcggaagaggatctggcgaagcccaccacgacgccagcgccgcgaccaccaacaccggcgcccaccatcgcgtcgcagcccctgtccctgcgcccagaggcgtgccggccagcggcggggggcgcagtgcacacgagggggctggacttcgcctgtgacatctacatctgggcgcccttggccgggacttgtggggtccttctcctgtcactggttatcaccctttactgcgggcgcgccagagtgaagttcagcaggagcgcagacgcccccgcgtaccagcagggccagaaccagctctataacgagctgaatctaggacgaagagaggagtacgatgttttggacaagagacgtggccgggaccctgagatggggggaaagccgagaaggaagaaccctcaggaaggcctgtacaatgaactgcagaaagataagatggcggaggcctacagtgagattgggatgaaaggcgagcgccggaggggcaaggggcacgatggcctttaccagggtctcagtacagccaccaaggacacctacgacgcccttcacatgcaggccctgccccctcgctctagaggatctggagcaacaaacttctcactactcaaacaagcaggtgacgtggaggagaatcccgggcctgggatccacatggccacttacgaggttctctgtgaggtggcgcggaaactgggcacggatgacagggaagtggtattgttcctcctaaacgtgttcatacctcaacccacactggcccaattaattggagctcttagagctttaaaggaggagggcaggttaacgtttcccctgttagcggaatgtctgtttcgtgcaggtcgcagagacctcttgcgcgacctgcttcacttagacccgcgttttttagagcgccacctagcgggcacaatgagttatttcagcccttatcagctcactgttctccacgtagacggggagctgtgtgcgagggatattaggtctttgatatttttaagcaaggacactatagggtctcgcagcacaccacagacattcttacactgggtgtactgtatggaaaacttagacctactgggtcccactgacgtggatgccctaatgtcaatgcttagatctttgtcaagagtagacctacagcgccaagtgcaaaccctaatgggccttcacctttccggcccatcacactcccaacactatcgccatacaccactcgagaccgatttctacgactacaaggacgacgatgacaagactagtggctccggcgagggcagaggaagtctactaacctgcggagatgtggaagaaaatcctggcccacatatgaccgagtacaagcccacggtgcgcctcgccacccgcgacgacgtccccagggccgtacgcaccctcgccgccgcgttcgccgactaccccgccacgcgccacaccgtcgatccggaccgccacatcgagcgggtcaccgagctgcaagaactcttcctcacgcgcgtcgggctcgacatcggcaaggtgtgggtcgcggacgacggcgccgcggtggcggtctggaccacgccggagagcgtcgaagcgggggcggtgttcgccgagatcggcccgcgcatggccgagttgagcggttcccggctggccgcgcagcaacagatggaaggcctcctggcgccgcaccggcccaaggagcccgcgtggttcctggccaccgtcggcgtctcgcccgaccaccagggcaagggtctgggcagcgccgtcgtgctccccggagtggaggcggccgagcgcgccggggtgcccgccttcctggagacctccgcgccccgcaacctccccttctacgagcggctcggcttcaccgtcaccgccgacgtcgaggtgcccgaaggaccgcgcacctggtgcatgacccgcaagcccggtgcctga

SEQ ID NO: 1135 - DNA, 2742 bp, Artificial Sequence
  Synthetic Polynucleotides
atggccttaccagtgaccgccttgctcctgccgctggccttgctgctccacgccgccaggccggacatccagatgacacagagccctagcagcctgtctgccagcgtgggagacagagtgaccatcacctgtagagccagccaggatgtgtctacagccgtggcctggtatcagcagaagcctggaaaggcccctaagctgctgatctacagcgccagctttctgtacagcggcgtgcccagcagattttctggcagcggctctggcaccgacttcaccctgacaatatccagcctccagcctgaggacttcgccacctactactgccagcagtacctgtatcaccccgccacctttggacagggcaccaaggtggaaatcaagagaggcggaggcggaagtggaggcggaggatctggcggcggaggctctgaagtgcagctggttgaatcaggtggcggcctggttcaacctggcggatctctgagactgagctgtgccgccagcggcttcacctttagcgacagctggattcactgggtccgacaggcccctggcaaaggacttgaatgggtcgcctggatcagcccttatggcggcagcacctattacgccgacagcgtgaagggcagattcaccatcagcgccgacaccagcaagaacaccgcctacctccagatgaactccctgagagccgaagataccgccgtgtactactgcgccagaaggcattggcctggcggctttgattattggggccagggcacactggtcaccgtgtcatctacgcgtgagcagaaactgatctcggaagaggatctggcgaagcccaccacgacgccagcgccgcgaccaccaacaccggcgcccaccatcgcgtcgcagcccctgtccctgcgcccagaggcgtgccggccagcggcggggggcgcagtgcacacgagggggctggacttcgcctgtgacatctacatctgggcgcccttggccgggacttgtggggtccttctcctgtcactggttatcaccctttactgcgggcgcgccagagtgaagttcagcaggagcgcagacgcccccgcgtaccagcagggccagaaccagctctataacgagctgaatctaggacgaagagaggagtacgatgttttggacaagagacgtggccgggaccctgagatggggggaaagccgagaaggaagaaccctcaggaaggcctgtacaatgaactgcagaaagataagatggcggaggcctacagtgagattgggatgaaaggcgagcgccggaggggcaaggggcacgatggcctttaccagggtctcagtacagccaccaaggacacctacgacgcccttcacatgcaggccctgccccctcgctctagaggatctggagcaacaaacttctcactactcaaacaagcaggtgacgtggaggagaatcccgggcctgggatccacatggccacttacgaggttctctgtgaggtggcgcggaaactgggcacggatgacagggaagtggtattgttcctcctaaacgtgttcatacctcaacccacactggcccaattaattggagctcttagagctttaaaggaggagggcaggttaacgtttcccctgttagcggaatgtctgtttcgtgcaggtcgcagagacctcttgcgcgacctgcttcacttagacccgcgttttttagagcgccacctagcgggcacaatgagttatttcagcccttatcagctcactgttctccacgtagacggggagctgtgtgcgagggatattaggtctttgatatttttaagcaaggacactatagggtctcgcagcacaccacagacattcttacactgggtgtactgtatggaaaacttagacctactgggtcccactgacgtggatgccctaatgtcaatgcttagatctttgtcaagagtagacctacagcgccaagtgcaaaccctaatgggccttcacctttccggcccatcacactcccaacactatcgccatacaccactcgagaccgatttctacgactacaaggacgacgatgacaagactagtggctccggcgagggcagaggaagtctactaacctgcggagatgtggaagaaaatcctggcccacatatgaccgagtacaagcccacggtgcgcctcgccacccgcgacgacgtccccagggccgtacgcaccctcgccgccgcgttcgccgactaccccgccacgcgccacaccgtcgatccggaccgccacatcgagcgggtcaccgagctgcaagaactcttcctcacgcgcgtcgggctcgacatcggcaaggtgtgggtcgcggacgacggcgccgcggtggcggtctggaccacgccggagagcgtcgaagcgggggcggtgttcgccgagatcggcccgcgcatggccgagttgagcggttcccggctggccgcgcagcaacagatggaaggcctcctggcgccgcaccggcccaaggagcccgcgtggttcctggccaccgtcggcgtctcgcccgaccaccagggcaagggtctgggcagcgccgtcgtgctccccggagtggaggcggccgagcgcgccggggtgcccgccttcctggagacctccgcgccccgcaacctccccttctacgagcggctcggcttcaccgtcaccgccgacgtcgaggtgcccgaaggaccgcgcacctggtgcatgacccgcaagcccggtgcctga

SEQ ID NO: 1136 - DNA, 2745 bp, Artificial Sequence
  Synthetic Polynucleotides
atggccttaccagtgaccgccttgctcctgccgctggccttgctgctccacgccgccaggccggccatcgtgatgacccagacaccttctccagtgtctgccgccgttggcggcacagtgacaatcaactgtcaggccagcgagagcgtgtacagcaacaactacctgagctggttccagcagaagcccggccagcctcctaagctgctgatctacctggcctccacactggcaagcggagtgcccagtagattcaaaggcagcggctctggcacccagttcaccctgacaattagcggcgtgcagtgtgacgatgccgccacctattactgcatcggcggcaagagcagcagcaccgatggcaatgcttttggcggcggaacagaggtggtcgttagaggcggaggcggaagtggaggcggaggatctggcggcggaggctctcaatctctggaagaaagcggaggcagactggtcaagcccgacgagacactgaccatcacctgtaccgtgtccggcatcgacctgagcagcaatggactgacctgggtccgacaagctcctggcgaaggactggaatggatcggcaccatcaacaaggacgccagcgcctactatgcctcctgggccaaaggcaggctgaccatctctaagcccagctccacaaaggtggacctgaagatcacaagccccaccaccgaggacaccgccacatacttttgtggccggatcgccttcaagaccggcacctctatttggggacctggcacactggtcaccgtgtctagtacgcgtgagcagaaactgatctcggaagaggatctggcgaagcccaccacgacgccagcgccgcgaccaccaacaccggcgcccaccatcgcgtcgcagcccctgtccctgcgcccagaggcgtgccggccagcggcggggggcgcagtgcacacgagggggctggacttcgcctgtgacatctacatctgggcgcccttggccgggacttgtggggtccttctcctgtcactggttatcaccctttactgcgggcgcgccagagtgaagttcagcaggagcgcagacgcccccgcgtaccagcagggccagaaccagctctataacgagctgaatctaggacgaagagaggagtacgatgttttggacaagagacgtggccgggaccctgagatggggggaaagccgagaaggaagaaccctcaggaaggcctgtacaatgaactgcagaaagataagatggcggaggcctacagtgagattgggatgaaaggcgagcgccggaggggcaaggggcacgatggcctttaccagggtctcagtacagccaccaaggacacctacgacgcccttcacatgcaggccctgccccctcgctctagaggatctggagcaacaaacttctcactactcaaacaagcaggtgacgtggaggagaatcccgggcctgggatccacatggccacttacgaggttctctgtgaggtggcgcggaaactgggcacggatgacagggaagtggtattgttcctcctaaacgtgttcatacctcaacccacactggcccaattaattggagctcttagagctttaaaggaggagggcaggttaacgtttcccctgttagcggaatgtctgtttcgtgcaggtcgcagagacctcttgcgcgacctgcttcacttagacccgcgttttttagagcgccacctagcgggcacaatgagttatttcagcccttatcagctcactgttctccacgtagacggggagctgtgtgcgagggatattaggtctttgatatttttaagcaaggacactatagggtctcgcagcacaccacagacattcttacactgggtgtactgtatggaaaacttagacctactgggtcccactgacgtggatgccctaatgtcaatgcttagatctttgtcaagagtagacctacagcgccaagtgcaaaccctaatgggccttcacctttccggcccatcacactcccaacactatcgccatacaccactcgagaccgatttctacgactacaaggacgacgatgacaagactagtggctccggcgagggcagaggaagtctactaacctgcggagatgtggaagaaaatcctggcccacatatgaccgagtacaagcccacggtgcgcctcgccacccgcgacgacgtccccagggccgtacgcaccctcgccgccgcgttcgccgactaccccgccacgcgccacaccgtcgatccggaccgccacatcgagcgggtcaccgagctgcaagaactcttcctcacgcgcgtcgggctcgacatcggcaaggtgtgggtcgcggacgacggcgccgcggtggcggtctggaccacgccggagagcgtcgaagcgggggcggtgttcgccgagatcggcccgcgcatggccgagttgagcggttcccggctggccgcgcagcaacagatggaaggcctcctggcgccgcaccggcccaaggagcccgcgtggttcctggccaccgtcggcgtctcgcccgaccaccagggcaagggtctgggcagcgccgtcgtgctccccggagtggaggcggccgagcgcgccggggtgcccgccttcctggagacctccgcgccccgcaacctccccttctacgagcggctcggcttcaccgtcaccgccgacgtcgaggtgcccgaaggaccgcgcacctggtgcatgacccgcaagcccggtgcctga

SEQ ID NO: 1137 - DNA, 2739 bp, Artificial Sequence
  Synthetic Polynucleotides
atggccttaccagtgaccgccttgctcctgccgctggccttgctgctccacgccgccaggccggacatccagatgacacagagccctagcagcctgtctgccagcgtgggagacagagtgaccatcacctgtagagccagccagggcatctcttcttggctggcctggtatcagcagaagcccgagaaggcccctaagagcctgatctatgccgccagctctctccagagcggagtgcctagcagattttctggcagcggctccggcaccgatttcaccctgacaatatccagcctccagcctgaggacttcgccacctactactgccagcagtacaacagctacccctacaccttcggccagggcaccaagctggaaatcaaaggcggaggcggaagtggaggcggaggatctggcggcggaggctctcaagtgcaactggttcagagcggcgctgaagtgaagaaacctggggcctctgtgaaggtgtcctgcaaggcttccggctacacctttaccagctacgacgtgcactgggtccgacaggctccaggacaaagactggaatggatgggatggctgcacgccgataccggcatcaccaagttcagccagaaattccagggccgcgtgacaatcaccagagacacatctgccagcaccgcctacatggaactgagcagcctgagaagcgaggacaccgccgtgtactactgcgccagagagagaatccagctttggttcgactactggggccagggaaccctggtcacagtctcttctacgcgtgagcagaaactgatctcggaagaggatctggcgaagcccaccacgacgccagcgccgcgaccaccaacaccggcgcccaccatcgcgtcgcagcccctgtccctgcgcccagaggcgtgccggccagcggcggggggcgcagtgcacacgagggggctggacttcgcctgtgacatctacatctgggcgcccttggccgggacttgtggggtccttctcctgtcactggttatcaccctttactgcgggcgcgccagagtgaagttcagcaggagcgcagacgcccccgcgtaccagcagggccagaaccagctctataacgagctgaatctaggacgaagagaggagtacgatgttttggacaagagacgtggccgggaccctgagatggggggaaagccgagaaggaagaaccctcaggaaggcctgtacaatgaactgcagaaagataagatggcggaggcctacagtgagattgggatgaaaggcgagcgccggaggggcaaggggcacgatggcctttaccagggtctcagtacagccaccaaggacacctacgacgcccttcacatgcaggccctgccccctcgctctagaggatctggagcaacaaacttctcactactcaaacaagcaggtgacgtggaggagaatcccgggcctgggatccacatggccacttacgaggttctctgtgaggtggcgcggaaactgggcacggatgacagggaagtggtattgttcctcctaaacgtgttcatacctcaacccacactggcccaattaattggagctcttagagctttaaaggaggagggcaggttaacgtttcccctgttagcggaatgtctgtttcgtgcaggtcgcagagacctcttgcgcgacctgcttcacttagacccgcgttttttagagcgccacctagcgggcacaatgagttatttcagcccttatcagctcactgttctccacgtagacggggagctgtgtgcgagggatattaggtctttgatatttttaagcaaggacactatagggtctcgcagcacaccacagacattcttacactgggtgtactgtatggaaaacttagacctactgggtcccactgacgtggatgccctaatgtcaatgcttagatctttgtcaagagtagacctacagcgccaagtgcaaaccctaatgggccttcacctttccggcccatcacactcccaacactatcgccatacaccactcgagaccgatttctacgactacaaggacgacgatgacaagactagtggctccggcgagggcagaggaagtctactaacctgcggagatgtggaagaaaatcctggcccacatatgaccgagtacaagcccacggtgcgcctcgccacccgcgacgacgtccccagggccgtacgcaccctcgccgccgcgttcgccgactaccccgccacgcgccacaccgtcgatccggaccgccacatcgagcgggtcaccgagctgcaagaactcttcctcacgcgcgtcgggctcgacatcggcaaggtgtgggtcgcggacgacggcgccgcggtggcggtctggaccacgccggagagcgtcgaagcgggggcggtgttcgccgagatcggcccgcgcatggccgagttgagcggttcccggctggccgcgcagcaacagatggaaggcctcctggcgccgcaccggcccaaggagcccgcgtggttcctggccaccgtcggcgtctcgcccgaccaccagggcaagggtctgggcagcgccgtcgtgctccccggagtggaggcggccgagcgcgccggggtgcccgccttcctggagacctccgcgccccgcaacctccccttctacgagcggctcggcttcaccgtcaccgccgacgtcgaggtgcccgaaggaccgcgcacctggtgcatgacccgcaagcccggtgcctga

SEQ ID NO: 1138 - DNA, 2796 bp, Artificial Sequence
  Synthetic Polynucleotides
atggccttaccagtgaccgccttgctcctgccgctggccttgctgctccacgccgccaggccggacgacatcgtgatgacccagagccccctgagcctgcctgtgacacctggcgagcctgccagcatctcctgtagaagcagccagagcctgctgcacagcaacggctacaactacctcgtgtggtatctccagaagcccggccagagccctcaactgctgatctacctgggcagcatcagagccagcggcgtgcccgatagattttccggcagcggctccggcaccgacttcaccctgaagatcagccgggtggaagccgaggacgtgggcgtgtactactgtatgcagcccctccagacccccatcaccttcggccagggcaccagactggaaatcaagagaggcggaggcggaagtggaggcggaggatctggcggcggaggctctggactccagtgtgtggccgctcctagatgggtgctgagccaggtgcaactccagcagtggggagccggactgctgaagcctagcgagacactgagcctgacatgcgccgtgtacggcggcagcttcagcggcaattactggtcctggatcagacagccccctggcaagggcctggaatggatcggcgagatcaaccacagcggcagcaccaactacaaccccagcctgaagtccagagtgaccatcagcgtggacaccagcaagaaccagttctccctgaagctgagcagcgtgacagccgccgacaccgccgtgtattactgtgccagaggcggctcctacaattacttcgactactggggccagggaaccctcgtgaccgtgtctagtacgcgtgagcagaaactgatctcggaagaggatctggcgaagcccaccacgacgccagcgccgcgaccaccaacaccggcgcccaccatcgcgtcgcagcccctgtccctgcgcccagaggcgtgccggccagcggcggggggcgcagtgcacacgagggggctggacttcgcctgtgacatctacatctgggcgcccttggccgggacttgtggggtccttctcctgtcactggttatcaccctttactgcgggcgcgccagagtgaagttcagcaggagcgcagacgcccccgcgtaccagcagggccagaaccagctctataacgagctgaatctaggacgaagagaggagtacgatgttttggacaagagacgtggccgggaccctgagatggggggaaagccgagaaggaagaaccctcaggaaggcctgtacaatgaactgcagaaagataagatggcggaggcctacagtgagattgggatgaaaggcgagcgccggaggggcaaggggcacgatggcctttaccagggtctcagtacagccaccaaggacacctacgacgcccttcacatgcaggccctgccccctcgctctagaggatctggagcaacaaacttctcactactcaaacaagcaggtgacgtggaggagaatcccgggcctgggatccacatggccacttacgaggttctctgtgaggtggcgcggaaactgggcacggatgacagggaagtggtattgttcctcctaaacgtgttcatacctcaacccacactggcccaattaattggagctcttagagctttaaaggaggagggcaggttaacgtttcccctgttagcggaatgtctgtttcgtgcaggtcgcagagacctcttgcgcgacctgcttcacttagacccgcgttttttagagcgccacctagcgggcacaatgagttatttcagcccttatcagctcactgttctccacgtagacggggagctgtgtgcgagggatattaggtctttgatatttttaagcaaggacactatagggtctcgcagcacaccacagacattcttacactgggtgtactgtatggaaaacttagacctactgggtcccactgacgtggatgccctaatgtcaatgcttagatctttgtcaagagtagacctacagcgccaagtgcaaaccctaatgggccttcacctttccggcccatcacactcccaacactatcgccatacaccactcgagaccgatttctacgactacaaggacgacgatgacaagactagtggctccggcgagggcagaggaagtctactaacctgcggagatgtggaagaaaatcctggcccacatatgaccgagtacaagcccacggtgcgcctcgccacccgcgacgacgtccccagggccgtacgcaccctcgccgccgcgttcgccgactaccccgccacgcgccacaccgtcgatccggaccgccacatcgagcgggtcaccgagctgcaagaactcttcctcacgcgcgtcgggctcgacatcggcaaggtgtgggtcgcggacgacggcgccgcggtggcggtctggaccacgccggagagcgtcgaagcgggggcggtgttcgccgagatcggcccgcgcatggccgagttgagcggttcccggctggccgcgcagcaacagatggaaggcctcctggcgccgcaccggcccaaggagcccgcgtggttcctggccaccgtcggcgtctcgcccgaccaccagggcaagggtctgggcagcgccgtcgtgctccccggagtggaggcggccgagcgcgccggggtgcccgccttcctggagacctccgcgccccgcaacctccccttctacgagcggctcggcttcaccgtcaccgccgacgtcgaggtgcccgaaggaccgcgcacctggtgcatgacccgcaagcccggtgcctga

SEQ ID NO: 1139 - DNA, 2787 bp, Artificial Sequence
  Synthetic Polynucleotides
atggccttaccagtgaccgccttgctcctgccgctggccttgctgctccacgccgccaggccggaccagctgacacagagccctagcagcgtgtcagccagcgtgggcgacagagtgaccatcacctgtagagccagccggggcatcagctcttggctggcctggtatcagcagaagcccggcaaggcccccaagctgctgatctacacagccagcagcctccagagcggcgtgcccagcagattttctggcagcggctccggcaccgacttcaccctgacaatcagcagcctccagcccgaggacttcgccacctactactgccagcaggcttacagcttcccccggacctttggccagggcaccaaggtggaaatcaagcggggcggaggcggaagtggaggcggaggatctggcggcggaggctctgtggctgctcctagatgggtgctgagccaggtgcagctccaggaatctggccccggactcgtgaagcctagccagaccctgagcctgacctgtaccgtgtctggcggcagcatcagcagcggcggctactactggatctggatcagacagcaccctggcaagggcctggaatggatcggctacatctactacaacggcaacacctactataaccccagcctgaagtcccgcgtgaccatgagcgtggacaccagcaagaaccagttctccctgaagctgtccagcgtgacagccgccgataccgccgtgtactactgcgccagagatggcatcaccatgatccggggctactattacggcatggacgtgtggggccagggaaccaccgtgaccgtgtcatctacgcgtgagcagaaactgatctcggaagaggatctggcgaagcccaccacgacgccagcgccgcgaccaccaacaccggcgcccaccatcgcgtcgcagcccctgtccctgcgcccagaggcgtgccggccagcggcggggggcgcagtgcacacgagggggctggacttcgcctgtgacatctacatctgggcgcccttggccgggacttgtggggtccttctcctgtcactggttatcaccctttactgcgggcgcgccagagtgaagttcagcaggagcgcagacgcccccgcgtaccagcagggccagaaccagctctataacgagctgaatctaggacgaagagaggagtacgatgttttggacaagagacgtggccgggaccctgagatggggggaaagccgagaaggaagaaccctcaggaaggcctgtacaatgaactgcagaaagataagatggcggaggcctacagtgagattgggatgaaaggcgagcgccggaggggcaaggggcacgatggcctttaccagggtctcagtacagccaccaaggacacctacgacgcccttcacatgcaggccctgccccctcgctctagaggatctggagcaacaaacttctcactactcaaacaagcaggtgacgtggaggagaatcccgggcctgggatccacatggccacttacgaggttctctgtgaggtggcgcggaaactgggcacggatgacagggaagtggtattgttcctcctaaacgtgttcatacctcaacccacactggcccaattaattggagctcttagagctttaaaggaggagggcaggttaacgtttcccctgttagcggaatgtctgtttcgtgcaggtcgcagagacctcttgcgcgacctgcttcacttagacccgcgttttttagagcgccacctagcgggcacaatgagttatttcagcccttatcagctcactgttctccacgtagacggggagctgtgtgcgagggatattaggtctttgatatttttaagcaaggacactatagggtctcgcagcacaccacagacattcttacactgggtgtactgtatggaaaacttagacctactgggtcccactgacgtggatgccctaatgtcaatgcttagatctttgtcaagagtagacctacagcgccaagtgcaaaccctaatgggccttcacctttccggcccatcacactcccaacactatcgccatacaccactcgagaccgatttctacgactacaaggacgacgatgacaagactagtggctccggcgagggcagaggaagtctactaacctgcggagatgtggaagaaaatcctggcccacatatgaccgagtacaagcccacggtgcgcctcgccacccgcgacgacgtccccagggccgtacgcaccctcgccgccgcgttcgccgactaccccgccacgcgccacaccgtcgatccggaccgccacatcgagcgggtcaccgagctgcaagaactcttcctcacgcgcgtcgggctcgacatcggcaaggtgtgggtcgcggacgacggcgccgcggtggcggtctggaccacgccggagagcgtcgaagcgggggcggtgttcgccgagatcggcccgcgcatggccgagttgagcggttcccggctggccgcgcagcaacagatggaaggcctcctggcgccgcaccggcccaaggagcccgcgtggttcctggccaccgtcggcgtctcgcccgaccaccagggcaagggtctgggcagcgccgtcgtgctccccggagtggaggcggccgagcgcgccggggtgcccgccttcctggagacctccgcgccccgcaacctccccttctacgagcggctcggcttcaccgtcaccgccgacgtcgaggtgcccgaaggaccgcgcacctggtgcatgacccgcaagcccggtgcctga

SEQ ID NO: 1140 - DNA, 2709 bp, Artificial Sequence
  Synthetic Polynucleotides
atggccttaccagtgaccgccttgctcctgccgctggccttgctgctccacgccgccaggccggacatcgtcgtgacacagagccctgcttccctggccgtgtccctgggacagagagccaccatcagctaccgggccagcaagagcgtgtccaccagcggctacagctacatgcactggaaccagcagaagcccggccagccccctagactgctgatctacctggtgtccaacctggaaagcggcgtgcccgccagattttctggcagcggctctggcaccgacttcaccctgaacatccaccccgtggaagaagaggacgccgccacctactactgccagcacatcagagagctgaccagaagcgagggcggaccctcttggaagggcggaggcggaagtggaggcggaggatctggcggcggaggctctgaagtgaagctggaagagtctggcggcgaccttgtgaagcctggcggcagcctgaagctgagctgtgccgccagcggctttaccttctccggctacggcatgagctgggtgcgccagacccccgacaagagactggaatgggtggcaaccatcagcagcggcggcagctacacctactatcccgacagcgtgaagggccggttcaccatctccagagacaacgccaagaacaccctgtacctgcagatgtcctccctgaagtccgaggacaccgccatgtactattgcgccaggcacgaaggcggctactacggcagttctacgcgtgagcagaaactgatctcggaagaggatctggcgaagcccaccacgacgccagcgccgcgaccaccaacaccggcgcccaccatcgcgtcgcagcccctgtccctgcgcccagaggcgtgccggccagcggcggggggcgcagtgcacacgagggggctggacttcgcctgtgacatctacatctgggcgcccttggccgggacttgtggggtccttctcctgtcactggttatcaccctttactgcgggcgcgccagagtgaagttcagcaggagcgcagacgcccccgcgtaccagcagggccagaaccagctctataacgagctgaatctaggacgaagagaggagtacgatgttttggacaagagacgtggccgggaccctgagatggggggaaagccgagaaggaagaaccctcaggaaggcctgtacaatgaactgcagaaagataagatggcggaggcctacagtgagattgggatgaaaggcgagcgccggaggggcaaggggcacgatggcctttaccagggtctcagtacagccaccaaggacacctacgacgcccttcacatgcaggccctgccccctcgctctagaggatctggagcaacaaacttctcactactcaaacaagcaggtgacgtggaggagaatcccgggcctgggatccacatggccacttacgaggttctctgtgaggtggcgcggaaactgggcacggatgacagggaagtggtattgttcctcctaaacgtgttcatacctcaacccacactggcccaattaattggagctcttagagctttaaaggaggagggcaggttaacgtttcccctgttagcggaatgtctgtttcgtgcaggtcgcagagacctcttgcgcgacctgcttcacttagacccgcgttttttagagcgccacctagcgggcacaatgagttatttcagcccttatcagctcactgttctccacgtagacggggagctgtgtgcgagggatattaggtctttgatatttttaagcaaggacactatagggtctcgcagcacaccacagacattcttacactgggtgtactgtatggaaaacttagacctactgggtcccactgacgtggatgccctaatgtcaatgcttagatctttgtcaagagtagacctacagcgccaagtgcaaaccctaatgggccttcacctttccggcccatcacactcccaacactatcgccatacaccactcgagaccgatttctacgactacaaggacgacgatgacaagactagtggctccggcgagggcagaggaagtctactaacctgcggagatgtggaagaaaatcctggcccacatatgaccgagtacaagcccacggtgcgcctcgccacccgcgacgacgtccccagggccgtacgcaccctcgccgccgcgttcgccgactaccccgccacgcgccacaccgtcgatccggaccgccacatcgagcgggtcaccgagctgcaagaactcttcctcacgcgcgtcgggctcgacatcggcaaggtgtgggtcgcggacgacggcgccgcggtggcggtctggaccacgccggagagcgtcgaagcgggggcggtgttcgccgagatcggcccgcgcatggccgagttgagcggttcccggctggccgcgcagcaacagatggaaggcctcctggcgccgcaccggcccaaggagcccgcgtggttcctggccaccgtcggcgtctcgcccgaccaccagggcaagggtctgggcagcgccgtcgtgctccccggagtggaggcggccgagcgcgccggggtgcccgccttcctggagacctccgcgccccgcaacctccccttctacgagcggctcggcttcaccgtcaccgccgacgtcgaggtgcccgaaggaccgcgcacctggtgcatgacccgcaagcccggtgcctga

SEQ ID NO: 1141 - DNA, 2757 bp, Artificial Sequence
  Synthetic Polynucleotides
atggccttaccagtgaccgccttgctcctgccgctggccttgctgctccacgccgccaggccggacgacatccagatgacccagagccccagcagcctgtctgccagcgtgggcgacagagtgaccatcacctgtagagccagccagggcatcagcaactacctggcctggtatcagcagaaaaccggcaaggtgcccaagttcctgatctacgaggccagcaccctgcagagcggcgtgccaagtagattttccggcggaggcagcggcaccgacttcaccctgacaatcagctccctgcagcccgaggacgtggcaacctactactgccagaactacaacagcgcccccttcaccttcggccctgggaccaaggtggacatcaagggcggaggcggaagtggaggcggaggatctggcggcggaggctctcaggtgcaactggtggaatctggcggaggcgtggtgcagcctggcagaagcctgagactgagctgtgccgccagcggcttcgccttcagcagatacggaatgcactgggtgcgccaggcccctggcaaaggactggaatgggtggccgtgatttggtacgacggcagcaacaagtactacgccgacagcgtgaagggccggttcaccatcagccgggacaacagcaagaacacccagtacctgcagatgaacagcctgcgggccgaggataccgccgtgtactattgtgccagaggcggcgacttcctgtactactactattacggcatggacgtgtggggccagggaaccaccgtgaccgtgtcatctacgcgtgagcagaaactgatctcggaagaggatctggcgaagcccaccacgacgccagcgccgcgaccaccaacaccggcgcccaccatcgcgtcgcagcccctgtccctgcgcccagaggcgtgccggccagcggcggggggcgcagtgcacacgagggggctggacttcgcctgtgacatctacatctgggcgcccttggccgggacttgtggggtccttctcctgtcactggttatcaccctttactgcgggcgcgccagagtgaagttcagcaggagcgcagacgcccccgcgtaccagcagggccagaaccagctctataacgagctgaatctaggacgaagagaggagtacgatgttttggacaagagacgtggccgggaccctgagatggggggaaagccgagaaggaagaaccctcaggaaggcctgtacaatgaactgcagaaagataagatggcggaggcctacagtgagattgggatgaaaggcgagcgccggaggggcaaggggcacgatggcctttaccagggtctcagtacagccaccaaggacacctacgacgcccttcacatgcaggccctgccccctcgctctagaggatctggagcaacaaacttctcactactcaaacaagcaggtgacgtggaggagaatcccgggcctgggatccacatggccacttacgaggttctctgtgaggtggcgcggaaactgggcacggatgacagggaagtggtattgttcctcctaaacgtgttcatacctcaacccacactggcccaattaattggagctcttagagctttaaaggaggagggcaggttaacgtttcccctgttagcggaatgtctgtttcgtgcaggtcgcagagacctcttgcgcgacctgcttcacttagacccgcgttttttagagcgccacctagcgggcacaatgagttatttcagcccttatcagctcactgttctccacgtagacggggagctgtgtgcgagggatattaggtctttgatatttttaagcaaggacactatagggtctcgcagcacaccacagacattcttacactgggtgtactgtatggaaaacttagacctactgggtcccactgacgtggatgccctaatgtcaatgcttagatctttgtcaagagtagacctacagcgccaagtgcaaaccctaatgggccttcacctttccggcccatcacactcccaacactatcgccatacaccactcgagaccgatttctacgactacaaggacgacgatgacaagactagtggctccggcgagggcagaggaagtctactaacctgcggagatgtggaagaaaatcctggcccacatatgaccgagtacaagcccacggtgcgcctcgccacccgcgacgacgtccccagggccgtacgcaccctcgccgccgcgttcgccgactaccccgccacgcgccacaccgtcgatccggaccgccacatcgagcgggtcaccgagctgcaagaactcttcctcacgcgcgtcgggctcgacatcggcaaggtgtgggtcgcggacgacggcgccgcggtggcggtctggaccacgccggagagcgtcgaagcgggggcggtgttcgccgagatcggcccgcgcatggccgagttgagcggttcccggctggccgcgcagcaacagatggaaggcctcctggcgccgcaccggcccaaggagcccgcgtggttcctggccaccgtcggcgtctcgcccgaccaccagggcaagggtctgggcagcgccgtcgtgctccccggagtggaggcggccgagcgcgccggggtgcccgccttcctggagacctccgcgccccgcaacctccccttctacgagcggctcggcttcaccgtcaccgccgacgtcgaggtgcccgaaggaccgcgcacctggtgcatgacccgcaagcccggtgcctga

SEQ ID NO: 1142 - DNA, 2730 bp, Artificial Sequence
  Synthetic Polynucleotides
atggccttaccagtgaccgccttgctcctgccgctggccttgctgctccacgccgccaggccggacatccagatgacccagagccccagcagcctgtctaccagcgtgggcgatagagtgaccctgacctgcaaggccagccaggatgtgggaaccgccgtggactggtatcagcagaagcctggccccagccccaagctgctgatctactgggccagcaccagacacaccggcatccccagcagattttccggcagcggctccggcaccgacttcaccctgacaatcagctccctgcagcccgaggacttcgccgactactactgccagcagtacaacagctaccccctgaccttcggccctgggaccaaggtggacatcaagggcggaggcggaagtggaggcggaggatctggcggcggaggctctgaagtgcaactggtgcagagcggccctgaagtgaagaaacccggcgctaccgtgaagattagctgcaagaccagcggctacaccttcaccgagtacaccatccactgggtcaagcaggcccctggcaagggcctggaatggatcggcaacatcaaccccaacaacggcggcaccacctacaaccagaagttcgaggacaaggccaccctgaccgtggacaagagcaccgacaccgcctacatggaactgagcagcctgcggagcgaggataccgccgtgtactattgtgccgccggatggaacttcgactactggggacagggcaccctgctgaccgtgtctagtacgcgtgagcagaaactgatctcggaagaggatctggcgaagcccaccacgacgccagcgccgcgaccaccaacaccggcgcccaccatcgcgtcgcagcccctgtccctgcgcccagaggcgtgccggccagcggcggggggcgcagtgcacacgagggggctggacttcgcctgtgacatctacatctgggcgcccttggccgggacttgtggggtccttctcctgtcactggttatcaccctttactgcgggcgcgccagagtgaagttcagcaggagcgcagacgcccccgcgtaccagcagggccagaaccagctctataacgagctgaatctaggacgaagagaggagtacgatgttttggacaagagacgtggccgggaccctgagatggggggaaagccgagaaggaagaaccctcaggaaggcctgtacaatgaactgcagaaagataagatggcggaggcctacagtgagattgggatgaaaggcgagcgccggaggggcaaggggcacgatggcctttaccagggtctcagtacagccaccaaggacacctacgacgcccttcacatgcaggccctgccccctcgctctagaggatctggagcaacaaacttctcactactcaaacaagcaggtgacgtggaggagaatcccgggcctgggatccacatggccacttacgaggttctctgtgaggtggcgcggaaactgggcacggatgacagggaagtggtattgttcctcctaaacgtgttcatacctcaacccacactggcccaattaattggagctcttagagctttaaaggaggagggcaggttaacgtttcccctgttagcggaatgtctgtttcgtgcaggtcgcagagacctcttgcgcgacctgcttcacttagacccgcgttttttagagcgccacctagcgggcacaatgagttatttcagcccttatcagctcactgttctccacgtagacggggagctgtgtgcgagggatattaggtctttgatatttttaagcaaggacactatagggtctcgcagcacaccacagacattcttacactgggtgtactgtatggaaaacttagacctactgggtcccactgacgtggatgccctaatgtcaatgcttagatctttgtcaagagtagacctacagcgccaagtgcaaaccctaatgggccttcacctttccggcccatcacactcccaacactatcgccatacaccactcgagaccgatttctacgactacaaggacgacgatgacaagactagtggctccggcgagggcagaggaagtctactaacctgcggagatgtggaagaaaatcctggcccacatatgaccgagtacaagcccacggtgcgcctcgccacccgcgacgacgtccccagggccgtacgcaccctcgccgccgcgttcgccgactaccccgccacgcgccacaccgtcgatccggaccgccacatcgagcgggtcaccgagctgcaagaactcttcctcacgcgcgtcgggctcgacatcggcaaggtgtgggtcgcggacgacggcgccgcggtggcggtctggaccacgccggagagcgtcgaagcgggggcggtgttcgccgagatcggcccgcgcatggccgagttgagcggttcccggctggccgcgcagcaacagatggaaggcctcctggcgccgcaccggcccaaggagcccgcgtggttcctggccaccgtcggcgtctcgcccgaccaccagggcaagggtctgggcagcgccgtcgtgctccccggagtggaggcggccgagcgcgccggggtgcccgccttcctggagacctccgcgccccgcaacctccccttctacgagcggctcggcttcaccgtcaccgccgacgtcgaggtgcccgaaggaccgcgcacctggtgcatgacccgcaagcccggtgcctga

SEQ ID NO: 1143 - DNA, 2733 bp, Artificial Sequence
  Synthetic Polynucleotides
atggccttaccagtgaccgccttgctcctgccgctggccttgctgctccacgccgccaggccggacatccagatgacccagagccccagcagcctgtctgccagcgtgggcgacagagtgaccatcacatgcaaggccagccaggacatctacccctacctgaactggttccagcagaagcccggcaaggcccccaagaccctgatctaccggaccaacagactgctggacggcgtgcccagcagattttctggcagcggctccggcaccgacttcaccttcaccatcagctccctccagccctactactgcctccagtacgacgagttccccctgacctttggagccggcaccaagctggaaatcaagagaggcggaggcggaagtggaggcggaggatctggcggcggaggctctcagatcaccctgaaagagtccggccccaccctcgtgaagcctacccagaccctgacactgacctgcaccttcagcggcttcagcctgagcaccagcaacatgggcgtgggctggatcagacagcctcccggaaaagccctggaatggctggcccacatttggtgggacgacgacaagtactacagccccagcctgaagtcccggctgacaatcaccaaggacaccagcaagaaccaggtggtgctgaccatgaccaacatggaccccgtggacaccgccacctactattgcgtgcggagcaactacggctacgcttggtttgcctactggggccagggcaccctcgtgaccgtgtcatctacgcgtgagcagaaactgatctcggaagaggatctggcgaagcccaccacgacgccagcgccgcgaccaccaacaccggcgcccaccatcgcgtcgcagcccctgtccctgcgcccagaggcgtgccggccagcggcggggggcgcagtgcacacgagggggctggacttcgcctgtgacatctacatctgggcgcccttggccgggacttgtggggtccttctcctgtcactggttatcaccctttactgcgggcgcgccagagtgaagttcagcaggagcgcagacgcccccgcgtaccagcagggccagaaccagctctataacgagctgaatctaggacgaagagaggagtacgatgttttggacaagagacgtggccgggaccctgagatggggggaaagccgagaaggaagaaccctcaggaaggcctgtacaatgaactgcagaaagataagatggcggaggcctacagtgagattgggatgaaaggcgagcgccggaggggcaaggggcacgatggcctttaccagggtctcagtacagccaccaaggacacctacgacgcccttcacatgcaggccctgccccctcgctctagaggatctggagcaacaaacttctcactactcaaacaagcaggtgacgtggaggagaatcccgggcctgggatccacatggccacttacgaggttctctgtgaggtggcgcggaaactgggcacggatgacagggaagtggtattgttcctcctaaacgtgttcatacctcaacccacactggcccaattaattggagctcttagagctttaaaggaggagggcaggttaacgtttcccctgttagcggaatgtctgtttcgtgcaggtcgcagagacctcttgcgcgacctgcttcacttagacccgcgttttttagagcgccacctagcgggcacaatgagttatttcagcccttatcagctcactgttctccacgtagacggggagctgtgtgcgagggatattaggtctttgatatttttaagcaaggacactatagggtctcgcagcacaccacagacattcttacactgggtgtactgtatggaaaacttagacctactgggtcccactgacgtggatgccctaatgtcaatgcttagatctttgtcaagagtagacctacagcgccaagtgcaaaccctaatgggccttcacctttccggcccatcacactcccaacactatcgccatacaccactcgagaccgatttctacgactacaaggacgacgatgacaagactagtggctccggcgagggcagaggaagtctactaacctgcggagatgtggaagaaaatcctggcccacatatgaccgagtacaagcccacggtgcgcctcgccacccgcgacgacgtccccagggccgtacgcaccctcgccgccgcgttcgccgactaccccgccacgcgccacaccgtcgatccggaccgccacatcgagcgggtcaccgagctgcaagaactcttcctcacgcgcgtcgggctcgacatcggcaaggtgtgggtcgcggacgacggcgccgcggtggcggtctggaccacgccggagagcgtcgaagcgggggcggtgttcgccgagatcggcccgcgcatggccgagttgagcggttcccggctggccgcgcagcaacagatggaaggcctcctggcgccgcaccggcccaaggagcccgcgtggttcctggccaccgtcggcgtctcgcccgaccaccagggcaagggtctgggcagcgccgtcgtgctccccggagtggaggcggccgagcgcgccggggtgcccgccttcctggagacctccgcgccccgcaacctccccttctacgagcggctcggcttcaccgtcaccgccgacgtcgaggtgcccgaaggaccgcgcacctggtgcatgacccgcaagcccggtgcctga

SEQ ID NO: 1144 - DNA, 2733 bp, Artificial Sequence
  Synthetic Polynucleotides
atggccttaccagtgaccgccttgctcctgccgctggccttgctgctccacgccgccaggccggacatcgtgatgacccagagccagaaattcatgagcaccagcgtgggcgacagagtgaacgtgacctgcaaggccagccagaacgtgggcaccaacgtcgtgtggtatcagcagaaaaccggccagagccccaaggccctgatccacagcgccagctacagatacagcggcgtgcccgacagattcaccggcagcggctctggcaccgacttcaccctgaccctgagcaacgtgcagagcgaggacctggccgaatacttctgccagcactacaacagcttcccttacaccttcggcggaggcaccaagctggaaatcaagagaggcggaggcggaagtggaggcggaggatctggcggcggaggctctcaggtgcaactccagcagagcggagccgaactcgtgcggcctggcgtgtccgtgaagattagctgcaagggctccggctacaggttcaccgactaccccatccactgggtcaagcagagccacgccaagagcctggaatggatcggcatcatcagcacctactacggcgacgtgaccaacaaccccaagttccggggcaaggccaccatgacagtggacaagagcagcaccaccgcctacatggaactggcccggctgaccagcgaggactccgccatctactactgcgcccggaacgacctgttcgcctattggggccagggcaccctcgtgacagtgtctgctacgcgtgagcagaaactgatctcggaagaggatctggcgaagcccaccacgacgccagcgccgcgaccaccaacaccggcgcccaccatcgcgtcgcagcccctgtccctgcgcccagaggcgtgccggccagcggcggggggcgcagtgcacacgagggggctggacttcgcctgtgacatctacatctgggcgcccttggccgggacttgtggggtccttctcctgtcactggttatcaccctttactgcgggcgcgccagagtgaagttcagcaggagcgcagacgcccccgcgtaccagcagggccagaaccagctctataacgagctgaatctaggacgaagagaggagtacgatgttttggacaagagacgtggccgggaccctgagatggggggaaagccgagaaggaagaaccctcaggaaggcctgtacaatgaactgcagaaagataagatggcggaggcctacagtgagattgggatgaaaggcgagcgccggaggggcaaggggcacgatggcctttaccagggtctcagtacagccaccaaggacacctacgacgcccttcacatgcaggccctgccccctcgctctagaggatctggagcaacaaacttctcactactcaaacaagcaggtgacgtggaggagaatcccgggcctgggatccacatggccacttacgaggttctctgtgaggtggcgcggaaactgggcacggatgacagggaagtggtattgttcctcctaaacgtgttcatacctcaacccacactggcccaattaattggagctcttagagctttaaaggaggagggcaggttaacgtttcccctgttagcggaatgtctgtttcgtgcaggtcgcagagacctcttgcgcgacctgcttcacttagacccgcgttttttagagcgccacctagcgggcacaatgagttatttcagcccttatcagctcactgttctccacgtagacggggagctgtgtgcgagggatattaggtctttgatatttttaagcaaggacactatagggtctcgcagcacaccacagacattcttacactgggtgtactgtatggaaaacttagacctactgggtcccactgacgtggatgccctaatgtcaatgcttagatctttgtcaagagtagacctacagcgccaagtgcaaaccctaatgggccttcacctttccggcccatcacactcccaacactatcgccatacaccactcgagaccgatttctacgactacaaggacgacgatgacaagactagtggctccggcgagggcagaggaagtctactaacctgcggagatgtggaagaaaatcctggcccacatatgaccgagtacaagcccacggtgcgcctcgccacccgcgacgacgtccccagggccgtacgcaccctcgccgccgcgttcgccgactaccccgccacgcgccacaccgtcgatccggaccgccacatcgagcgggtcaccgagctgcaagaactcttcctcacgcgcgtcgggctcgacatcggcaaggtgtgggtcgcggacgacggcgccgcggtggcggtctggaccacgccggagagcgtcgaagcgggggcggtgttcgccgagatcggcccgcgcatggccgagttgagcggttcccggctggccgcgcagcaacagatggaaggcctcctggcgccgcaccggcccaaggagcccgcgtggttcctggccaccgtcggcgtctcgcccgaccaccagggcaagggtctgggcagcgccgtcgtgctccccggagtggaggcggccgagcgcgccggggtgcccgccttcctggagacctccgcgccccgcaacctccccttctacgagcggctcggcttcaccgtcaccgccgacgtcgaggtgcccgaaggaccgcgcacctggtgcatgacccgcaagcccggtgcctga

SEQ ID NO: 1145 - DNA, 2742 bp, Artificial Sequence
  Synthetic Polynucleotides
atggccttaccagtgaccgccttgctcctgccgctggccttgctgctccacgccgccaggccggacatcaagatgacccagagccccagctctatgtacgccagcctgggcgagcgcgtgaccatcacctgtaaagccagccccgacatcaacagctacctgagctggttccagcagaagcccggcaagagccccaagaccctgatctaccgggccaacagactggtggatggcgtgcccagcagattctctggcggcggaagcggccaggactacagcctgaccatcaactccctggaatacgaggacatgggcatctactactgcctccagtacgacgagttcccctacaccttcggcggaggcaccaagctggaaatgaaaggcggaggcggaagtggaggcggaggatctggcggcggaggctctgaagtgaagctggtggaatcaggaggaggcctcgtgaaacctggcggctctctgaagctgagctgtgccgccagcggcttcaccttcagcagctacgccatgagctgggtgcgccagattcccgagaagcggctggaatgggtggcctccattagcagaggcggcaccacctactaccccgacagcgtgaagggccggttcaccatctccagagacaacgtgcggaacatcctgtacctccagatgagcagcctgcggagcgaggacaccgccatgtactactgcggcagatacgactacgacggctactacgctatggactactggggccagggcaccagcgtgaccgtgtcatctacgcgtgagcagaaactgatctcggaagaggatctggcgaagcccaccacgacgccagcgccgcgaccaccaacaccggcgcccaccatcgcgtcgcagcccctgtccctgcgcccagaggcgtgccggccagcggcggggggcgcagtgcacacgagggggctggacttcgcctgtgacatctacatctgggcgcccttggccgggacttgtggggtccttctcctgtcactggttatcaccctttactgcgggcgcgccagagtgaagttcagcaggagcgcagacgcccccgcgtaccagcagggccagaaccagctctataacgagctgaatctaggacgaagagaggagtacgatgttttggacaagagacgtggccgggaccctgagatggggggaaagccgagaaggaagaaccctcaggaaggcctgtacaatgaactgcagaaagataagatggcggaggcctacagtgagattgggatgaaaggcgagcgccggaggggcaaggggcacgatggcctttaccagggtctcagtacagccaccaaggacacctacgacgcccttcacatgcaggccctgccccctcgctctagaggatctggagcaacaaacttctcactactcaaacaagcaggtgacgtggaggagaatcccgggcctgggatccacatggccacttacgaggttctctgtgaggtggcgcggaaactgggcacggatgacagggaagtggtattgttcctcctaaacgtgttcatacctcaacccacactggcccaattaattggagctcttagagctttaaaggaggagggcaggttaacgtttcccctgttagcggaatgtctgtttcgtgcaggtcgcagagacctcttgcgcgacctgcttcacttagacccgcgttttttagagcgccacctagcgggcacaatgagttatttcagcccttatcagctcactgttctccacgtagacggggagctgtgtgcgagggatattaggtctttgatatttttaagcaaggacactatagggtctcgcagcacaccacagacattcttacactgggtgtactgtatggaaaacttagacctactgggtcccactgacgtggatgccctaatgtcaatgcttagatctttgtcaagagtagacctacagcgccaagtgcaaaccctaatgggccttcacctttccggcccatcacactcccaacactatcgccatacaccactcgagaccgatttctacgactacaaggacgacgatgacaagactagtggctccggcgagggcagaggaagtctactaacctgcggagatgtggaagaaaatcctggcccacatatgaccgagtacaagcccacggtgcgcctcgccacccgcgacgacgtccccagggccgtacgcaccctcgccgccgcgttcgccgactaccccgccacgcgccacaccgtcgatccggaccgccacatcgagcgggtcaccgagctgcaagaactcttcctcacgcgcgtcgggctcgacatcggcaaggtgtgggtcgcggacgacggcgccgcggtggcggtctggaccacgccggagagcgtcgaagcgggggcggtgttcgccgagatcggcccgcgcatggccgagttgagcggttcccggctggccgcgcagcaacagatggaaggcctcctggcgccgcaccggcccaaggagcccgcgtggttcctggccaccgtcggcgtctcgcccgaccaccagggcaagggtctgggcagcgccgtcgtgctccccggagtggaggcggccgagcgcgccggggtgcccgccttcctggagacctccgcgccccgcaacctccccttctacgagcggctcggcttcaccgtcaccgccgacgtcgaggtgcccgaaggaccgcgcacctggtgcatgacccgcaagcccggtgcctga

SEQ ID NO: 1146 - DNA, 2751 bp, Artificial Sequence
  Synthetic Polynucleotides
atggccttaccagtgaccgccttgctcctgccgctggccttgctgctccacgccgccaggccggacgacgtggtcgtgacccctgtgtcctgcttcctgagctgcatctctggcgccgagggccaccacctgattcagggccagcagaagtgccagtacatctggctgctgtacgccctggaacccaccgagacaagaaccgccacccagacccctcacctgtcctgcatccagcccagaatctggggaccctgccaggtgcagtggcagtgggtgtgggatagactgcacccccagcaccctagttgtggcggcggaggctgttgcaacctgctgctgtctgcccacggcgcctacacatttggcggaggcacccggctggaactgaaaggcggaggcggaagtggaggcggaggatctggcggcggaggctctgaagtgaagctccaggaaagcggccctgagctcgtgaagcctggcgcctctgtgaagatgagctgcaaggccagcggctacaccttcaccagctacgtgatgcactgggtcaagcagaagcccggccagggcctggaatggatcggctacatcaacccctacaacgacggcaccaagtacaacgagaagttcaagggcaaggccaccctgaccagcgacaagagcagcagcaccgcctacatggaactgagcagcctgacctccgaggacagcgccgtgtactactgcgcccggtggaaaatctactacggcaactacgaggactactggggccagggcacacccctgacagtgtctagtacgcgtgagcagaaactgatctcggaagaggatctggcgaagcccaccacgacgccagcgccgcgaccaccaacaccggcgcccaccatcgcgtcgcagcccctgtccctgcgcccagaggcgtgccggccagcggcggggggcgcagtgcacacgagggggctggacttcgcctgtgacatctacatctgggcgcccttggccgggacttgtggggtccttctcctgtcactggttatcaccctttactgcgggcgcgccagagtgaagttcagcaggagcgcagacgcccccgcgtaccagcagggccagaaccagctctataacgagctgaatctaggacgaagagaggagtacgatgttttggacaagagacgtggccgggaccctgagatggggggaaagccgagaaggaagaaccctcaggaaggcctgtacaatgaactgcagaaagataagatggcggaggcctacagtgagattgggatgaaaggcgagcgccggaggggcaaggggcacgatggcctttaccagggtctcagtacagccaccaaggacacctacgacgcccttcacatgcaggccctgccccctcgctctagaggatctggagcaacaaacttctcactactcaaacaagcaggtgacgtggaggagaatcccgggcctgggatccacatggccacttacgaggttctctgtgaggtggcgcggaaactgggcacggatgacagggaagtggtattgttcctcctaaacgtgttcatacctcaacccacactggcccaattaattggagctcttagagctttaaaggaggagggcaggttaacgtttcccctgttagcggaatgtctgtttcgtgcaggtcgcagagacctcttgcgcgacctgcttcacttagacccgcgttttttagagcgccacctagcgggcacaatgagttatttcagcccttatcagctcactgttctccacgtagacggggagctgtgtgcgagggatattaggtctttgatatttttaagcaaggacactatagggtctcgcagcacaccacagacattcttacactgggtgtactgtatggaaaacttagacctactgggtcccactgacgtggatgccctaatgtcaatgcttagatctttgtcaagagtagacctacagcgccaagtgcaaaccctaatgggccttcacctttccggcccatcacactcccaacactatcgccatacaccactcgagaccgatttctacgactacaaggacgacgatgacaagactagtggctccggcgagggcagaggaagtctactaacctgcggagatgtggaagaaaatcctggcccacatatgaccgagtacaagcccacggtgcgcctcgccacccgcgacgacgtccccagggccgtacgcaccctcgccgccgcgttcgccgactaccccgccacgcgccacaccgtcgatccggaccgccacatcgagcgggtcaccgagctgcaagaactcttcctcacgcgcgtcgggctcgacatcggcaaggtgtgggtcgcggacgacggcgccgcggtggcggtctggaccacgccggagagcgtcgaagcgggggcggtgttcgccgagatcggcccgcgcatggccgagttgagcggttcccggctggccgcgcagcaacagatggaaggcctcctggcgccgcaccggcccaaggagcccgcgtggttcctggccaccgtcggcgtctcgcccgaccaccagggcaagggtctgggcagcgccgtcgtgctccccggagtggaggcggccgagcgcgccggggtgcccgccttcctggagacctccgcgccccgcaacctccccttctacgagcggctcggcttcaccgtcaccgccgacgtcgaggtgcccgaaggaccgcgcacctggtgcatgacccgcaagcccggtgcctga

SEQ ID NO: 1147 - DNA, 2841 bp, Artificial Sequence
  Synthetic Polynucleotides
atggccttaccagtgaccgccttgctcctgccgctggccttgctgctccacgccgccaggccggacgaattccaggtgcaactggtgcagtctggcggagggctggtgcagccagggggatctctgagactgagctgtgccgccagcgacttcgacttcgccgcctacgagatgagctgggtgcgccaggctcctggacagggactggaatgggtggccatcatcagccacgacggcatcgacaagtattacaccgacagcgtgaagggccggttcaccatcagccgggacaacagcaagaacaccctgtacctgcagatgaataccctgcgggccgaggacaccgccacctactattgcctgagactgggagccgtgggccagggcacacttgtgacagtgtctagcctcgagggaggaggcggctccgggggaggcggaagtggaggcggaggatctgggtctggaggaagcggatctggaggctcagggtcagggggctcaggcagtggaggcagcttcgaacaggtgcaactggtgcagagcggaggcggactggtgcagcctgggggcagtctgaggctgtcttgtgccgcctccgatttcgccttcgatgattacgagatgtcttgggtgcggcaggccccaggcaaagccctggaatggatcggcgacatcaaccacagcggcaccaccatctacaaccccagcctgaagtccagagtgaccatctccagagacaactccaagaatactctgtacctgcagatgaacacactgagagccgaagatacagccatctactactgcgccagaccccactacggcgactacagcgacgccttcgacatctggggccagggaaccatggtcaccgtgtcctctacgcgtgagcagaaactgatctcggaagaggatctggcgaagcccaccacgacgccagcgccgcgaccaccaacaccggcgcccaccatcgcgtcgcagcccctgtccctgcgcccagaggcgtgccggccagcggcggggggcgcagtgcacacgagggggctggacttcgcctgtgacatctacatctgggcgcccttggccgggacttgtggggtccttctcctgtcactggttatcaccctttactgcgggcgcgccagagtgaagttcagcaggagcgcagacgcccccgcgtaccagcagggccagaaccagctctataacgagctgaatctaggacgaagagaggagtacgatgttttggacaagagacgtggccgggaccctgagatggggggaaagccgagaaggaagaaccctcaggaaggcctgtacaatgaactgcagaaagataagatggcggaggcctacagtgagattgggatgaaaggcgagcgccggaggggcaaggggcacgatggcctttaccagggtctcagtacagccaccaaggacacctacgacgcccttcacatgcaggccctgccccctcgctctagaggatctggagcaacaaacttctcactactcaaacaagcaggtgacgtggaggagaatcccgggcctgggatccacatggccacttacgaggttctctgtgaggtggcgcggaaactgggcacggatgacagggaagtggtattgttcctcctaaacgtgttcatacctcaacccacactggcccaattaattggagctcttagagctttaaaggaggagggcaggttaacgtttcccctgttagcggaatgtctgtttcgtgcaggtcgcagagacctcttgcgcgacctgcttcacttagacccgcgttttttagagcgccacctagcgggcacaatgagttatttcagcccttatcagctcactgttctccacgtagacggggagctgtgtgcgagggatattaggtctttgatatttttaagcaaggacactatagggtctcgcagcacaccacagacattcttacactgggtgtactgtatggaaaacttagacctactgggtcccactgacgtggatgccctaatgtcaatgcttagatctttgtcaagagtagacctacagcgccaagtgcaaaccctaatgggccttcacctttccggcccatcacactcccaacactatcgccatacaccactcgagaccgatttctacgactacaaggacgacgatgacaagactagtggctccggcgagggcagaggaagtctactaacctgcggagatgtggaagaaaatcctggcccacatatgaccgagtacaagcccacggtgcgcctcgccacccgcgacgacgtccccagggccgtacgcaccctcgccgccgcgttcgccgactaccccgccacgcgccacaccgtcgatccggaccgccacatcgagcgggtcaccgagctgcaagaactcttcctcacgcgcgtcgggctcgacatcggcaaggtgtgggtcgcggacgacggcgccgcggtggcggtctggaccacgccggagagcgtcgaagcgggggcggtgttcgccgagatcggcccgcgcatggccgagttgagcggttcccggctggccgcgcagcaacagatggaaggcctcctggcgccgcaccggcccaaggagcccgcgtggttcctggccaccgtcggcgtctcgcccgaccaccagggcaagggtctgggcagcgccgtcgtgctccccggagtggaggcggccgagcgcgccggggtgcccgccttcctggagacctccgcgccccgcaacctccccttctacgagcggctcggcttcaccgtcaccgccgacgtcgaggtgcccgaaggaccgcgcacctggtgcatgacccgcaagcccggtgcctga

SEQ ID NO: 1148 - DNA, 2766 bp, Artificial Sequence
  Synthetic Polynucleotides
atggccttaccagtgaccgccttgctcctgccgctggccttgctgctccacgccgccaggccggagatcgtgatgacccagagccctgccaccctgtccgtgtctccaggcgaaagagccaccctgagctgtagagccagccagagcgtgtccagcaacctggcctggtatcagcagaagcccggccaggctccccggctgctgatctatggcgcttctaccagagccaccggcatccccgccagattttctggcagcggctccggcaccgacttcaccctgacaatcagctccctccagtccgtggacagcgccgtgtactactgccagcagtacaacaactggcccccctacaccttcggccagggcaccaagctggaaatcaagggcggaggcggaagtggaggcggaggatctggcggcggaggctctcaggtgcaactgctggaaagcggagggggcgtggtgcagcctggaagaagcctgagactgagctgtgccgccagcggcttcaccttcagcttctacggaatgcactgggtgcgccaggcccctggcaaaggactggaatgggtggccgccatcagctacgacggcagcaacaagtattacgccgacagcgtgaagggccggttcaccatcagccgggacaacagcaagaacaccctgtacctccagatgaacagcctgcgggccgaggacacagccgtgtattattgcgccaagcggcccaaccagttctactgctccgacggcagatgctacagcatcgactactggggccagggaaccctcgtgaccgtgtctagtacgcgtgagcagaaactgatctcggaagaggatctggcgaagcccaccacgacgccagcgccgcgaccaccaacaccggcgcccaccatcgcgtcgcagcccctgtccctgcgcccagaggcgtgccggccagcggcggggggcgcagtgcacacgagggggctggacttcgcctgtgacatctacatctgggcgcccttggccgggacttgtggggtccttctcctgtcactggttatcaccctttactgcgggcgcgccagagtgaagttcagcaggagcgcagacgcccccgcgtaccagcagggccagaaccagctctataacgagctgaatctaggacgaagagaggagtacgatgttttggacaagagacgtggccgggaccctgagatggggggaaagccgagaaggaagaaccctcaggaaggcctgtacaatgaactgcagaaagataagatggcggaggcctacagtgagattgggatgaaaggcgagcgccggaggggcaaggggcacgatggcctttaccagggtctcagtacagccaccaaggacacctacgacgcccttcacatgcaggccctgccccctcgctctagaggatctggagcaacaaacttctcactactcaaacaagcaggtgacgtggaggagaatcccgggcctgggatccacatggccacttacgaggttctctgtgaggtggcgcggaaactgggcacggatgacagggaagtggtattgttcctcctaaacgtgttcatacctcaacccacactggcccaattaattggagctcttagagctttaaaggaggagggcaggttaacgtttcccctgttagcggaatgtctgtttcgtgcaggtcgcagagacctcttgcgcgacctgcttcacttagacccgcgttttttagagcgccacctagcgggcacaatgagttatttcagcccttatcagctcactgttctccacgtagacggggagctgtgtgcgagggatattaggtctttgatatttttaagcaaggacactatagggtctcgcagcacaccacagacattcttacactgggtgtactgtatggaaaacttagacctactgggtcccactgacgtggatgccctaatgtcaatgcttagatctttgtcaagagtagacctacagcgccaagtgcaaaccctaatgggccttcacctttccggcccatcacactcccaacactatcgccatacaccactcgagaccgatttctacgactacaaggacgacgatgacaagactagtggctccggcgagggcagaggaagtctactaacctgcggagatgtggaagaaaatcctggcccacatatgaccgagtacaagcccacggtgcgcctcgccacccgcgacgacgtccccagggccgtacgcaccctcgccgccgcgttcgccgactaccccgccacgcgccacaccgtcgatccggaccgccacatcgagcgggtcaccgagctgcaagaactcttcctcacgcgcgtcgggctcgacatcggcaaggtgtgggtcgcggacgacggcgccgcggtggcggtctggaccacgccggagagcgtcgaagcgggggcggtgttcgccgagatcggcccgcgcatggccgagttgagcggttcccggctggccgcgcagcaacagatggaaggcctcctggcgccgcaccggcccaaggagcccgcgtggttcctggccaccgtcggcgtctcgcccgaccaccagggcaagggtctgggcagcgccgtcgtgctccccggagtggaggcggccgagcgcgccggggtgcccgccttcctggagacctccgcgccccgcaacctccccttctacgagcggctcggcttcaccgtcaccgccgacgtcgaggtgcccgaaggaccgcgcacctggtgcatgacccgcaagcccggtgcctga

SEQ ID NO: 1149 - DNA, 2754 bp, Artificial Sequence
  Synthetic Polynucleotides
atggccttaccagtgaccgccttgctcctgccgctggccttgctgctccacgccgccaggccgcagagcgtgctgacacagcctcctagtgcctctgccggcggaacacctggacagagagtgaccatctcctgctccggcagcagcagcaacatcggcagcaacttcgtgtactggtatcagcaactgcccggcaccgcccccaagctgctgatctacagaaacaaccagcggcccagcggcgtgcccgatagattctctggaagcagaagcggcaccagcgccagcctggctggactgagaagcgaggacgaggccgactactactgtgccgccgatagcctgggcggccactacgtgttcggcaccggaacaaaagtgctgggcggaggcggaagtggaggcggaggatctggcggcggaggctctcaggtgcaactggtggaatctggcggaggctctgtgcagcctggcagaagcctgagactgagctgtgaagcctccggcttcaccttcgaggcttacgccatgcactgggtgcgccagccacctggcaaaggactggaatgggtgtccagcatcaactggaacagcggcagaatcgcctacgccgacagcgtgaagggccggttcaccatcagccgggacaacgccagaaacagcctgtacctccagatgaacagcctgcggctggaagataccgccttctactactgcgccaaggacatccggcggttcagcacaggcggagccgagtttgagtattggggccagggcaccctcgtgaccgtgtctagtacgcgtgagcagaaactgatctcggaagaggatctggcgaagcccaccacgacgccagcgccgcgaccaccaacaccggcgcccaccatcgcgtcgcagcccctgtccctgcgcccagaggcgtgccggccagcggcggggggcgcagtgcacacgagggggctggacttcgcctgtgacatctacatctgggcgcccttggccgggacttgtggggtccttctcctgtcactggttatcaccctttactgcgggcgcgccagagtgaagttcagcaggagcgcagacgcccccgcgtaccagcagggccagaaccagctctataacgagctgaatctaggacgaagagaggagtacgatgttttggacaagagacgtggccgggaccctgagatggggggaaagccgagaaggaagaaccctcaggaaggcctgtacaatgaactgcagaaagataagatggcggaggcctacagtgagattgggatgaaaggcgagcgccggaggggcaaggggcacgatggcctttaccagggtctcagtacagccaccaaggacacctacgacgcccttcacatgcaggccctgccccctcgctctagaggatctggagcaacaaacttctcactactcaaacaagcaggtgacgtggaggagaatcccgggcctgggatccacatggccacttacgaggttctctgtgaggtggcgcggaaactgggcacggatgacagggaagtggtattgttcctcctaaacgtgttcatacctcaacccacactggcccaattaattggagctcttagagctttaaaggaggagggcaggttaacgtttcccctgttagcggaatgtctgtttcgtgcaggtcgcagagacctcttgcgcgacctgcttcacttagacccgcgttttttagagcgccacctagcgggcacaatgagttatttcagcccttatcagctcactgttctccacgtagacggggagctgtgtgcgagggatattaggtctttgatatttttaagcaaggacactatagggtctcgcagcacaccacagacattcttacactgggtgtactgtatggaaaacttagacctactgggtcccactgacgtggatgccctaatgtcaatgcttagatctttgtcaagagtagacctacagcgccaagtgcaaaccctaatgggccttcacctttccggcccatcacactcccaacactatcgccatacaccactcgagaccgatttctacgactacaaggacgacgatgacaagactagtggctccggcgagggcagaggaagtctactaacctgcggagatgtggaagaaaatcctggcccacatatgaccgagtacaagcccacggtgcgcctcgccacccgcgacgacgtccccagggccgtacgcaccctcgccgccgcgttcgccgactaccccgccacgcgccacaccgtcgatccggaccgccacatcgagcgggtcaccgagctgcaagaactcttcctcacgcgcgtcgggctcgacatcggcaaggtgtgggtcgcggacgacggcgccgcggtggcggtctggaccacgccggagagcgtcgaagcgggggcggtgttcgccgagatcggcccgcgcatggccgagttgagcggttcccggctggccgcgcagcaacagatggaaggcctcctggcgccgcaccggcccaaggagcccgcgtggttcctggccaccgtcggcgtctcgcccgaccaccagggcaagggtctgggcagcgccgtcgtgctccccggagtggaggcggccgagcgcgccggggtgcccgccttcctggagacctccgcgccccgcaacctccccttctacgagcggctcggcttcaccgtcaccgccgacgtcgaggtgcccgaaggaccgcgcacctggtgcatgacccgcaagcccggtgcctga

SEQ ID NO: 1150 - DNA, 2739 bp, Artificial Sequence
  Synthetic Polynucleotides
atggccttaccagtgaccgccttgctcctgccgctggccttgctgctccacgccgccaggccggagaacgtgctgacacagagccctgccatcatgagcgcttccccaggcgagaaagtgaccatgacatgtagcgccagcagcagcgtgtcctacatgcactggtatcagcagaagtccagcacaagccccaagctgtggatctacgacaccagcaaactggcctctggcgtgccaggcagattttctggcagcggcagcggaaacagctacagcctgacaatcagcagcatggaagccgaggacgtggcaacctactactgctttcaaggcagcggctaccctctgacctttggagccggaacaaagctggaactgaaaggcggaggcggaagtggaggcggaggatctggcggcggaggctctcaggtgcagctgaaagaatctggccctggactggtggcccctagccagtctctgagcatcacctgtaccgtgtccggcttcagcctgagttctcagggcgtgtactgggtccgacagcctcctggaaaaggactggaatggctgggagccatttgggctggcggcagcaccaattacaacagcgccctgatgagccggctgagcatctccaaggacaacagcaagagccaggtgttcctgaagatgaacagcctccagaccgacgacaccgccatgtactactgcgccagagtggatggctaccggggctacaacatggactattggggccagggcaccagcgtgacagtctcttctacgcgtgagcagaaactgatctcggaagaggatctggcgaagcccaccacgacgccagcgccgcgaccaccaacaccggcgcccaccatcgcgtcgcagcccctgtccctgcgcccagaggcgtgccggccagcggcggggggcgcagtgcacacgagggggctggacttcgcctgtgacatctacatctgggcgcccttggccgggacttgtggggtccttctcctgtcactggttatcaccctttactgcgggcgcgccagagtgaagttcagcaggagcgcagacgcccccgcgtaccagcagggccagaaccagctctataacgagctgaatctaggacgaagagaggagtacgatgttttggacaagagacgtggccgggaccctgagatggggggaaagccgagaaggaagaaccctcaggaaggcctgtacaatgaactgcagaaagataagatggcggaggcctacagtgagattgggatgaaaggcgagcgccggaggggcaaggggcacgatggcctttaccagggtctcagtacagccaccaaggacacctacgacgcccttcacatgcaggccctgccccctcgctctagaggatctggagcaacaaacttctcactactcaaacaagcaggtgacgtggaggagaatcccgggcctgggatccacatggccacttacgaggttctctgtgaggtggcgcggaaactgggcacggatgacagggaagtggtattgttcctcctaaacgtgttcatacctcaacccacactggcccaattaattggagctcttagagctttaaaggaggagggcaggttaacgtttcccctgttagcggaatgtctgtttcgtgcaggtcgcagagacctcttgcgcgacctgcttcacttagacccgcgttttttagagcgccacctagcgggcacaatgagttatttcagcccttatcagctcactgttctccacgtagacggggagctgtgtgcgagggatattaggtctttgatatttttaagcaaggacactatagggtctcgcagcacaccacagacattcttacactgggtgtactgtatggaaaacttagacctactgggtcccactgacgtggatgccctaatgtcaatgcttagatctttgtcaagagtagacctacagcgccaagtgcaaaccctaatgggccttcacctttccggcccatcacactcccaacactatcgccatacaccactcgagaccgatttctacgactacaaggacgacgatgacaagactagtggctccggcgagggcagaggaagtctactaacctgcggagatgtggaagaaaatcctggcccacatatgaccgagtacaagcccacggtgcgcctcgccacccgcgacgacgtccccagggccgtacgcaccctcgccgccgcgttcgccgactaccccgccacgcgccacaccgtcgatccggaccgccacatcgagcgggtcaccgagctgcaagaactcttcctcacgcgcgtcgggctcgacatcggcaaggtgtgggtcgcggacgacggcgccgcggtggcggtctggaccacgccggagagcgtcgaagcgggggcggtgttcgccgagatcggcccgcgcatggccgagttgagcggttcccggctggccgcgcagcaacagatggaaggcctcctggcgccgcaccggcccaaggagcccgcgtggttcctggccaccgtcggcgtctcgcccgaccaccagggcaagggtctgggcagcgccgtcgtgctccccggagtggaggcggccgagcgcgccggggtgcccgccttcctggagacctccgcgccccgcaacctccccttctacgagcggctcggcttcaccgtcaccgccgacgtcgaggtgcccgaaggaccgcgcacctggtgcatgacccgcaagcccggtgcctga

SEQ ID NO: 1151 - DNA, 2751 bp, Artificial Sequence
  Synthetic Polynucleotides
atggccttaccagtgaccgccttgctcctgccgctggccttgctgctccacgccgccaggccggacgacatccagatgacccagagccccagcagcctgtctgccagcgtgggcgacagagtgaccatcacctgtagagccagccagagcatcagcagctacctgaactggtatcagcagaagcccggcaaggcccccaaactgctgatctacgacgccagcaacctggaaaccggcgtgcccagcagattttccggcagcggctctggcaccgacttcaccttcaccatcagctccctccagcccgaggacattgccacctactactgccagcagtacgacaacctgcccctgacctttggcggaggcaccaaggtggacatcaagagaggcggaggcggaagtggaggcggaggatctggcggcggaggctctcaggtgcaactggtggaatctggcggcggagtggtgcagcctggcagaagcctgagactgagctgtgccgccagcggcttcacctttagcagctacgccatgcactgggtgcgccaggcccctggaaaaggcctggaatgggtggccgtgatctcctacgacggctccaacaagtattacgccgacagcgtgaagggccggttcaccatctccagagacaacagcaagaacaccctgtacctccagatgaacagcctgcgggccgaggacaccgccgtgtactattgtgccagggctcacaacagcagctcttggagcttcgactactggggccagggcaccctcgtgaccgtgtcatctacgcgtgagcagaaactgatctcggaagaggatctggcgaagcccaccacgacgccagcgccgcgaccaccaacaccggcgcccaccatcgcgtcgcagcccctgtccctgcgcccagaggcgtgccggccagcggcggggggcgcagtgcacacgagggggctggacttcgcctgtgacatctacatctgggcgcccttggccgggacttgtggggtccttctcctgtcactggttatcaccctttactgcgggcgcgccagagtgaagttcagcaggagcgcagacgcccccgcgtaccagcagggccagaaccagctctataacgagctgaatctaggacgaagagaggagtacgatgttttggacaagagacgtggccgggaccctgagatggggggaaagccgagaaggaagaaccctcaggaaggcctgtacaatgaactgcagaaagataagatggcggaggcctacagtgagattgggatgaaaggcgagcgccggaggggcaaggggcacgatggcctttaccagggtctcagtacagccaccaaggacacctacgacgcccttcacatgcaggccctgccccctcgctctagaggatctggagcaacaaacttctcactactcaaacaagcaggtgacgtggaggagaatcccgggcctgggatccacatggccacttacgaggttctctgtgaggtggcgcggaaactgggcacggatgacagggaagtggtattgttcctcctaaacgtgttcatacctcaacccacactggcccaattaattggagctcttagagctttaaaggaggagggcaggttaacgtttcccctgttagcggaatgtctgtttcgtgcaggtcgcagagacctcttgcgcgacctgcttcacttagacccgcgttttttagagcgccacctagcgggcacaatgagttatttcagcccttatcagctcactgttctccacgtagacggggagctgtgtgcgagggatattaggtctttgatatttttaagcaaggacactatagggtctcgcagcacaccacagacattcttacactgggtgtactgtatggaaaacttagacctactgggtcccactgacgtggatgccctaatgtcaatgcttagatctttgtcaagagtagacctacagcgccaagtgcaaaccctaatgggccttcacctttccggcccatcacactcccaacactatcgccatacaccactcgagaccgatttctacgactacaaggacgacgatgacaagactagtggctccggcgagggcagaggaagtctactaacctgcggagatgtggaagaaaatcctggcccacatatgaccgagtacaagcccacggtgcgcctcgccacccgcgacgacgtccccagggccgtacgcaccctcgccgccgcgttcgccgactaccccgccacgcgccacaccgtcgatccggaccgccacatcgagcgggtcaccgagctgcaagaactcttcctcacgcgcgtcgggctcgacatcggcaaggtgtgggtcgcggacgacggcgccgcggtggcggtctggaccacgccggagagcgtcgaagcgggggcggtgttcgccgagatcggcccgcgcatggccgagttgagcggttcccggctggccgcgcagcaacagatggaaggcctcctggcgccgcaccggcccaaggagcccgcgtggttcctggccaccgtcggcgtctcgcccgaccaccagggcaagggtctgggcagcgccgtcgtgctccccggagtggaggcggccgagcgcgccggggtgcccgccttcctggagacctccgcgccccgcaacctccccttctacgagcggctcggcttcaccgtcaccgccgacgtcgaggtgcccgaaggaccgcgcacctggtgcatgacccgcaagcccggtgcctga

SEQ ID NO: 1152 - DNA, 2778 bp, Artificial Sequence
  Synthetic Polynucleotides
atggccttaccagtgaccgccttgctcctgccgctggccttgctgctccacgccgccaggccggacgacgtcgtgatgacccagagccctctgagcctgcctgtgtccctgggcgatcaggccagcatctcctgcagatccagccagagactggtgcacagcaacggcaacacctacctgcactggtatctgcagaagcccggccagagccccaagctgctgatctaccgggtgtccaacagattccccggcgtgcccgatagattcagcggctctggcagcggcaccgacttcaccctgaagatcagccgggtggaagccgaggacctgggcatctatttctgcagccagagcacccacgtgccctacacctttggcggaggcaccaagctggaaatcaagcggggcggaggcggaagtggaggcggaggatctggcggcggaggctctgaagtgcggctgcagcagtctggccccgacctgattaagcctggggccagcgtgaagatgagctgcaaggccagcggctacaccttcaccggctacgtgatgcactgggtcaagcagaggccaggccagggcctggaatggatcggcttcatcaacccctacaacgacgacatccagagcaacgagcggttccggggcaaggccaccctgaccagcgataagagcagcaccaccgcctacatggaactgagcagcctgacctccgaggacagcgccgtgtactactgtgctaggggagccggctacaacttcgacggggcctacagattcttcgacttttggggccagggcaccacactgaccgtgtcctctacgcgtgagcagaaactgatctcggaagaggatctggcgaagcccaccacgacgccagcgccgcgaccaccaacaccggcgcccaccatcgcgtcgcagcccctgtccctgcgcccagaggcgtgccggccagcggcggggggcgcagtgcacacgagggggctggacttcgcctgtgacatctacatctgggcgcccttggccgggacttgtggggtccttctcctgtcactggttatcaccctttactgcgggcgcgccagagtgaagttcagcaggagcgcagacgcccccgcgtaccagcagggccagaaccagctctataacgagctgaatctaggacgaagagaggagtacgatgttttggacaagagacgtggccgggaccctgagatggggggaaagccgagaaggaagaaccctcaggaaggcctgtacaatgaactgcagaaagataagatggcggaggcctacagtgagattgggatgaaaggcgagcgccggaggggcaaggggcacgatggcctttaccagggtctcagtacagccaccaaggacacctacgacgcccttcacatgcaggccctgccccctcgctctagaggatctggagcaacaaacttctcactactcaaacaagcaggtgacgtggaggagaatcccgggcctgggatccacatggccacttacgaggttctctgtgaggtggcgcggaaactgggcacggatgacagggaagtggtattgttcctcctaaacgtgttcatacctcaacccacactggcccaattaattggagctcttagagctttaaaggaggagggcaggttaacgtttcccctgttagcggaatgtctgtttcgtgcaggtcgcagagacctcttgcgcgacctgcttcacttagacccgcgttttttagagcgccacctagcgggcacaatgagttatttcagcccttatcagctcactgttctccacgtagacggggagctgtgtgcgagggatattaggtctttgatatttttaagcaaggacactatagggtctcgcagcacaccacagacattcttacactgggtgtactgtatggaaaacttagacctactgggtcccactgacgtggatgccctaatgtcaatgcttagatctttgtcaagagtagacctacagcgccaagtgcaaaccctaatgggccttcacctttccggcccatcacactcccaacactatcgccatacaccactcgagaccgatttctacgactacaaggacgacgatgacaagactagtggctccggcgagggcagaggaagtctactaacctgcggagatgtggaagaaaatcctggcccacatatgaccgagtacaagcccacggtgcgcctcgccacccgcgacgacgtccccagggccgtacgcaccctcgccgccgcgttcgccgactaccccgccacgcgccacaccgtcgatccggaccgccacatcgagcgggtcaccgagctgcaagaactcttcctcacgcgcgtcgggctcgacatcggcaaggtgtgggtcgcggacgacggcgccgcggtggcggtctggaccacgccggagagcgtcgaagcgggggcggtgttcgccgagatcggcccgcgcatggccgagttgagcggttcccggctggccgcgcagcaacagatggaaggcctcctggcgccgcaccggcccaaggagcccgcgtggttcctggccaccgtcggcgtctcgcccgaccaccagggcaagggtctgggcagcgccgtcgtgctccccggagtggaggcggccgagcgcgccggggtgcccgccttcctggagacctccgcgccccgcaacctccccttctacgagcggctcggcttcaccgtcaccgccgacgtcgaggtgcccgaaggaccgcgcacctggtgcatgacccgcaagcccggtgcctga

SEQ ID NO: 1153 - DNA, 2751 bp, Artificial Sequence
  Synthetic Polynucleotides
atggccttaccagtgaccgccttgctcctgccgctggccttgctgctccacgccgccaggccggacagctacgagctgacccagcctcctagcgtgtccgtgtctcctggacagaccgccaccatctcttgcagcggcgatcaactgggcgggaagtacggccactggtatcagaagaagcccggccagagccccgtgctggtgctgtaccaggacagaaaacggcctgccggcatccccgagagattcagcggaagcagcagcggcaacaccatcaccctgaccatcagcggcacccaggccgtggatgaggccgactactactgccaggcttgggacaccaatctgggcggcgtgttcggcggaggcaccaaagtgacagtgctgggacagggcggaggcggaagtggaggcggaggatctggcggcggaggctctcaggtgcaactggtggaaagcggagccgaagtgaagaaacctggggccagcgtgaaggtgtcctgcaaggccagcggctacacctttaccggctactacatgcactgggtgcgccaggctccaggccagggactggaatggatgggccggatcaaccccaatagcggcggcaccaactacgcccagaaattccagggcagagtgaccatgaccagagacaccagcatcagcaccgcctacatggaactgagccggctgagaagcgacgacaccgccgtgtactactgcgccagccctagaggcagaggcagcgccttcgatatttggggccagggcacactcgtgaccgtgtcctctacgcgtgagcagaaactgatctcggaagaggatctggcgaagcccaccacgacgccagcgccgcgaccaccaacaccggcgcccaccatcgcgtcgcagcccctgtccctgcgcccagaggcgtgccggccagcggcggggggcgcagtgcacacgagggggctggacttcgcctgtgacatctacatctgggcgcccttggccgggacttgtggggtccttctcctgtcactggttatcaccctttactgcgggcgcgccagagtgaagttcagcaggagcgcagacgcccccgcgtaccagcagggccagaaccagctctataacgagctgaatctaggacgaagagaggagtacgatgttttggacaagagacgtggccgggaccctgagatggggggaaagccgagaaggaagaaccctcaggaaggcctgtacaatgaactgcagaaagataagatggcggaggcctacagtgagattgggatgaaaggcgagcgccggaggggcaaggggcacgatggcctttaccagggtctcagtacagccaccaaggacacctacgacgcccttcacatgcaggccctgccccctcgctctagaggatctggagcaacaaacttctcactactcaaacaagcaggtgacgtggaggagaatcccgggcctgggatccacatggccacttacgaggttctctgtgaggtggcgcggaaactgggcacggatgacagggaagtggtattgttcctcctaaacgtgttcatacctcaacccacactggcccaattaattggagctcttagagctttaaaggaggagggcaggttaacgtttcccctgttagcggaatgtctgtttcgtgcaggtcgcagagacctcttgcgcgacctgcttcacttagacccgcgttttttagagcgccacctagcgggcacaatgagttatttcagcccttatcagctcactgttctccacgtagacggggagctgtgtgcgagggatattaggtctttgatatttttaagcaaggacactatagggtctcgcagcacaccacagacattcttacactgggtgtactgtatggaaaacttagacctactgggtcccactgacgtggatgccctaatgtcaatgcttagatctttgtcaagagtagacctacagcgccaagtgcaaaccctaatgggccttcacctttccggcccatcacactcccaacactatcgccatacaccactcgagaccgatttctacgactacaaggacgacgatgacaagactagtggctccggcgagggcagaggaagtctactaacctgcggagatgtggaagaaaatcctggcccacatatgaccgagtacaagcccacggtgcgcctcgccacccgcgacgacgtccccagggccgtacgcaccctcgccgccgcgttcgccgactaccccgccacgcgccacaccgtcgatccggaccgccacatcgagcgggtcaccgagctgcaagaactcttcctcacgcgcgtcgggctcgacatcggcaaggtgtgggtcgcggacgacggcgccgcggtggcggtctggaccacgccggagagcgtcgaagcgggggcggtgttcgccgagatcggcccgcgcatggccgagttgagcggttcccggctggccgcgcagcaacagatggaaggcctcctggcgccgcaccggcccaaggagcccgcgtggttcctggccaccgtcggcgtctcgcccgaccaccagggcaagggtctgggcagcgccgtcgtgctccccggagtggaggcggccgagcgcgccggggtgcccgccttcctggagacctccgcgccccgcaacctccccttctacgagcggctcggcttcaccgtcaccgccgacgtcgaggtgcccgaaggaccgcgcacctggtgcatgacccgcaagcccggtgcctga

SEQ ID NO: 1154 - DNA, 2760 bp, Artificial Sequence
  Synthetic Polynucleotides
atggccttaccagtgaccgccttgctcctgccgctggccttgctgctccacgccgccaggccggacaacttcatgctgacccagccccacagcgtgtccgagagccctggcaagaccgtgaccatctcctgcaccagaagcagcggctctatcgccagcaaatacgtgcagtggtatcagcagaggcccggcagcagccctaccaccgtgatctacgaggacaaccagaggcctagcggcgtgcccgatagattcagcggcagcatcgacaccagcagcaacagcgccagcctgaccatcagcggcctgagaacagaggacgaggccgactactactgccacagctacgacagcaacaaccactccgtgttcggcggaggcaccaaagtgacagtgctgggacagggcggaggcggaagtggaggcggaggatctggcggcggaggctctgaagtgcaactggtggaaagcgggggaggcgtggtgcagccaggcggatctctgagactgagctgtgccgccagcggcttcaccttcagcagctacgccatgagctgggtgcgccaggcccctggaaaaggcctggaatgggtgtccgccatctctggctctggcggcagcacctactacgccgatagcgtgaagggccggttcagcatcagccgggacaacagcaagaacaccctgtacctccagatgaacagcctgcgggccgaggacaccgccgtgtactactgtgccagaaccagaagctccggggccttcgacatctggggccagggaacactcgtgaccgtgtcctctacgcgtgagcagaaactgatctcggaagaggatctggcgaagcccaccacgacgccagcgccgcgaccaccaacaccggcgcccaccatcgcgtcgcagcccctgtccctgcgcccagaggcgtgccggccagcggcggggggcgcagtgcacacgagggggctggacttcgcctgtgacatctacatctgggcgcccttggccgggacttgtggggtccttctcctgtcactggttatcaccctttactgcgggcgcgccagagtgaagttcagcaggagcgcagacgcccccgcgtaccagcagggccagaaccagctctataacgagctgaatctaggacgaagagaggagtacgatgttttggacaagagacgtggccgggaccctgagatggggggaaagccgagaaggaagaaccctcaggaaggcctgtacaatgaactgcagaaagataagatggcggaggcctacagtgagattgggatgaaaggcgagcgccggaggggcaaggggcacgatggcctttaccagggtctcagtacagccaccaaggacacctacgacgcccttcacatgcaggccctgccccctcgctctagaggatctggagcaacaaacttctcactactcaaacaagcaggtgacgtggaggagaatcccgggcctgggatccacatggccacttacgaggttctctgtgaggtggcgcggaaactgggcacggatgacagggaagtggtattgttcctcctaaacgtgttcatacctcaacccacactggcccaattaattggagctcttagagctttaaaggaggagggcaggttaacgtttcccctgttagcggaatgtctgtttcgtgcaggtcgcagagacctcttgcgcgacctgcttcacttagacccgcgttttttagagcgccacctagcgggcacaatgagttatttcagcccttatcagctcactgttctccacgtagacggggagctgtgtgcgagggatattaggtctttgatatttttaagcaaggacactatagggtctcgcagcacaccacagacattcttacactgggtgtactgtatggaaaacttagacctactgggtcccactgacgtggatgccctaatgtcaatgcttagatctttgtcaagagtagacctacagcgccaagtgcaaaccctaatgggccttcacctttccggcccatcacactcccaacactatcgccatacaccactcgagaccgatttctacgactacaaggacgacgatgacaagactagtggctccggcgagggcagaggaagtctactaacctgcggagatgtggaagaaaatcctggcccacatatgaccgagtacaagcccacggtgcgcctcgccacccgcgacgacgtccccagggccgtacgcaccctcgccgccgcgttcgccgactaccccgccacgcgccacaccgtcgatccggaccgccacatcgagcgggtcaccgagctgcaagaactcttcctcacgcgcgtcgggctcgacatcggcaaggtgtgggtcgcggacgacggcgccgcggtggcggtctggaccacgccggagagcgtcgaagcgggggcggtgttcgccgagatcggcccgcgcatggccgagttgagcggttcccggctggccgcgcagcaacagatggaaggcctcctggcgccgcaccggcccaaggagcccgcgtggttcctggccaccgtcggcgtctcgcccgaccaccagggcaagggtctgggcagcgccgtcgtgctccccggagtggaggcggccgagcgcgccggggtgcccgccttcctggagacctccgcgccccgcaacctccccttctacgagcggctcggcttcaccgtcaccgccgacgtcgaggtgcccgaaggaccgcgcacctggtgcatgacccgcaagcccggtgcctga

SEQ ID NO: 1155 - DNA, 2745 bp, Artificial Sequence
  Synthetic Polynucleotides
atggccttaccagtgaccgccttgctcctgccgctggccttgctgctccacgccgccaggccggacatccagatgaaccagagccccagcagcctgagcgccagcctgggcgataccatcaccatcacctgtcacgccagccagaacatcaacgtgtggctgagctggtatcagcagaagcccggcaacatccccaagctgctgatctacaaggccagcaacctgcacaccggcgtgcccagcagattttctggcagcggctctggcaccggcttcaccattaccatcagctccctccagcccgaggacattgccacctactactgccagcagggccagagctacccctggacatttggcggaggcaccaagctggaaatcaagagaggcggaggcggaagtggaggcggaggatctggcggcggaggctctgaagtgcaactccagcagagcggcccagagcttgtgaagcctggcgcttccgtgaagattagctgcaaagccagcggctacagcttcaccggctacttcatgaactgggtcaagcagagccacggcaagagcctggagtacatcggcagattcaacccctacaacggcgagacactgtacaaccagaagttcaagggcaaggccaccctgaccgtggacaagagcagcagcaccgtgcacatggaactgctgagcgtgaccagcgaggacagcgccgtgtactactgtggcagaagcggcaacgacgacgctatggactattggggccagggcaccagcgtgaccgtgtctagtgctacgcgtgagcagaaactgatctcggaagaggatctggcgaagcccaccacgacgccagcgccgcgaccaccaacaccggcgcccaccatcgcgtcgcagcccctgtccctgcgcccagaggcgtgccggccagcggcggggggcgcagtgcacacgagggggctggacttcgcctgtgacatctacatctgggcgcccttggccgggacttgtggggtccttctcctgtcactggttatcaccctttactgcgggcgcgccagagtgaagttcagcaggagcgcagacgcccccgcgtaccagcagggccagaaccagctctataacgagctgaatctaggacgaagagaggagtacgatgttttggacaagagacgtggccgggaccctgagatggggggaaagccgagaaggaagaaccctcaggaaggcctgtacaatgaactgcagaaagataagatggcggaggcctacagtgagattgggatgaaaggcgagcgccggaggggcaaggggcacgatggcctttaccagggtctcagtacagccaccaaggacacctacgacgcccttcacatgcaggccctgccccctcgctctagaggatctggagcaacaaacttctcactactcaaacaagcaggtgacgtggaggagaatcccgggcctgggatccacatggccacttacgaggttctctgtgaggtggcgcggaaactgggcacggatgacagggaagtggtattgttcctcctaaacgtgttcatacctcaacccacactggcccaattaattggagctcttagagctttaaaggaggagggcaggttaacgtttcccctgttagcggaatgtctgtttcgtgcaggtcgcagagacctcttgcgcgacctgcttcacttagacccgcgttttttagagcgccacctagcgggcacaatgagttatttcagcccttatcagctcactgttctccacgtagacggggagctgtgtgcgagggatattaggtctttgatatttttaagcaaggacactatagggtctcgcagcacaccacagacattcttacactgggtgtactgtatggaaaacttagacctactgggtcccactgacgtggatgccctaatgtcaatgcttagatctttgtcaagagtagacctacagcgccaagtgcaaaccctaatgggccttcacctttccggcccatcacactcccaacactatcgccatacaccactcgagaccgatttctacgactacaaggacgacgatgacaagactagtggctccggcgagggcagaggaagtctactaacctgcggagatgtggaagaaaatcctggcccacatatgaccgagtacaagcccacggtgcgcctcgccacccgcgacgacgtccccagggccgtacgcaccctcgccgccgcgttcgccgactaccccgccacgcgccacaccgtcgatccggaccgccacatcgagcgggtcaccgagctgcaagaactcttcctcacgcgcgtcgggctcgacatcggcaaggtgtgggtcgcggacgacggcgccgcggtggcggtctggaccacgccggagagcgtcgaagcgggggcggtgttcgccgagatcggcccgcgcatggccgagttgagcggttcccggctggccgcgcagcaacagatggaaggcctcctggcgccgcaccggcccaaggagcccgcgtggttcctggccaccgtcggcgtctcgcccgaccaccagggcaagggtctgggcagcgccgtcgtgctccccggagtggaggcggccgagcgcgccggggtgcccgccttcctggagacctccgcgccccgcaacctccccttctacgagcggctcggcttcaccgtcaccgccgacgtcgaggtgcccgaaggaccgcgcacctggtgcatgacccgcaagcccggtgcctga

SEQ ID NO: 1156 - DNA, 2748 bp, Artificial Sequence
  Synthetic Polynucleotides
atggccttaccagtgaccgccttgctcctgccgctggccttgctgctccacgccgccaggccggacgacatccagatgacccagagccccagcatcctgagcgccagcgtgggcgacagagtgaccatcacctgtcgggccagccagagattcggcgactacctggcctggtatcagcagaagcctggacaggcccccaagctgctgatctacggcgcttccacactccagagcggcgtgcccagcagattttctggcagcggctccggcaccgagttcaccctgacaatcagcggcctccagcccgaggacttcgccacctactattgccagcaggccaacagcttccctatcaccttcggcaagggcacccggctggacatcagaagaggcggaggcggaagtggaggcggaggatctggcggcggaggctctcaggtgcagctggtgcagtctggggccgaagtgaagaaacccggcagcagcgtgaaggtgtcctgcaaggcttccggcggcaccttcagcagctacgccatttcttgggtgcgccaggccccaggacagggcctggaatggatgggctggatcaacgtgggcaacggcaacgccatctacagccagaaattccagggccgcgtgacaatcaccagagacaccagcgccaccaccgcctacatggaactgagcagcctgcggagcgaggacaccgccgtgtactactgtgccagggatggcgagagagcctgggacctggattattggggccagggcacactcgtgaccgtgtcctctacgcgtgagcagaaactgatctcggaagaggatctggcgaagcccaccacgacgccagcgccgcgaccaccaacaccggcgcccaccatcgcgtcgcagcccctgtccctgcgcccagaggcgtgccggccagcggcggggggcgcagtgcacacgagggggctggacttcgcctgtgacatctacatctgggcgcccttggccgggacttgtggggtccttctcctgtcactggttatcaccctttactgcgggcgcgccagagtgaagttcagcaggagcgcagacgcccccgcgtaccagcagggccagaaccagctctataacgagctgaatctaggacgaagagaggagtacgatgttttggacaagagacgtggccgggaccctgagatggggggaaagccgagaaggaagaaccctcaggaaggcctgtacaatgaactgcagaaagataagatggcggaggcctacagtgagattgggatgaaaggcgagcgccggaggggcaaggggcacgatggcctttaccagggtctcagtacagccaccaaggacacctacgacgcccttcacatgcaggccctgccccctcgctctagaggatctggagcaacaaacttctcactactcaaacaagcaggtgacgtggaggagaatcccgggcctgggatccacatggccacttacgaggttctctgtgaggtggcgcggaaactgggcacggatgacagggaagtggtattgttcctcctaaacgtgttcatacctcaacccacactggcccaattaattggagctcttagagctttaaaggaggagggcaggttaacgtttcccctgttagcggaatgtctgtttcgtgcaggtcgcagagacctcttgcgcgacctgcttcacttagacccgcgttttttagagcgccacctagcgggcacaatgagttatttcagcccttatcagctcactgttctccacgtagacggggagctgtgtgcgagggatattaggtctttgatatttttaagcaaggacactatagggtctcgcagcacaccacagacattcttacactgggtgtactgtatggaaaacttagacctactgggtcccactgacgtggatgccctaatgtcaatgcttagatctttgtcaagagtagacctacagcgccaagtgcaaaccctaatgggccttcacctttccggcccatcacactcccaacactatcgccatacaccactcgagaccgatttctacgactacaaggacgacgatgacaagactagtggctccggcgagggcagaggaagtctactaacctgcggagatgtggaagaaaatcctggcccacatatgaccgagtacaagcccacggtgcgcctcgccacccgcgacgacgtccccagggccgtacgcaccctcgccgccgcgttcgccgactaccccgccacgcgccacaccgtcgatccggaccgccacatcgagcgggtcaccgagctgcaagaactcttcctcacgcgcgtcgggctcgacatcggcaaggtgtgggtcgcggacgacggcgccgcggtggcggtctggaccacgccggagagcgtcgaagcgggggcggtgttcgccgagatcggcccgcgcatggccgagttgagcggttcccggctggccgcgcagcaacagatggaaggcctcctggcgccgcaccggcccaaggagcccgcgtggttcctggccaccgtcggcgtctcgcccgaccaccagggcaagggtctgggcagcgccgtcgtgctccccggagtggaggcggccgagcgcgccggggtgcccgccttcctggagacctccgcgccccgcaacctccccttctacgagcggctcggcttcaccgtcaccgccgacgtcgaggtgcccgaaggaccgcgcacctggtgcatgacccgcaagcccggtgcctga

SEQ ID NO: 1157 - DNA, 2763 bp, Artificial Sequence
  Synthetic Polynucleotides
atggccttaccagtgaccgccttgctcctgccgctggccttgctgctccacgccgccaggccggacgagacaaccctgacacagagccctggcaccctgagcctgtctccaggcgaaagagccacactgagctgtcgggccagccagagcgtgtccagctcttacctggcctggtatcagcagaagcccggccaggctccccggctgctgatctatggcgcttctagcagagccaccggcatccccgatagattcagcggctctggcagcggcaccgacttcaccctgaccatcagcagactggaacccgaggacttcgccgtgtactactgccagcagtacggcagcagcccctacacattcggccagggcaccaagctggaaatcaagagaggcggaggcggaagtggaggcggaggatctggcggcggaggctctcaggtgcaactggtgcagtctggcggcggagtggtgcagcctggaagaagcctgagactgtcctgtgccgccagcggcttcaccttcagcagctacgccatgcactgggtgcgccaggcccctggaaaaggactggaatgggtggccgtgatctcctacgacggcagcaacaagtattacgccgacagcgtgaagggccggttcaccatctccagagacaacagcaagaacaccctgtacctccagatgaacagcctgcgggccgaggacacagccgtgtattattgcgccagagagctgcggttcctggaatggtccagcgacgccttcgacatctggggccagggaacaatggtcaccgtgtcctccacgcgtgagcagaaactgatctcggaagaggatctggcgaagcccaccacgacgccagcgccgcgaccaccaacaccggcgcccaccatcgcgtcgcagcccctgtccctgcgcccagaggcgtgccggccagcggcggggggcgcagtgcacacgagggggctggacttcgcctgtgacatctacatctgggcgcccttggccgggacttgtggggtccttctcctgtcactggttatcaccctttactgcgggcgcgccagagtgaagttcagcaggagcgcagacgcccccgcgtaccagcagggccagaaccagctctataacgagctgaatctaggacgaagagaggagtacgatgttttggacaagagacgtggccgggaccctgagatggggggaaagccgagaaggaagaaccctcaggaaggcctgtacaatgaactgcagaaagataagatggcggaggcctacagtgagattgggatgaaaggcgagcgccggaggggcaaggggcacgatggcctttaccagggtctcagtacagccaccaaggacacctacgacgcccttcacatgcaggccctgccccctcgctctagaggatctggagcaacaaacttctcactactcaaacaagcaggtgacgtggaggagaatcccgggcctgggatccacatggccacttacgaggttctctgtgaggtggcgcggaaactgggcacggatgacagggaagtggtattgttcctcctaaacgtgttcatacctcaacccacactggcccaattaattggagctcttagagctttaaaggaggagggcaggttaacgtttcccctgttagcggaatgtctgtttcgtgcaggtcgcagagacctcttgcgcgacctgcttcacttagacccgcgttttttagagcgccacctagcgggcacaatgagttatttcagcccttatcagctcactgttctccacgtagacggggagctgtgtgcgagggatattaggtctttgatatttttaagcaaggacactatagggtctcgcagcacaccacagacattcttacactgggtgtactgtatggaaaacttagacctactgggtcccactgacgtggatgccctaatgtcaatgcttagatctttgtcaagagtagacctacagcgccaagtgcaaaccctaatgggccttcacctttccggcccatcacactcccaacactatcgccatacaccactcgagaccgatttctacgactacaaggacgacgatgacaagactagtggctccggcgagggcagaggaagtctactaacctgcggagatgtggaagaaaatcctggcccacatatgaccgagtacaagcccacggtgcgcctcgccacccgcgacgacgtccccagggccgtacgcaccctcgccgccgcgttcgccgactaccccgccacgcgccacaccgtcgatccggaccgccacatcgagcgggtcaccgagctgcaagaactcttcctcacgcgcgtcgggctcgacatcggcaaggtgtgggtcgcggacgacggcgccgcggtggcggtctggaccacgccggagagcgtcgaagcgggggcggtgttcgccgagatcggcccgcgcatggccgagttgagcggttcccggctggccgcgcagcaacagatggaaggcctcctggcgccgcaccggcccaaggagcccgcgtggttcctggccaccgtcggcgtctcgcccgaccaccagggcaagggtctgggcagcgccgtcgtgctccccggagtggaggcggccgagcgcgccggggtgcccgccttcctggagacctccgcgccccgcaacctccccttctacgagcggctcggcttcaccgtcaccgccgacgtcgaggtgcccgaaggaccgcgcacctggtgcatgacccgcaagcccggtgcctga

SEQ ID NO: 1158 - DNA, 2748 bp, Artificial Sequence
  Synthetic Polynucleotides
atggccttaccagtgaccgccttgctcctgccgctggccttgctgctccacgccgccaggccggagatcgtgctgacacagagccctgccaccctgtctctgagccctggcgaaagagccaccctgagctgtagagccagccagagcgtgcggagctacctggcctggtatcagcagaagcctggacaggcccccagactgctgatctacgacgccagcaatcgggccacaggcatccccgccagattttctggctctggcagcggcaccgacttcaccctgacaatcagcagcctggaacccgaggacttcgccgtgtactactgccagcagcggagcaactggccccctacctttggacagggcaccaaggtggaaatcaagggcggaggcggaagtggaggcggaggatctggcggcggaggctctcaactccaggtgcaggaatctggccccggactcgtgaagcccagcgagacactgagcctgacctgtaccgtgtccggcggcagcatcagcaacagctacttctcctggggctggatcagacagccccctggcaagggcctggaatggatcggcagcttctactacggcgagaaaacctactacaaccccagcctgaagtccagagccaccatcagcatcgacaccagcaagagccagttctccctgaagctgagcagcgtgacagccgccgacaccgccgtgtattattgccccagaggccccaccatgatccggggcgtgatcgactcttggggccagggaacactcgtgaccgtgtcctctacgcgtgagcagaaactgatctcggaagaggatctggcgaagcccaccacgacgccagcgccgcgaccaccaacaccggcgcccaccatcgcgtcgcagcccctgtccctgcgcccagaggcgtgccggccagcggcggggggcgcagtgcacacgagggggctggacttcgcctgtgacatctacatctgggcgcccttggccgggacttgtggggtccttctcctgtcactggttatcaccctttactgcgggcgcgccagagtgaagttcagcaggagcgcagacgcccccgcgtaccagcagggccagaaccagctctataacgagctgaatctaggacgaagagaggagtacgatgttttggacaagagacgtggccgggaccctgagatggggggaaagccgagaaggaagaaccctcaggaaggcctgtacaatgaactgcagaaagataagatggcggaggcctacagtgagattgggatgaaaggcgagcgccggaggggcaaggggcacgatggcctttaccagggtctcagtacagccaccaaggacacctacgacgcccttcacatgcaggccctgccccctcgctctagaggatctggagcaacaaacttctcactactcaaacaagcaggtgacgtggaggagaatcccgggcctgggatccacatggccacttacgaggttctctgtgaggtggcgcggaaactgggcacggatgacagggaagtggtattgttcctcctaaacgtgttcatacctcaacccacactggcccaattaattggagctcttagagctttaaaggaggagggcaggttaacgtttcccctgttagcggaatgtctgtttcgtgcaggtcgcagagacctcttgcgcgacctgcttcacttagacccgcgttttttagagcgccacctagcgggcacaatgagttatttcagcccttatcagctcactgttctccacgtagacggggagctgtgtgcgagggatattaggtctttgatatttttaagcaaggacactatagggtctcgcagcacaccacagacattcttacactgggtgtactgtatggaaaacttagacctactgggtcccactgacgtggatgccctaatgtcaatgcttagatctttgtcaagagtagacctacagcgccaagtgcaaaccctaatgggccttcacctttccggcccatcacactcccaacactatcgccatacaccactcgagaccgatttctacgactacaaggacgacgatgacaagactagtggctccggcgagggcagaggaagtctactaacctgcggagatgtggaagaaaatcctggcccacatatgaccgagtacaagcccacggtgcgcctcgccacccgcgacgacgtccccagggccgtacgcaccctcgccgccgcgttcgccgactaccccgccacgcgccacaccgtcgatccggaccgccacatcgagcgggtcaccgagctgcaagaactcttcctcacgcgcgtcgggctcgacatcggcaaggtgtgggtcgcggacgacggcgccgcggtggcggtctggaccacgccggagagcgtcgaagcgggggcggtgttcgccgagatcggcccgcgcatggccgagttgagcggttcccggctggccgcgcagcaacagatggaaggcctcctggcgccgcaccggcccaaggagcccgcgtggttcctggccaccgtcggcgtctcgcccgaccaccagggcaagggtctgggcagcgccgtcgtgctccccggagtggaggcggccgagcgcgccggggtgcccgccttcctggagacctccgcgccccgcaacctccccttctacgagcggctcggcttcaccgtcaccgccgacgtcgaggtgcccgaaggaccgcgcacctggtgcatgacccgcaagcccggtgcctga

SEQ ID NO: 1159 - DNA, 2739 bp, Artificial Sequence
  Synthetic Polynucleotides
atggccttaccagtgaccgccttgctcctgccgctggccttgctgctccacgccgccaggccggacatccagatgacacagagccctagcagcctgtctgccagcgtgggagacagagtgaccatcacctgtagagccagccagggcatctcttcttggctggcctggtatcagcagaagcccgagaaggcccctaagagcctgatctatgccgccagctctctccagagcggagtgcctagcagattttctggcagcggctccggcaccgatttcaccctgacaatatccagcctccagcctgaggacttcgccacctactactgccagcagtacaacagctacccctacaccttcggccagggcaccaagctggaaatcaaaggcggaggcggaagtggaggcggaggatctggcggcggaggctctcaagtgcaactggttcagagcggtgccgaagtgcggaagcctggcagctctgtgaaggtgtcctgtaaagcctccggcggcagcttcaacaactaccccatcttctgggtccgacaggcccctggacagggctttgaatggatgggcagaatcatccccatcctgggcatcaccgcctacgctcagaaattccagggccgcgtgacaatcaccgccgacaagtctacaagcacagcctacatggaactgaacagcctgcggagcgaggacaccgccgtgtattattgtgccggcggagatgacctggacgcctttgacatttggggccagggaacaatggtgtccgtgtcctctacgcgtgagcagaaactgatctcggaagaggatctggcgaagcccaccacgacgccagcgccgcgaccaccaacaccggcgcccaccatcgcgtcgcagcccctgtccctgcgcccagaggcgtgccggccagcggcggggggcgcagtgcacacgagggggctggacttcgcctgtgacatctacatctgggcgcccttggccgggacttgtggggtccttctcctgtcactggttatcaccctttactgcgggcgcgccagagtgaagttcagcaggagcgcagacgcccccgcgtaccagcagggccagaaccagctctataacgagctgaatctaggacgaagagaggagtacgatgttttggacaagagacgtggccgggaccctgagatggggggaaagccgagaaggaagaaccctcaggaaggcctgtacaatgaactgcagaaagataagatggcggaggcctacagtgagattgggatgaaaggcgagcgccggaggggcaaggggcacgatggcctttaccagggtctcagtacagccaccaaggacacctacgacgcccttcacatgcaggccctgccccctcgctctagaggatctggagcaacaaacttctcactactcaaacaagcaggtgacgtggaggagaatcccgggcctgggatccacatggccacttacgaggttctctgtgaggtggcgcggaaactgggcacggatgacagggaagtggtattgttcctcctaaacgtgttcatacctcaacccacactggcccaattaattggagctcttagagctttaaaggaggagggcaggttaacgtttcccctgttagcggaatgtctgtttcgtgcaggtcgcagagacctcttgcgcgacctgcttcacttagacccgcgttttttagagcgccacctagcgggcacaatgagttatttcagcccttatcagctcactgttctccacgtagacggggagctgtgtgcgagggatattaggtctttgatatttttaagcaaggacactatagggtctcgcagcacaccacagacattcttacactgggtgtactgtatggaaaacttagacctactgggtcccactgacgtggatgccctaatgtcaatgcttagatctttgtcaagagtagacctacagcgccaagtgcaaaccctaatgggccttcacctttccggcccatcacactcccaacactatcgccatacaccactcgagaccgatttctacgactacaaggacgacgatgacaagactagtggctccggcgagggcagaggaagtctactaacctgcggagatgtggaagaaaatcctggcccacatatgaccgagtacaagcccacggtgcgcctcgccacccgcgacgacgtccccagggccgtacgcaccctcgccgccgcgttcgccgactaccccgccacgcgccacaccgtcgatccggaccgccacatcgagcgggtcaccgagctgcaagaactcttcctcacgcgcgtcgggctcgacatcggcaaggtgtgggtcgcggacgacggcgccgcggtggcggtctggaccacgccggagagcgtcgaagcgggggcggtgttcgccgagatcggcccgcgcatggccgagttgagcggttcccggctggccgcgcagcaacagatggaaggcctcctggcgccgcaccggcccaaggagcccgcgtggttcctggccaccgtcggcgtctcgcccgaccaccagggcaagggtctgggcagcgccgtcgtgctccccggagtggaggcggccgagcgcgccggggtgcccgccttcctggagacctccgcgccccgcaacctccccttctacgagcggctcggcttcaccgtcaccgccgacgtcgaggtgcccgaaggaccgcgcacctggtgcatgacccgcaagcccggtgcctga

SEQ ID NO: 1160 - DNA, 2775 bp, Artificial Sequence
  Synthetic Polynucleotides
atggccttaccagtgaccgccttgctcctgccgctggccttgctgctccacgccgccaggccggacatcgtgatgacccagacccccctgagcctgcctgtgacacctggcgagcctgccagcatctcctgcagaagcagcagaagcctgctggacagcgacgacggcaacacctacctggactggtatctgcagaaacccggccagagcccccaactgctgatctacaccctgagctacagagccagcggcgtgcccgatagattttccggctctggcagcggcaccgacttcaccctgaagatcagccgggtggaagccgaggacgtgggcgtgtactactgtatgcagcgggtggaatttcccatcaccttcggccagggcaccagactggaaatcaagagaggcggaggcggaagtggaggcggaggatctggcggcggaggctctcaggtgcaactggtggaatctggcgggggagtggtgcagcctggcagatccctgagactgagctgtgccgccagcggcttcatcttcagcagatacggaatgcactgggtgcgccaggcccctggcaagggactgaaatgggtggccgtgatttggtacgacggcagcaacaagctgtacgccgacagcgtgaagggccggttcaccatcagcagagacaacagcaagaacaccctgtacctgcagatgaacagcctgcgggccgaggacaccgccgtgtactattgcgccagagactactacgacaacagccggcaccactggggcttcgactattggggccagggaacccttgtgaccgtgtcctctacgcgtgagcagaaactgatctcggaagaggatctggcgaagcccaccacgacgccagcgccgcgaccaccaacaccggcgcccaccatcgcgtcgcagcccctgtccctgcgcccagaggcgtgccggccagcggcggggggcgcagtgcacacgagggggctggacttcgcctgtgacatctacatctgggcgcccttggccgggacttgtggggtccttctcctgtcactggttatcaccctttactgcgggcgcgccagagtgaagttcagcaggagcgcagacgcccccgcgtaccagcagggccagaaccagctctataacgagctgaatctaggacgaagagaggagtacgatgttttggacaagagacgtggccgggaccctgagatggggggaaagccgagaaggaagaaccctcaggaaggcctgtacaatgaactgcagaaagataagatggcggaggcctacagtgagattgggatgaaaggcgagcgccggaggggcaaggggcacgatggcctttaccagggtctcagtacagccaccaaggacacctacgacgcccttcacatgcaggccctgccccctcgctctagaggatctggagcaacaaacttctcactactcaaacaagcaggtgacgtggaggagaatcccgggcctgggatccacatggccacttacgaggttctctgtgaggtggcgcggaaactgggcacggatgacagggaagtggtattgttcctcctaaacgtgttcatacctcaacccacactggcccaattaattggagctcttagagctttaaaggaggagggcaggttaacgtttcccctgttagcggaatgtctgtttcgtgcaggtcgcagagacctcttgcgcgacctgcttcacttagacccgcgttttttagagcgccacctagcgggcacaatgagttatttcagcccttatcagctcactgttctccacgtagacggggagctgtgtgcgagggatattaggtctttgatatttttaagcaaggacactatagggtctcgcagcacaccacagacattcttacactgggtgtactgtatggaaaacttagacctactgggtcccactgacgtggatgccctaatgtcaatgcttagatctttgtcaagagtagacctacagcgccaagtgcaaaccctaatgggccttcacctttccggcccatcacactcccaacactatcgccatacaccactcgagaccgatttctacgactacaaggacgacgatgacaagactagtggctccggcgagggcagaggaagtctactaacctgcggagatgtggaagaaaatcctggcccacatatgaccgagtacaagcccacggtgcgcctcgccacccgcgacgacgtccccagggccgtacgcaccctcgccgccgcgttcgccgactaccccgccacgcgccacaccgtcgatccggaccgccacatcgagcgggtcaccgagctgcaagaactcttcctcacgcgcgtcgggctcgacatcggcaaggtgtgggtcgcggacgacggcgccgcggtggcggtctggaccacgccggagagcgtcgaagcgggggcggtgttcgccgagatcggcccgcgcatggccgagttgagcggttcccggctggccgcgcagcaacagatggaaggcctcctggcgccgcaccggcccaaggagcccgcgtggttcctggccaccgtcggcgtctcgcccgaccaccagggcaagggtctgggcagcgccgtcgtgctccccggagtggaggcggccgagcgcgccggggtgcccgccttcctggagacctccgcgccccgcaacctccccttctacgagcggctcggcttcaccgtcaccgccgacgtcgaggtgcccgaaggaccgcgcacctggtgcatgacccgcaagcccggtgcctga

SEQ ID NO: 1161 - DNA, 2745 bp, Artificial Sequence
  Synthetic Polynucleotides
atggccttaccagtgaccgccttgctcctgccgctggccttgctgctccacgccgccaggccggagatccagatgacccagagccccagcagcatgtctgccagcctgggcgacaccatcaccatcacatgccaggccacccaggacatcttcaagaacctgaactggtatcagcagaagcccggcaagccccccagcctgctgatctactatgccaccgaactggccgagggcgtgcccagcagattttctggcagcggcagcggctccgactacagcctgaccatcagcaacctggaaagcgaggacttcgccgcctactactgcctccagttcttcgagttcccattcaccttcggctccggcaccaagctggaaatgaagggcggaggcggaagtggaggcggaggatctggcggcggaggctctcaggtgcaactccagcagtctggcgctgagcttgtgcggcctggcacctctgtgaaggtgtcctgtaaagccagcggctacgtgttcaccaactactggatcgagtggatcaagcagcggccaggccagggcctggaatggatcggcgtgatgaatccaggcagcggcgagacaacctacaacgagaagttcaagggcaaggccaccctgaccgccgacaagagcagcagcacagcctacatgcaactgtcctccctgaccagcgtggacagcgccgtgtacttctgcgccagggaccacgaccgggactactacgctatggactactggggccagggcaccagcgtgaccgtgtcatctacgcgtgagcagaaactgatctcggaagaggatctggcgaagcccaccacgacgccagcgccgcgaccaccaacaccggcgcccaccatcgcgtcgcagcccctgtccctgcgcccagaggcgtgccggccagcggcggggggcgcagtgcacacgagggggctggacttcgcctgtgacatctacatctgggcgcccttggccgggacttgtggggtccttctcctgtcactggttatcaccctttactgcgggcgcgccagagtgaagttcagcaggagcgcagacgcccccgcgtaccagcagggccagaaccagctctataacgagctgaatctaggacgaagagaggagtacgatgttttggacaagagacgtggccgggaccctgagatggggggaaagccgagaaggaagaaccctcaggaaggcctgtacaatgaactgcagaaagataagatggcggaggcctacagtgagattgggatgaaaggcgagcgccggaggggcaaggggcacgatggcctttaccagggtctcagtacagccaccaaggacacctacgacgcccttcacatgcaggccctgccccctcgctctagaggatctggagcaacaaacttctcactactcaaacaagcaggtgacgtggaggagaatcccgggcctgggatccacatggccacttacgaggttctctgtgaggtggcgcggaaactgggcacggatgacagggaagtggtattgttcctcctaaacgtgttcatacctcaacccacactggcccaattaattggagctcttagagctttaaaggaggagggcaggttaacgtttcccctgttagcggaatgtctgtttcgtgcaggtcgcagagacctcttgcgcgacctgcttcacttagacccgcgttttttagagcgccacctagcgggcacaatgagttatttcagcccttatcagctcactgttctccacgtagacggggagctgtgtgcgagggatattaggtctttgatatttttaagcaaggacactatagggtctcgcagcacaccacagacattcttacactgggtgtactgtatggaaaacttagacctactgggtcccactgacgtggatgccctaatgtcaatgcttagatctttgtcaagagtagacctacagcgccaagtgcaaaccctaatgggccttcacctttccggcccatcacactcccaacactatcgccatacaccactcgagaccgatttctacgactacaaggacgacgatgacaagactagtggctccggcgagggcagaggaagtctactaacctgcggagatgtggaagaaaatcctggcccacatatgaccgagtacaagcccacggtgcgcctcgccacccgcgacgacgtccccagggccgtacgcaccctcgccgccgcgttcgccgactaccccgccacgcgccacaccgtcgatccggaccgccacatcgagcgggtcaccgagctgcaagaactcttcctcacgcgcgtcgggctcgacatcggcaaggtgtgggtcgcggacgacggcgccgcggtggcggtctggaccacgccggagagcgtcgaagcgggggcggtgttcgccgagatcggcccgcgcatggccgagttgagcggttcccggctggccgcgcagcaacagatggaaggcctcctggcgccgcaccggcccaaggagcccgcgtggttcctggccaccgtcggcgtctcgcccgaccaccagggcaagggtctgggcagcgccgtcgtgctccccggagtggaggcggccgagcgcgccggggtgcccgccttcctggagacctccgcgccccgcaacctccccttctacgagcggctcggcttcaccgtcaccgccgacgtcgaggtgcccgaaggaccgcgcacctggtgcatgacccgcaagcccggtgcctga

SEQ ID NO: 1162 - DNA, 2736 bp, Artificial Sequence
  Synthetic Polynucleotides
atggccttaccagtgaccgccttgctcctgccgctggccttgctgctccacgccgccaggccggacatcctgctgacacagagccccgccatcctgtccgtgtctccaggcgagagagtgtcctttagctgccgggccagccagaacatcggcaccagcatccactggtatcagcagcggaccaacggcagccccagactgctgattaagtacgccagcgagtccgtgtccggcatccccagcagattttctggcagcggctccggcaccgacttcaccctgagcatcaacagcgtggaaagcgaggacattgccgactactactgccagcacaccaatagctggcccaccacctttggcggaggcaccaagctggaaatcaagagaggcggaggcggaagtggaggcggaggatctggcggcggaggctctcaggtgcaactccagcagtccgacgccgagcttgtgaagcctggcgcttccgtgaagattagctgcaaggccagcggctacaccttcaccgaccacgccattcactgggtcaagcagaagcccgagcagggcctggaatggatcggctacttcagccccggcaacggcgacatcaagtacaacgagaagttcaagggcaaggccaccctgaccgccgacaagagcagcagcacagcctacatgcaactgaacagcctgaccagcgaggactccgccgtgtacttctgcaagcggagctacggcaactacgactactggggccagggcaccacactgaccgtgtctagtacgcgtgagcagaaactgatctcggaagaggatctggcgaagcccaccacgacgccagcgccgcgaccaccaacaccggcgcccaccatcgcgtcgcagcccctgtccctgcgcccagaggcgtgccggccagcggcggggggcgcagtgcacacgagggggctggacttcgcctgtgacatctacatctgggcgcccttggccgggacttgtggggtccttctcctgtcactggttatcaccctttactgcgggcgcgccagagtgaagttcagcaggagcgcagacgcccccgcgtaccagcagggccagaaccagctctataacgagctgaatctaggacgaagagaggagtacgatgttttggacaagagacgtggccgggaccctgagatggggggaaagccgagaaggaagaaccctcaggaaggcctgtacaatgaactgcagaaagataagatggcggaggcctacagtgagattgggatgaaaggcgagcgccggaggggcaaggggcacgatggcctttaccagggtctcagtacagccaccaaggacacctacgacgcccttcacatgcaggccctgccccctcgctctagaggatctggagcaacaaacttctcactactcaaacaagcaggtgacgtggaggagaatcccgggcctgggatccacatggccacttacgaggttctctgtgaggtggcgcggaaactgggcacggatgacagggaagtggtattgttcctcctaaacgtgttcatacctcaacccacactggcccaattaattggagctcttagagctttaaaggaggagggcaggttaacgtttcccctgttagcggaatgtctgtttcgtgcaggtcgcagagacctcttgcgcgacctgcttcacttagacccgcgttttttagagcgccacctagcgggcacaatgagttatttcagcccttatcagctcactgttctccacgtagacggggagctgtgtgcgagggatattaggtctttgatatttttaagcaaggacactatagggtctcgcagcacaccacagacattcttacactgggtgtactgtatggaaaacttagacctactgggtcccactgacgtggatgccctaatgtcaatgcttagatctttgtcaagagtagacctacagcgccaagtgcaaaccctaatgggccttcacctttccggcccatcacactcccaacactatcgccatacaccactcgagaccgatttctacgactacaaggacgacgatgacaagactagtggctccggcgagggcagaggaagtctactaacctgcggagatgtggaagaaaatcctggcccacatatgaccgagtacaagcccacggtgcgcctcgccacccgcgacgacgtccccagggccgtacgcaccctcgccgccgcgttcgccgactaccccgccacgcgccacaccgtcgatccggaccgccacatcgagcgggtcaccgagctgcaagaactcttcctcacgcgcgtcgggctcgacatcggcaaggtgtgggtcgcggacgacggcgccgcggtggcggtctggaccacgccggagagcgtcgaagcgggggcggtgttcgccgagatcggcccgcgcatggccgagttgagcggttcccggctggccgcgcagcaacagatggaaggcctcctggcgccgcaccggcccaaggagcccgcgtggttcctggccaccgtcggcgtctcgcccgaccaccagggcaagggtctgggcagcgccgtcgtgctccccggagtggaggcggccgagcgcgccggggtgcccgccttcctggagacctccgcgccccgcaacctccccttctacgagcggctcggcttcaccgtcaccgccgacgtcgaggtgcccgaaggaccgcgcacctggtgcatgacccgcaagcccggtgcctga

SEQ ID NO: 1163 - DNA, 2751 bp, Artificial Sequence
  Synthetic Polynucleotides
atggccttaccagtgaccgccttgctcctgccgctggccttgctgctccacgccgccaggccggacatcgtgatgacccagagccccgatagcctggccgtgtctctgggagagagagccaccatcaactgcaagagcagccagagcctgctgaacagcggcgaccagaagaactacctgacctggtatcagcagaagcccggccagccccccaagctgctgatctactgggccagcaccagagaaagcggcgtgcccgatagattcagcggcagcggaagtggcaccgacttcaccctgaccatcagttctcttcaggccgaggacgtggccgtgtactactgccagaacgactacagctaccccctgaccttcggccagggcaccaaggtggaaatcaagggcggaggcggaagtggaggcggaggatctggcggcggaggctctcaggtgcagctggtgcagtctggggccgaagtgaagaaaaccggcagcagcgtgaaggtgtcctgcaaggccagcggctacacctttaccgaccacgccattcacgtgtggcggcaggctccaggacaggccctggaatggatgggccacttcagccccggcaacaccgacatcaagtacaacgacaagttcaagggcagagtgaccctgaccgtggaccgcagcatgagcaccgcctacatggaactgagcagcctgcggagcgaggacaccgccatgtactattgcaagaccagcaccttctttttcgactactggggccagggaacaatggtcaccgtgtccagcacgcgtgagcagaaactgatctcggaagaggatctggcgaagcccaccacgacgccagcgccgcgaccaccaacaccggcgcccaccatcgcgtcgcagcccctgtccctgcgcccagaggcgtgccggccagcggcggggggcgcagtgcacacgagggggctggacttcgcctgtgacatctacatctgggcgcccttggccgggacttgtggggtccttctcctgtcactggttatcaccctttactgcgggcgcgccagagtgaagttcagcaggagcgcagacgcccccgcgtaccagcagggccagaaccagctctataacgagctgaatctaggacgaagagaggagtacgatgttttggacaagagacgtggccgggaccctgagatggggggaaagccgagaaggaagaaccctcaggaaggcctgtacaatgaactgcagaaagataagatggcggaggcctacagtgagattgggatgaaaggcgagcgccggaggggcaaggggcacgatggcctttaccagggtctcagtacagccaccaaggacacctacgacgcccttcacatgcaggccctgccccctcgctctagaggatctggagcaacaaacttctcactactcaaacaagcaggtgacgtggaggagaatcccgggcctgggatccacatggccacttacgaggttctctgtgaggtggcgcggaaactgggcacggatgacagggaagtggtattgttcctcctaaacgtgttcatacctcaacccacactggcccaattaattggagctcttagagctttaaaggaggagggcaggttaacgtttcccctgttagcggaatgtctgtttcgtgcaggtcgcagagacctcttgcgcgacctgcttcacttagacccgcgttttttagagcgccacctagcgggcacaatgagttatttcagcccttatcagctcactgttctccacgtagacggggagctgtgtgcgagggatattaggtctttgatatttttaagcaaggacactatagggtctcgcagcacaccacagacattcttacactgggtgtactgtatggaaaacttagacctactgggtcccactgacgtggatgccctaatgtcaatgcttagatctttgtcaagagtagacctacagcgccaagtgcaaaccctaatgggccttcacctttccggcccatcacactcccaacactatcgccatacaccactcgagaccgatttctacgactacaaggacgacgatgacaagactagtggctccggcgagggcagaggaagtctactaacctgcggagatgtggaagaaaatcctggcccacatatgaccgagtacaagcccacggtgcgcctcgccacccgcgacgacgtccccagggccgtacgcaccctcgccgccgcgttcgccgactaccccgccacgcgccacaccgtcgatccggaccgccacatcgagcgggtcaccgagctgcaagaactcttcctcacgcgcgtcgggctcgacatcggcaaggtgtgggtcgcggacgacggcgccgcggtggcggtctggaccacgccggagagcgtcgaagcgggggcggtgttcgccgagatcggcccgcgcatggccgagttgagcggttcccggctggccgcgcagcaacagatggaaggcctcctggcgccgcaccggcccaaggagcccgcgtggttcctggccaccgtcggcgtctcgcccgaccaccagggcaagggtctgggcagcgccgtcgtgctccccggagtggaggcggccgagcgcgccggggtgcccgccttcctggagacctccgcgccccgcaacctccccttctacgagcggctcggcttcaccgtcaccgccgacgtcgaggtgcccgaaggaccgcgcacctggtgcatgacccgcaagcccggtgcctga

SEQ ID NO: 1164 - DNA, 2517 bp, Artificial Sequence
  Synthetic Polynucleotides
atggagctgactgaattgctcctcgtggtcatgcttctcctaactgcaaggctaacgctgtccagcccggctcctcctgcttgtgacctccgagtcctcagtaaactgcttcgtgactcccatgtccttcacagcagactgagccagtgcccagaggttcaccctttgcctacacctgtcctgctgcctgctgtggactttagcttgggagaatggaaaacccagatggaggagaccaaggcacaggacattctgggagcagtgacccttctgctggagggagtgatggcagcacggggacaactgggacccacttgcctctcatccctcctggggcagctttctggacaggtccgtctcctccttggggccctgcagagcctccttggaacccagcttcctccacagggcaggaccacagctcacaaggaccctaatgccatcttcctgagcttccaacacctgctccgaggaaaggtgcgtttcctgatgcttgtaggagggtccaccctctgcgtcaggcgggccccacccaccacagctgtccccagcagaacctctacgcgtgagcagaaactgatctcggaagaggatctggcgaagcccaccacgacgccagcgccgcgaccaccaacaccggcgcccaccatcgcgtcgcagcccctgtccctgcgcccagaggcgtgccggccagcggcggggggcgcagtgcacacgagggggctggacttcgcctgtgacatctacatctgggcgcccttggccgggacttgtggggtccttctcctgtcactggttatcaccctttactgcgggcgcgccagagtgaagttcagcaggagcgcagacgcccccgcgtaccagcagggccagaaccagctctataacgagctgaatctaggacgaagagaggagtacgatgttttggacaagagacgtggccgggaccctgagatggggggaaagccgagaaggaagaaccctcaggaaggcctgtacaatgaactgcagaaagataagatggcggaggcctacagtgagattgggatgaaaggcgagcgccggaggggcaaggggcacgatggcctttaccagggtctcagtacagccaccaaggacacctacgacgcccttcacatgcaggccctgccccctcgctctagaggatctggagcaacaaacttctcactactcaaacaagcaggtgacgtggaggagaatcccgggcctgggatccacatggccacttacgaggttctctgtgaggtggcgcggaaactgggcacggatgacagggaagtggtattgttcctcctaaacgtgttcatacctcaacccacactggcccaattaattggagctcttagagctttaaaggaggagggcaggttaacgtttcccctgttagcggaatgtctgtttcgtgcaggtcgcagagacctcttgcgcgacctgcttcacttagacccgcgttttttagagcgccacctagcgggcacaatgagttatttcagcccttatcagctcactgttctccacgtagacggggagctgtgtgcgagggatattaggtctttgatatttttaagcaaggacactatagggtctcgcagcacaccacagacattcttacactgggtgtactgtatggaaaacttagacctactgggtcccactgacgtggatgccctaatgtcaatgcttagatctttgtcaagagtagacctacagcgccaagtgcaaaccctaatgggccttcacctttccggcccatcacactcccaacactatcgccatacaccactcgagaccgatttctacgactacaaggacgacgatgacaagactagtggctccggcgagggcagaggaagtctactaacctgcggagatgtggaagaaaatcctggcccacatatgaccgagtacaagcccacggtgcgcctcgccacccgcgacgacgtccccagggccgtacgcaccctcgccgccgcgttcgccgactaccccgccacgcgccacaccgtcgatccggaccgccacatcgagcgggtcaccgagctgcaagaactcttcctcacgcgcgtcgggctcgacatcggcaaggtgtgggtcgcggacgacggcgccgcggtggcggtctggaccacgccggagagcgtcgaagcgggggcggtgttcgccgagatcggcccgcgcatggccgagttgagcggttcccggctggccgcgcagcaacagatggaaggcctcctggcgccgcaccggcccaaggagcccgcgtggttcctggccaccgtcggcgtctcgcccgaccaccagggcaagggtctgggcagcgccgtcgtgctccccggagtggaggcggccgagcgcgccggggtgcccgccttcctggagacctccgcgccccgcaacctccccttctacgagcggctcggcttcaccgtcaccgccgacgtcgaggtgcccgaaggaccgcgcacctggtgcatgacccgcaagcccggtgcctga

SEQ ID NO: 1165 - DNA, 2748 bp, Artificial Sequence
  Synthetic Polynucleotides
atggccttaccagtgaccgccttgctcctgccgctggccttgctgctccacgccgccaggccggacatccagatgacccagagccccagcagcctgtctgccagcgtgggcgacagagtgaccatcacatgcaaggccagccaggacgtgtccattgccgtggcctggtatcagcagaagcccggcaaggcccccaaggtgctgatctacagcgccagctacagatacaccggcgtgcccgacagattcagcggctctggcagcggcaccgacttcaccttcaccatcagctccctccagcccgaggatattgccgtgtactactgccagcagcactacatcacccccctgacctttggcggaggcaccaaggtggaaatcaagggcggaggcggaagtggaggcggaggatctggcggcggaggctctcagatccaactggtgcagagcggccacgaagtgaagaaacctggggccagcgtgaaggtgtcctgcaaagccagcggctacacctttaccaactacggcatgaactgggtgcgccaggcccctggacagggcctggaatggatgggctggatcaacaccaagaccggcgagcccacctacgccgaagagttcaagggcagattcgtgttcagcctggaaaccagcgcctccaccgcctacctccagatcagctctctgaaggccgaggacaccgccatgtacttttgcggcagaggcggctacggcagcagctactggtacttcgatgtgtggggccagggcaccaccgtgaccgtgtcatctacgcgtgagcagaaactgatctcggaagaggatctggcgaagcccaccacgacgccagcgccgcgaccaccaacaccggcgcccaccatcgcgtcgcagcccctgtccctgcgcccagaggcgtgccggccagcggcggggggcgcagtgcacacgagggggctggacttcgcctgtgacatctacatctgggcgcccttggccgggacttgtggggtccttctcctgtcactggttatcaccctttactgcgggcgcgccagagtgaagttcagcaggagcgcagacgcccccgcgtaccagcagggccagaaccagctctataacgagctgaatctaggacgaagagaggagtacgatgttttggacaagagacgtggccgggaccctgagatggggggaaagccgagaaggaagaaccctcaggaaggcctgtacaatgaactgcagaaagataagatggcggaggcctacagtgagattgggatgaaaggcgagcgccggaggggcaaggggcacgatggcctttaccagggtctcagtacagccaccaaggacacctacgacgcccttcacatgcaggccctgccccctcgctctagaggatctggagcaacaaacttctcactactcaaacaagcaggtgacgtggaggagaatcccgggcctgggatccacatggccacttacgaggttctctgtgaggtggcgcggaaactgggcacggatgacagggaagtggtattgttcctcctaaacgtgttcatacctcaacccacactggcccaattaattggagctcttagagctttaaaggaggagggcaggttaacgtttcccctgttagcggaatgtctgtttcgtgcaggtcgcagagacctcttgcgcgacctgcttcacttagacccgcgttttttagagcgccacctagcgggcacaatgagttatttcagcccttatcagctcactgttctccacgtagacggggagctgtgtgcgagggatattaggtctttgatatttttaagcaaggacactatagggtctcgcagcacaccacagacattcttacactgggtgtactgtatggaaaacttagacctactgggtcccactgacgtggatgccctaatgtcaatgcttagatctttgtcaagagtagacctacagcgccaagtgcaaaccctaatgggccttcacctttccggcccatcacactcccaacactatcgccatacaccactcgagaccgatttctacgactacaaggacgacgatgacaagactagtggctccggcgagggcagaggaagtctactaacctgcggagatgtggaagaaaatcctggcccacatatgaccgagtacaagcccacggtgcgcctcgccacccgcgacgacgtccccagggccgtacgcaccctcgccgccgcgttcgccgactaccccgccacgcgccacaccgtcgatccggaccgccacatcgagcgggtcaccgagctgcaagaactcttcctcacgcgcgtcgggctcgacatcggcaaggtgtgggtcgcggacgacggcgccgcggtggcggtctggaccacgccggagagcgtcgaagcgggggcggtgttcgccgagatcggcccgcgcatggccgagttgagcggttcccggctggccgcgcagcaacagatggaaggcctcctggcgccgcaccggcccaaggagcccgcgtggttcctggccaccgtcggcgtctcgcccgaccaccagggcaagggtctgggcagcgccgtcgtgctccccggagtggaggcggccgagcgcgccggggtgcccgccttcctggagacctccgcgccccgcaacctccccttctacgagcggctcggcttcaccgtcaccgccgacgtcgaggtgcccgaaggaccgcgcacctggtgcatgacccgcaagcccggtgcctga

SEQ ID NO: 1166 - DNA, 2754 bp, Artificial Sequence
  Synthetic Polynucleotides
atggccttaccagtgaccgccttgctcctgccgctggccttgctgctccacgccgccaggccggacatcgtgatgacccagagccccgatagcctggccgtgtctctgggagagagagccaccatcaactgccgggccagcaagagcgtgtccaccagcggctacagctacatgcactggtatcagcagaagcccggccagccccccaagctgctgatctacctggcctccaacctggaaagcggcgtgcccgatagattcagcggcagcggctctggcaccgacttcaccctgaccatcagttctcttcaggccgaggacgtggccgtgtactactgccagcacagcagagagctgccctacaccttcggccagggcaccaagctggaaatcaagggcggaggcggaagtggaggcggaggatctggcggcggaggctctcaggtgcaactccaggaatctggccctggccttgtgaagcccagcgagacactgagcctgacctgtaccgtgtccggcggcagcatcagctcttacggcgtgcactggattcggcagcctccaggcaagggcctggaatggatcggcgtgatctggacctccggcgtgaccgactacaacagcgccctgatgggcagagtgaccatctccgtggacaccagcaagaaccagttcagcctgaagctgagcagcgtgacagccgccgataccgccgtgtattattgcgccagagatggcgactacgaccgctacacaatggactactggggccagggaacccttgtgaccgtgtcctctacgcgtgagcagaaactgatctcggaagaggatctggcgaagcccaccacgacgccagcgccgcgaccaccaacaccggcgcccaccatcgcgtcgcagcccctgtccctgcgcccagaggcgtgccggccagcggcggggggcgcagtgcacacgagggggctggacttcgcctgtgacatctacatctgggcgcccttggccgggacttgtggggtccttctcctgtcactggttatcaccctttactgcgggcgcgccagagtgaagttcagcaggagcgcagacgcccccgcgtaccagcagggccagaaccagctctataacgagctgaatctaggacgaagagaggagtacgatgttttggacaagagacgtggccgggaccctgagatggggggaaagccgagaaggaagaaccctcaggaaggcctgtacaatgaactgcagaaagataagatggcggaggcctacagtgagattgggatgaaaggcgagcgccggaggggcaaggggcacgatggcctttaccagggtctcagtacagccaccaaggacacctacgacgcccttcacatgcaggccctgccccctcgctctagaggatctggagcaacaaacttctcactactcaaacaagcaggtgacgtggaggagaatcccgggcctgggatccacatggccacttacgaggttctctgtgaggtggcgcggaaactgggcacggatgacagggaagtggtattgttcctcctaaacgtgttcatacctcaacccacactggcccaattaattggagctcttagagctttaaaggaggagggcaggttaacgtttcccctgttagcggaatgtctgtttcgtgcaggtcgcagagacctcttgcgcgacctgcttcacttagacccgcgttttttagagcgccacctagcgggcacaatgagttatttcagcccttatcagctcactgttctccacgtagacggggagctgtgtgcgagggatattaggtctttgatatttttaagcaaggacactatagggtctcgcagcacaccacagacattcttacactgggtgtactgtatggaaaacttagacctactgggtcccactgacgtggatgccctaatgtcaatgcttagatctttgtcaagagtagacctacagcgccaagtgcaaaccctaatgggccttcacctttccggcccatcacactcccaacactatcgccatacaccactcgagaccgatttctacgactacaaggacgacgatgacaagactagtggctccggcgagggcagaggaagtctactaacctgcggagatgtggaagaaaatcctggcccacatatgaccgagtacaagcccacggtgcgcctcgccacccgcgacgacgtccccagggccgtacgcaccctcgccgccgcgttcgccgactaccccgccacgcgccacaccgtcgatccggaccgccacatcgagcgggtcaccgagctgcaagaactcttcctcacgcgcgtcgggctcgacatcggcaaggtgtgggtcgcggacgacggcgccgcggtggcggtctggaccacgccggagagcgtcgaagcgggggcggtgttcgccgagatcggcccgcgcatggccgagttgagcggttcccggctggccgcgcagcaacagatggaaggcctcctggcgccgcaccggcccaaggagcccgcgtggttcctggccaccgtcggcgtctcgcccgaccaccagggcaagggtctgggcagcgccgtcgtgctccccggagtggaggcggccgagcgcgccggggtgcccgccttcctggagacctccgcgccccgcaacctccccttctacgagcggctcggcttcaccgtcaccgccgacgtcgaggtgcccgaaggaccgcgcacctggtgcatgacccgcaagcccggtgcctga

SEQ ID NO: 1167 - DNA, 2691 bp, Artificial Sequence
  Synthetic Polynucleotides
atgacagccctgttcctgatgtccatgctgttcggcctggcctgcggacaggccatgtctttctgtatccccaccgagtacaccatgcacatcgagagaagagagtgcgcctactgcctgaccatcaacaccacaatctgcgccggctactgcatgacacgggatattaacggcaagctgttcctgcctaagtacgccctgagccaggacgtgtgcacctaccgggacttcatctaccggaccgtggaaatccctggctgccctctgcatgtggccccttactttagctaccccgtggctctgagctgcaagtgcggcaagtgcaacaccgactacagcgactgtatccacgaggccatcaagaccaactactgcaccaagcctcagaaaagctacctcgtgggcttctctgttggcggaggcggaagtggaggcggaggatctggcggcggaggctctgctcctgatgtgcaggattgccctgagtgcaccctgcaagagaaccccttcttctcccaacctggcgctcctatcctccagtgcatgggctgctgcttcagccgggcttatcccacacctctgcggagcaagaaaaccatgctggtccagaaaaacgtgaccagcgagagcacctgttgtgtggctaagagctacaacagagtgaccgtgatgggcggcttcaaggtggaaaatcacaccgcctgccactgctccacctgttactaccacaagagcacgcgtgagcagaaactgatctcggaagaggatctggcgaagcccaccacgacgccagcgccgcgaccaccaacaccggcgcccaccatcgcgtcgcagcccctgtccctgcgcccagaggcgtgccggccagcggcggggggcgcagtgcacacgagggggctggacttcgcctgtgacatctacatctgggcgcccttggccgggacttgtggggtccttctcctgtcactggttatcaccctttactgcgggcgcgccagagtgaagttcagcaggagcgcagacgcccccgcgtaccagcagggccagaaccagctctataacgagctgaatctaggacgaagagaggagtacgatgttttggacaagagacgtggccgggaccctgagatggggggaaagccgagaaggaagaaccctcaggaaggcctgtacaatgaactgcagaaagataagatggcggaggcctacagtgagattgggatgaaaggcgagcgccggaggggcaaggggcacgatggcctttaccagggtctcagtacagccaccaaggacacctacgacgcccttcacatgcaggccctgccccctcgctctagaggatctggagcaacaaacttctcactactcaaacaagcaggtgacgtggaggagaatcccgggcctgggatccacatggccacttacgaggttctctgtgaggtggcgcggaaactgggcacggatgacagggaagtggtattgttcctcctaaacgtgttcatacctcaacccacactggcccaattaattggagctcttagagctttaaaggaggagggcaggttaacgtttcccctgttagcggaatgtctgtttcgtgcaggtcgcagagacctcttgcgcgacctgcttcacttagacccgcgttttttagagcgccacctagcgggcacaatgagttatttcagcccttatcagctcactgttctccacgtagacggggagctgtgtgcgagggatattaggtctttgatatttttaagcaaggacactatagggtctcgcagcacaccacagacattcttacactgggtgtactgtatggaaaacttagacctactgggtcccactgacgtggatgccctaatgtcaatgcttagatctttgtcaagagtagacctacagcgccaagtgcaaaccctaatgggccttcacctttccggcccatcacactcccaacactatcgccatacaccactcgagaccgatttctacgactacaaggacgacgatgacaagactagtggctccggcgagggcagaggaagtctactaacctgcggagatgtggaagaaaatcctggcccacatatgaccgagtacaagcccacggtgcgcctcgccacccgcgacgacgtccccagggccgtacgcaccctcgccgccgcgttcgccgactaccccgccacgcgccacaccgtcgatccggaccgccacatcgagcgggtcaccgagctgcaagaactcttcctcacgcgcgtcgggctcgacatcggcaaggtgtgggtcgcggacgacggcgccgcggtggcggtctggaccacgccggagagcgtcgaagcgggggcggtgttcgccgagatcggcccgcgcatggccgagttgagcggttcccggctggccgcgcagcaacagatggaaggcctcctggcgccgcaccggcccaaggagcccgcgtggttcctggccaccgtcggcgtctcgcccgaccaccagggcaagggtctgggcagcgccgtcgtgctccccggagtggaggcggccgagcgcgccggggtgcccgccttcctggagacctccgcgccccgcaacctccccttctacgagcggctcggcttcaccgtcaccgccgacgtcgaggtgcccgaaggaccgcgcacctggtgcatgacccgcaagcccggtgcctga

SEQ ID NO: 1168 - DNA, 2742 bp, Artificial Sequence
  Synthetic Polynucleotides
atggccttaccagtgaccgccttgctcctgccgctggccttgctgctccacgccgccaggccgcagagcgtgctgacacagcctcctagcgtgtccgtgtctcctggccagaccgccagcatcacctgtagcggcgataagctgggcgataagtacgcctgctggtatcagcagaagcccggccagtctcccgtgctcgtgatctaccaggacagcaagaggcccagcggcatccccgagagattcagcggcagcaacagcggcaataccgccaccctgaccatcagcggcacccaggctatggacgaggccgactactactgccaggcttgggatagcagcaccgccgtggtgtttggcggaggcaccaagctgacagtgctgggcggaggcggaagtggaggcggaggatctggcggcggaggctctcaggtgcagctggtgcagtctggggccgaagtgaagaagcctggacagagcctgaagatcagctgcaaggccagcggctacagcctgaccgacaactggattggctgggtgcgccagaagccaggcaagggcctggaatggatgggcatcatctaccccggcgacagcgacaccagatacagccctagcttccagggccaagtgaccatctccgccgacaagagcatcaacaccgcctacctccagtggtccagcctgaaagcctccgacaccgccatctactactgtgtgggactggactggaactacaaccccctgcggtactggggacctggcacactcgtgaccgtgtcctctacgcgtgagcagaaactgatctcggaagaggatctggcgaagcccaccacgacgccagcgccgcgaccaccaacaccggcgcccaccatcgcgtcgcagcccctgtccctgcgcccagaggcgtgccggccagcggcggggggcgcagtgcacacgagggggctggacttcgcctgtgacatctacatctgggcgcccttggccgggacttgtggggtccttctcctgtcactggttatcaccctttactgcgggcgcgccagagtgaagttcagcaggagcgcagacgcccccgcgtaccagcagggccagaaccagctctataacgagctgaatctaggacgaagagaggagtacgatgttttggacaagagacgtggccgggaccctgagatggggggaaagccgagaaggaagaaccctcaggaaggcctgtacaatgaactgcagaaagataagatggcggaggcctacagtgagattgggatgaaaggcgagcgccggaggggcaaggggcacgatggcctttaccagggtctcagtacagccaccaaggacacctacgacgcccttcacatgcaggccctgccccctcgctctagaggatctggagcaacaaacttctcactactcaaacaagcaggtgacgtggaggagaatcccgggcctgggatccacatggccacttacgaggttctctgtgaggtggcgcggaaactgggcacggatgacagggaagtggtattgttcctcctaaacgtgttcatacctcaacccacactggcccaattaattggagctcttagagctttaaaggaggagggcaggttaacgtttcccctgttagcggaatgtctgtttcgtgcaggtcgcagagacctcttgcgcgacctgcttcacttagacccgcgttttttagagcgccacctagcgggcacaatgagttatttcagcccttatcagctcactgttctccacgtagacggggagctgtgtgcgagggatattaggtctttgatatttttaagcaaggacactatagggtctcgcagcacaccacagacattcttacactgggtgtactgtatggaaaacttagacctactgggtcccactgacgtggatgccctaatgtcaatgcttagatctttgtcaagagtagacctacagcgccaagtgcaaaccctaatgggccttcacctttccggcccatcacactcccaacactatcgccatacaccactcgagaccgatttctacgactacaaggacgacgatgacaagactagtggctccggcgagggcagaggaagtctactaacctgcggagatgtggaagaaaatcctggcccacatatgaccgagtacaagcccacggtgcgcctcgccacccgcgacgacgtccccagggccgtacgcaccctcgccgccgcgttcgccgactaccccgccacgcgccacaccgtcgatccggaccgccacatcgagcgggtcaccgagctgcaagaactcttcctcacgcgcgtcgggctcgacatcggcaaggtgtgggtcgcggacgacggcgccgcggtggcggtctggaccacgccggagagcgtcgaagcgggggcggtgttcgccgagatcggcccgcgcatggccgagttgagcggttcccggctggccgcgcagcaacagatggaaggcctcctggcgccgcaccggcccaaggagcccgcgtggttcctggccaccgtcggcgtctcgcccgaccaccagggcaagggtctgggcagcgccgtcgtgctccccggagtggaggcggccgagcgcgccggggtgcccgccttcctggagacctccgcgccccgcaacctccccttctacgagcggctcggcttcaccgtcaccgccgacgtcgaggtgcccgaaggaccgcgcacctggtgcatgacccgcaagcccggtgcctga

SEQ ID NO: 1169 - DNA, 2736 bp, Artificial Sequence
  Synthetic Polynucleotides
atggccttaccagtgaccgccttgctcctgccgctggccttgctgctccacgccgccaggccggacatcgtgatgacccagagccagaaattcatgagcaccagcgtgggcgaccgggtgtccatcatctgcaaggccagccagaacgtgggcaccttcgtggcctggtatcagcagaagcctggccagagccccaagctgctggtgtacagcgccagcaacagatacaccggcgtgcccgatagattcaccggcagcggctctggcaccgacttcaccctgaccatcaacaacatgcagagcgaggacctggccgactacttctgtcggcagtacagcagctacccctacaccttcggcggaggcaccaagctggaaatcaagggcggaggcggaagtggaggcggaggatctggcggcggaggctctgaagtgcaactccagcagagcggccctgagcttgtgaagccaggggccagcatgaagattagctgcaaagccagcggctacagcttcagcgcctacaccatgaactgggtcaagcagagccacggcaagaacctggaatggatcggcctgattaacccctacaacggcggcaccaactacaaccaggaatttgagggcaaggccaccctgacagtgaacaagagcagcaacaccgccttcatggaactgctgagcctgaccagcgacgacagcgccgtgtactactgcgccagacgggactgggactacttcgactattggggccagggcaccacactgaccgtgtcctctacgcgtgagcagaaactgatctcggaagaggatctggcgaagcccaccacgacgccagcgccgcgaccaccaacaccggcgcccaccatcgcgtcgcagcccctgtccctgcgcccagaggcgtgccggccagcggcggggggcgcagtgcacacgagggggctggacttcgcctgtgacatctacatctgggcgcccttggccgggacttgtggggtccttctcctgtcactggttatcaccctttactgcgggcgcgccagagtgaagttcagcaggagcgcagacgcccccgcgtaccagcagggccagaaccagctctataacgagctgaatctaggacgaagagaggagtacgatgttttggacaagagacgtggccgggaccctgagatggggggaaagccgagaaggaagaaccctcaggaaggcctgtacaatgaactgcagaaagataagatggcggaggcctacagtgagattgggatgaaaggcgagcgccggaggggcaaggggcacgatggcctttaccagggtctcagtacagccaccaaggacacctacgacgcccttcacatgcaggccctgccccctcgctctagaggatctggagcaacaaacttctcactactcaaacaagcaggtgacgtggaggagaatcccgggcctgggatccacatggccacttacgaggttctctgtgaggtggcgcggaaactgggcacggatgacagggaagtggtattgttcctcctaaacgtgttcatacctcaacccacactggcccaattaattggagctcttagagctttaaaggaggagggcaggttaacgtttcccctgttagcggaatgtctgtttcgtgcaggtcgcagagacctcttgcgcgacctgcttcacttagacccgcgttttttagagcgccacctagcgggcacaatgagttatttcagcccttatcagctcactgttctccacgtagacggggagctgtgtgcgagggatattaggtctttgatatttttaagcaaggacactatagggtctcgcagcacaccacagacattcttacactgggtgtactgtatggaaaacttagacctactgggtcccactgacgtggatgccctaatgtcaatgcttagatctttgtcaagagtagacctacagcgccaagtgcaaaccctaatgggccttcacctttccggcccatcacactcccaacactatcgccatacaccactcgagaccgatttctacgactacaaggacgacgatgacaagactagtggctccggcgagggcagaggaagtctactaacctgcggagatgtggaagaaaatcctggcccacatatgaccgagtacaagcccacggtgcgcctcgccacccgcgacgacgtccccagggccgtacgcaccctcgccgccgcgttcgccgactaccccgccacgcgccacaccgtcgatccggaccgccacatcgagcgggtcaccgagctgcaagaactcttcctcacgcgcgtcgggctcgacatcggcaaggtgtgggtcgcggacgacggcgccgcggtggcggtctggaccacgccggagagcgtcgaagcgggggcggtgttcgccgagatcggcccgcgcatggccgagttgagcggttcccggctggccgcgcagcaacagatggaaggcctcctggcgccgcaccggcccaaggagcccgcgtggttcctggccaccgtcggcgtctcgcccgaccaccagggcaagggtctgggcagcgccgtcgtgctccccggagtggaggcggccgagcgcgccggggtgcccgccttcctggagacctccgcgccccgcaacctccccttctacgagcggctcggcttcaccgtcaccgccgacgtcgaggtgcccgaaggaccgcgcacctggtgcatgacccgcaagcccggtgcctga

SEQ ID NO: 1170 - DNA, 2769 bp, Artificial Sequence
  Synthetic Polynucleotides
atggccttaccagtgaccgccttgctcctgccgctggccttgctgctccacgccgccaggccggccatccagatgacccagagccctagcagcctgagcgccagcgtgggcgacagagtgaccatcacctgtagagccagccagagcatcagcaactacctgaactggtatcagcagaagcccggcaaggcccccaagctgctgatctatgccgccagctctctccagagcggcgtgcccagcagattttctggcagcggctccggcaccgacttcaccctgacaatcagcagcctccagcccgaggacttcgccacctactactgccagcagagctacagcagcccctccaccacctttggacagggcaccaagctggaaatcaagagaggcggaggcggaagtggaggcggaggatctggcggcggaggctctgaagtgcagctggtggaatctggcggcggactgattcagcctggcggctctctgagactgagctgtgccgcctctggcttcaccgtgtcctccaactacatgagctgggtgcgccaggcccctggcaagggactggaatgggtgtccgtgacatacagcggcggcagcaccagctacgccgatagcgtgaagggccggttcaccatcagccgggacaacagcaagaacaccctgtacctccagatgaacagcctgcgggccgaggacaccgccgtgtactattgtgccaggggaggccggtactgctccagcatcagctgctatgccagaagcggctgcgactactggggccagggaacactcgtgaccgtgtccagtacgcgtgagcagaaactgatctcggaagaggatctggcgaagcccaccacgacgccagcgccgcgaccaccaacaccggcgcccaccatcgcgtcgcagcccctgtccctgcgcccagaggcgtgccggccagcggcggggggcgcagtgcacacgagggggctggacttcgcctgtgacatctacatctgggcgcccttggccgggacttgtggggtccttctcctgtcactggttatcaccctttactgcgggcgcgccagagtgaagttcagcaggagcgcagacgcccccgcgtaccagcagggccagaaccagctctataacgagctgaatctaggacgaagagaggagtacgatgttttggacaagagacgtggccgggaccctgagatggggggaaagccgagaaggaagaaccctcaggaaggcctgtacaatgaactgcagaaagataagatggcggaggcctacagtgagattgggatgaaaggcgagcgccggaggggcaaggggcacgatggcctttaccagggtctcagtacagccaccaaggacacctacgacgcccttcacatgcaggccctgccccctcgctctagaggatctggagcaacaaacttctcactactcaaacaagcaggtgacgtggaggagaatcccgggcctgggatccacatggccacttacgaggttctctgtgaggtggcgcggaaactgggcacggatgacagggaagtggtattgttcctcctaaacgtgttcatacctcaacccacactggcccaattaattggagctcttagagctttaaaggaggagggcaggttaacgtttcccctgttagcggaatgtctgtttcgtgcaggtcgcagagacctcttgcgcgacctgcttcacttagacccgcgttttttagagcgccacctagcgggcacaatgagttatttcagcccttatcagctcactgttctccacgtagacggggagctgtgtgcgagggatattaggtctttgatatttttaagcaaggacactatagggtctcgcagcacaccacagacattcttacactgggtgtactgtatggaaaacttagacctactgggtcccactgacgtggatgccctaatgtcaatgcttagatctttgtcaagagtagacctacagcgccaagtgcaaaccctaatgggccttcacctttccggcccatcacactcccaacactatcgccatacaccactcgagaccgatttctacgactacaaggacgacgatgacaagactagtggctccggcgagggcagaggaagtctactaacctgcggagatgtggaagaaaatcctggcccacatatgaccgagtacaagcccacggtgcgcctcgccacccgcgacgacgtccccagggccgtacgcaccctcgccgccgcgttcgccgactaccccgccacgcgccacaccgtcgatccggaccgccacatcgagcgggtcaccgagctgcaagaactcttcctcacgcgcgtcgggctcgacatcggcaaggtgtgggtcgcggacgacggcgccgcggtggcggtctggaccacgccggagagcgtcgaagcgggggcggtgttcgccgagatcggcccgcgcatggccgagttgagcggttcccggctggccgcgcagcaacagatggaaggcctcctggcgccgcaccggcccaaggagcccgcgtggttcctggccaccgtcggcgtctcgcccgaccaccagggcaagggtctgggcagcgccgtcgtgctccccggagtggaggcggccgagcgcgccggggtgcccgccttcctggagacctccgcgccccgcaacctccccttctacgagcggctcggcttcaccgtcaccgccgacgtcgaggtgcccgaaggaccgcgcacctggtgcatgacccgcaagcccggtgcctga

SEQ ID NO: 1171 - DNA, 2754 bp, Artificial Sequence
  Synthetic Polynucleotides
atggccttaccagtgaccgccttgctcctgccgctggccttgctgctccacgccgccaggccggacatccagatgacccagagccccagcagcctgtctgccagcgtgggcgacagagtgaccatcacctgtagagccagccagagcatcggcaccagcctgcactggtatcagcagaagcctggcaaggcccccaagctgctgattaagttcgccagcagactgcagagcggcgtgcccagcagattttctggcagcggctccggcaccgacttcaccctgacaatcagctccctgcagcccgaggacttcgccacctactactgccagcagagccccggcttccctccaacctttggacagggcaccaagctggaaatcaagcggggcggaggcggaagtggaggcggaggatctggcggcggaggctctcaggtgcaactggtggaatctggcggcggacttgtgaagccaggcggcagcctgagactgagctgtgccgccagcggcttcagcatcaccaccagcggctactactggacctggatcagacagttccccggcaagggcctggaatggatgggctacatcggctacaacagcaagacctactacaaccccgccctgaagtcccggatcaccatcagcagagacaacgccaagaacagcctgtacctgcagatgaactccctgagagccgaggataccgccgtgtactactgcgccagatccctgtacggcggctacaaggacgccttcgatagctggggccagggaacccttgtgaccgtgtctagcacgcgtgagcagaaactgatctcggaagaggatctggcgaagcccaccacgacgccagcgccgcgaccaccaacaccggcgcccaccatcgcgtcgcagcccctgtccctgcgcccagaggcgtgccggccagcggcggggggcgcagtgcacacgagggggctggacttcgcctgtgacatctacatctgggcgcccttggccgggacttgtggggtccttctcctgtcactggttatcaccctttactgcgggcgcgccagagtgaagttcagcaggagcgcagacgcccccgcgtaccagcagggccagaaccagctctataacgagctgaatctaggacgaagagaggagtacgatgttttggacaagagacgtggccgggaccctgagatggggggaaagccgagaaggaagaaccctcaggaaggcctgtacaatgaactgcagaaagataagatggcggaggcctacagtgagattgggatgaaaggcgagcgccggaggggcaaggggcacgatggcctttaccagggtctcagtacagccaccaaggacacctacgacgcccttcacatgcaggccctgccccctcgctctagaggatctggagcaacaaacttctcactactcaaacaagcaggtgacgtggaggagaatcccgggcctgggatccacatggccacttacgaggttctctgtgaggtggcgcggaaactgggcacggatgacagggaagtggtattgttcctcctaaacgtgttcatacctcaacccacactggcccaattaattggagctcttagagctttaaaggaggagggcaggttaacgtttcccctgttagcggaatgtctgtttcgtgcaggtcgcagagacctcttgcgcgacctgcttcacttagacccgcgttttttagagcgccacctagcgggcacaatgagttatttcagcccttatcagctcactgttctccacgtagacggggagctgtgtgcgagggatattaggtctttgatatttttaagcaaggacactatagggtctcgcagcacaccacagacattcttacactgggtgtactgtatggaaaacttagacctactgggtcccactgacgtggatgccctaatgtcaatgcttagatctttgtcaagagtagacctacagcgccaagtgcaaaccctaatgggccttcacctttccggcccatcacactcccaacactatcgccatacaccactcgagaccgatttctacgactacaaggacgacgatgacaagactagtggctccggcgagggcagaggaagtctactaacctgcggagatgtggaagaaaatcctggcccacatatgaccgagtacaagcccacggtgcgcctcgccacccgcgacgacgtccccagggccgtacgcaccctcgccgccgcgttcgccgactaccccgccacgcgccacaccgtcgatccggaccgccacatcgagcgggtcaccgagctgcaagaactcttcctcacgcgcgtcgggctcgacatcggcaaggtgtgggtcgcggacgacggcgccgcggtggcggtctggaccacgccggagagcgtcgaagcgggggcggtgttcgccgagatcggcccgcgcatggccgagttgagcggttcccggctggccgcgcagcaacagatggaaggcctcctggcgccgcaccggcccaaggagcccgcgtggttcctggccaccgtcggcgtctcgcccgaccaccagggcaagggtctgggcagcgccgtcgtgctccccggagtggaggcggccgagcgcgccggggtgcccgccttcctggagacctccgcgccccgcaacctccccttctacgagcggctcggcttcaccgtcaccgccgacgtcgaggtgcccgaaggaccgcgcacctggtgcatgacccgcaagcccggtgcctga

SEQ ID NO: 1172 - DNA, 2769 bp, Artificial Sequence
  Synthetic Polynucleotides
atggccttaccagtgaccgccttgctcctgccgctggccttgctgctccacgccgccaggccggacgagatcgtgctgacccagagccctctgagcctgcctgtgacacctggcgagcctgccagcatctcctgtagaagcagccagagcctgctgcacagcatcggctacaactacctggactggtatctccagaagcccggccagagcccccaactgctgatctacctgggcagcaacagagccagcggcgtgcccgatagattttccggcagcggctccggcaccgacttcaccctgaagatcagccgggtggaagccgaggacgtgggcgtgtactactgtatgcaggccctccagacccccctgacctttggcggaggcaccaaggtggaaatcaagcggggcggaggcggaagtggaggcggaggatctggcggcggaggctctgaagtgcaactggtggaaagcggaggcggcgtggtgcagcctggaagaagcctgagactgagctgtgccgccagcggcttcaccttccggtcctacggaatgcactgggtgcgccaggcccctggcaaaggactggaatgggtggccgtgatctcctacgacggctccaacaagtactacaccgacagcgtgaacggcagattcaccatcagcagagacaacagcaagaacaccctgtacctccagatgaacagcctgcgggccgaggacaccgccgtgtactattgtgctagaggcggaggctactacgagacaagcggccctgattactggggccagggcacactcgtgaccgtgtctagtacgcgtgagcagaaactgatctcggaagaggatctggcgaagcccaccacgacgccagcgccgcgaccaccaacaccggcgcccaccatcgcgtcgcagcccctgtccctgcgcccagaggcgtgccggccagcggcggggggcgcagtgcacacgagggggctggacttcgcctgtgacatctacatctgggcgcccttggccgggacttgtggggtccttctcctgtcactggttatcaccctttactgcgggcgcgccagagtgaagttcagcaggagcgcagacgcccccgcgtaccagcagggccagaaccagctctataacgagctgaatctaggacgaagagaggagtacgatgttttggacaagagacgtggccgggaccctgagatggggggaaagccgagaaggaagaaccctcaggaaggcctgtacaatgaactgcagaaagataagatggcggaggcctacagtgagattgggatgaaaggcgagcgccggaggggcaaggggcacgatggcctttaccagggtctcagtacagccaccaaggacacctacgacgcccttcacatgcaggccctgccccctcgctctagaggatctggagcaacaaacttctcactactcaaacaagcaggtgacgtggaggagaatcccgggcctgggatccacatggccacttacgaggttctctgtgaggtggcgcggaaactgggcacggatgacagggaagtggtattgttcctcctaaacgtgttcatacctcaacccacactggcccaattaattggagctcttagagctttaaaggaggagggcaggttaacgtttcccctgttagcggaatgtctgtttcgtgcaggtcgcagagacctcttgcgcgacctgcttcacttagacccgcgttttttagagcgccacctagcgggcacaatgagttatttcagcccttatcagctcactgttctccacgtagacggggagctgtgtgcgagggatattaggtctttgatatttttaagcaaggacactatagggtctcgcagcacaccacagacattcttacactgggtgtactgtatggaaaacttagacctactgggtcccactgacgtggatgccctaatgtcaatgcttagatctttgtcaagagtagacctacagcgccaagtgcaaaccctaatgggccttcacctttccggcccatcacactcccaacactatcgccatacaccactcgagaccgatttctacgactacaaggacgacgatgacaagactagtggctccggcgagggcagaggaagtctactaacctgcggagatgtggaagaaaatcctggcccacatatgaccgagtacaagcccacggtgcgcctcgccacccgcgacgacgtccccagggccgtacgcaccctcgccgccgcgttcgccgactaccccgccacgcgccacaccgtcgatccggaccgccacatcgagcgggtcaccgagctgcaagaactcttcctcacgcgcgtcgggctcgacatcggcaaggtgtgggtcgcggacgacggcgccgcggtggcggtctggaccacgccggagagcgtcgaagcgggggcggtgttcgccgagatcggcccgcgcatggccgagttgagcggttcccggctggccgcgcagcaacagatggaaggcctcctggcgccgcaccggcccaaggagcccgcgtggttcctggccaccgtcggcgtctcgcccgaccaccagggcaagggtctgggcagcgccgtcgtgctccccggagtggaggcggccgagcgcgccggggtgcccgccttcctggagacctccgcgccccgcaacctccccttctacgagcggctcggcttcaccgtcaccgccgacgtcgaggtgcccgaaggaccgcgcacctggtgcatgacccgcaagcccggtgcctga

SEQ ID NO: 1173 - DNA, 2763 bp, Artificial Sequence
  Synthetic Polynucleotides
atggccttaccagtgaccgccttgctcctgccgctggccttgctgctccacgccgccaggccggacgacgtcgtgatgacccagagccctctgagcctgcctgtgacacctggcgagcctgccagcatctcctgtagaagcagccagagcctgctgcacagcatcggctacaactacctgcactggtttctccagaagcccggccagagcccccaactgctgatctacctgggcagcaacagagccagcggcgtgcccgatagattttccggcagcggctccggcaccgacttcaccctgaagatcagccgggtggaagccgaggacgtgggcgtgtactactgtatgcaggccctccagacccctcccacctttggacagggcaccagactggaaatcaagcggggcggaggcggaagtggaggcggaggatctggcggcggaggctctcaactccaactccaggaaagcggccctggcctcgtgaagcctagcggcacactgagcctgacatgtgccgtgtctggcggcagcatcagcagcagcaactggtggtcttgggtgcgccagcctcctggcaagggcctggaatggatcggcgaaatctaccacagcggcagcaccaactacaaccccagcctgaagtccagagtgaccatcagcgtggacaagagcaagaaccagttctccctgaagctgagcagcgtgacagccgccgataccgccgtgtactattgcgtgggcagcccctacggcgactacgtgctggattattggggccagggcaccctcgtgaccgtgtctagtacgcgtgagcagaaactgatctcggaagaggatctggcgaagcccaccacgacgccagcgccgcgaccaccaacaccggcgcccaccatcgcgtcgcagcccctgtccctgcgcccagaggcgtgccggccagcggcggggggcgcagtgcacacgagggggctggacttcgcctgtgacatctacatctgggcgcccttggccgggacttgtggggtccttctcctgtcactggttatcaccctttactgcgggcgcgccagagtgaagttcagcaggagcgcagacgcccccgcgtaccagcagggccagaaccagctctataacgagctgaatctaggacgaagagaggagtacgatgttttggacaagagacgtggccgggaccctgagatggggggaaagccgagaaggaagaaccctcaggaaggcctgtacaatgaactgcagaaagataagatggcggaggcctacagtgagattgggatgaaaggcgagcgccggaggggcaaggggcacgatggcctttaccagggtctcagtacagccaccaaggacacctacgacgcccttcacatgcaggccctgccccctcgctctagaggatctggagcaacaaacttctcactactcaaacaagcaggtgacgtggaggagaatcccgggcctgggatccacatggccacttacgaggttctctgtgaggtggcgcggaaactgggcacggatgacagggaagtggtattgttcctcctaaacgtgttcatacctcaacccacactggcccaattaattggagctcttagagctttaaaggaggagggcaggttaacgtttcccctgttagcggaatgtctgtttcgtgcaggtcgcagagacctcttgcgcgacctgcttcacttagacccgcgttttttagagcgccacctagcgggcacaatgagttatttcagcccttatcagctcactgttctccacgtagacggggagctgtgtgcgagggatattaggtctttgatatttttaagcaaggacactatagggtctcgcagcacaccacagacattcttacactgggtgtactgtatggaaaacttagacctactgggtcccactgacgtggatgccctaatgtcaatgcttagatctttgtcaagagtagacctacagcgccaagtgcaaaccctaatgggccttcacctttccggcccatcacactcccaacactatcgccatacaccactcgagaccgatttctacgactacaaggacgacgatgacaagactagtggctccggcgagggcagaggaagtctactaacctgcggagatgtggaagaaaatcctggcccacatatgaccgagtacaagcccacggtgcgcctcgccacccgcgacgacgtccccagggccgtacgcaccctcgccgccgcgttcgccgactaccccgccacgcgccacaccgtcgatccggaccgccacatcgagcgggtcaccgagctgcaagaactcttcctcacgcgcgtcgggctcgacatcggcaaggtgtgggtcgcggacgacggcgccgcggtggcggtctggaccacgccggagagcgtcgaagcgggggcggtgttcgccgagatcggcccgcgcatggccgagttgagcggttcccggctggccgcgcagcaacagatggaaggcctcctggcgccgcaccggcccaaggagcccgcgtggttcctggccaccgtcggcgtctcgcccgaccaccagggcaagggtctgggcagcgccgtcgtgctccccggagtggaggcggccgagcgcgccggggtgcccgccttcctggagacctccgcgccccgcaacctccccttctacgagcggctcggcttcaccgtcaccgccgacgtcgaggtgcccgaaggaccgcgcacctggtgcatgacccgcaagcccggtgcctga

SEQ ID NO: 1174 - DNA, 2772 bp, Artificial Sequence
  Synthetic Polynucleotides
atggccttaccagtgaccgccttgctcctgccgctggccttgctgctccacgccgccaggccggacgtcgtgatgacccagagccctctgagcctgcctgtgacacctggcgagcctgccagcatcagctgtagaagcagccagagcctgctgcacagcaacggccacaactacctggactggtatctccagaagcccggccagagcccccagctgctgatctacctgggcagcaatagagccagcggcgtgcccgatagattcagcggctctggaagcggcaccgacttcaccctgaagatcagccgggtggaagccgaggacgtgggcgtgtactactgtatgcagaccctccagacccccctgacctttggccctggcaccaaggtggacatcaagagaggcggaggcggaagtggaggcggaggatctggcggcggaggctctgaagtgcagctggtggaaacaggcggaggcgtggtgcagcctggcagaagcctgagactgagctgtgccgccagcggcttcaccttcagcagctacggaatgcactgggtgcgccaggcccctggcaaaggactggaatgggtggccgtgatctcctacgacggcagcaacaagtattacgccgacagcgtgaagggccggttcaccatctccagagacaacagcaagaacaccctgtacctccagatgaacagcctgcgggccgaggacaccgccgtgtactattgcgccaaggacagatacggctggggcagcagcttcggccacttcgattattggggccagggcaccctcgtgaccgtgtctagtacgcgtgagcagaaactgatctcggaagaggatctggcgaagcccaccacgacgccagcgccgcgaccaccaacaccggcgcccaccatcgcgtcgcagcccctgtccctgcgcccagaggcgtgccggccagcggcggggggcgcagtgcacacgagggggctggacttcgcctgtgacatctacatctgggcgcccttggccgggacttgtggggtccttctcctgtcactggttatcaccctttactgcgggcgcgccagagtgaagttcagcaggagcgcagacgcccccgcgtaccagcagggccagaaccagctctataacgagctgaatctaggacgaagagaggagtacgatgttttggacaagagacgtggccgggaccctgagatggggggaaagccgagaaggaagaaccctcaggaaggcctgtacaatgaactgcagaaagataagatggcggaggcctacagtgagattgggatgaaaggcgagcgccggaggggcaaggggcacgatggcctttaccagggtctcagtacagccaccaaggacacctacgacgcccttcacatgcaggccctgccccctcgctctagaggatctggagcaacaaacttctcactactcaaacaagcaggtgacgtggaggagaatcccgggcctgggatccacatggccacttacgaggttctctgtgaggtggcgcggaaactgggcacggatgacagggaagtggtattgttcctcctaaacgtgttcatacctcaacccacactggcccaattaattggagctcttagagctttaaaggaggagggcaggttaacgtttcccctgttagcggaatgtctgtttcgtgcaggtcgcagagacctcttgcgcgacctgcttcacttagacccgcgttttttagagcgccacctagcgggcacaatgagttatttcagcccttatcagctcactgttctccacgtagacggggagctgtgtgcgagggatattaggtctttgatatttttaagcaaggacactatagggtctcgcagcacaccacagacattcttacactgggtgtactgtatggaaaacttagacctactgggtcccactgacgtggatgccctaatgtcaatgcttagatctttgtcaagagtagacctacagcgccaagtgcaaaccctaatgggccttcacctttccggcccatcacactcccaacactatcgccatacaccactcgagaccgatttctacgactacaaggacgacgatgacaagactagtggctccggcgagggcagaggaagtctactaacctgcggagatgtggaagaaaatcctggcccacatatgaccgagtacaagcccacggtgcgcctcgccacccgcgacgacgtccccagggccgtacgcaccctcgccgccgcgttcgccgactaccccgccacgcgccacaccgtcgatccggaccgccacatcgagcgggtcaccgagctgcaagaactcttcctcacgcgcgtcgggctcgacatcggcaaggtgtgggtcgcggacgacggcgccgcggtggcggtctggaccacgccggagagcgtcgaagcgggggcggtgttcgccgagatcggcccgcgcatggccgagttgagcggttcccggctggccgcgcagcaacagatggaaggcctcctggcgccgcaccggcccaaggagcccgcgtggttcctggccaccgtcggcgtctcgcccgaccaccagggcaagggtctgggcagcgccgtcgtgctccccggagtggaggcggccgagcgcgccggggtgcccgccttcctggagacctccgcgccccgcaacctccccttctacgagcggctcggcttcaccgtcaccgccgacgtcgaggtgcccgaaggaccgcgcacctggtgcatgacccgcaagcccggtgcctga

SEQ ID NO: 1175 - DNA, 2757 bp, Artificial Sequence
  Synthetic Polynucleotides
atggccttaccagtgaccgccttgctcctgccgctggccttgctgctccacgccgccaggccggacgagatcgtgctgacacagagccctggcaccctgagcctgtctctgggagagagagccacactgagctgtcgggccagccagtctatcagcagcagcttcctggcctggtatcagcagaagcccggccaggcccctaagctgctgatctacgccgccagcacaagagccaccggcatccccgatagattcagcggctctggcagcggcaccgacttcaccctgaccatcagcagactggaacccgaggacttcgccgtgtactactgccagcagtacggcagaagcctgagcttcggcggaggcaccaaggtggaagtgaagggcggaggcggaagtggaggcggaggatctggcggcggaggctctcaggtgcaactccagcagtctggccccggactcgtgaagcctagccagacactgagcctgacctgcgccatcagcggcgatagcgtgtccggcaatagcgccacctggaactggatcagacagagcccatctcggggcctggaatggctgggccggacctactaccgcagcaagtggaaccacgactacgccgagagcgtgaagtcccggatcaccatcaaccccgacaccagcaagaaccagttctccttgcaactgaacagcgtgacccccgaggacacagccgtgtattattgcgccagaggcgacagcagctcttggtacgccttcgactattggggccagggcaccctcgtgaccgtgtctagtacgcgtgagcagaaactgatctcggaagaggatctggcgaagcccaccacgacgccagcgccgcgaccaccaacaccggcgcccaccatcgcgtcgcagcccctgtccctgcgcccagaggcgtgccggccagcggcggggggcgcagtgcacacgagggggctggacttcgcctgtgacatctacatctgggcgcccttggccgggacttgtggggtccttctcctgtcactggttatcaccctttactgcgggcgcgccagagtgaagttcagcaggagcgcagacgcccccgcgtaccagcagggccagaaccagctctataacgagctgaatctaggacgaagagaggagtacgatgttttggacaagagacgtggccgggaccctgagatggggggaaagccgagaaggaagaaccctcaggaaggcctgtacaatgaactgcagaaagataagatggcggaggcctacagtgagattgggatgaaaggcgagcgccggaggggcaaggggcacgatggcctttaccagggtctcagtacagccaccaaggacacctacgacgcccttcacatgcaggccctgccccctcgctctagaggatctggagcaacaaacttctcactactcaaacaagcaggtgacgtggaggagaatcccgggcctgggatccacatggccacttacgaggttctctgtgaggtggcgcggaaactgggcacggatgacagggaagtggtattgttcctcctaaacgtgttcatacctcaacccacactggcccaattaattggagctcttagagctttaaaggaggagggcaggttaacgtttcccctgttagcggaatgtctgtttcgtgcaggtcgcagagacctcttgcgcgacctgcttcacttagacccgcgttttttagagcgccacctagcgggcacaatgagttatttcagcccttatcagctcactgttctccacgtagacggggagctgtgtgcgagggatattaggtctttgatatttttaagcaaggacactatagggtctcgcagcacaccacagacattcttacactgggtgtactgtatggaaaacttagacctactgggtcccactgacgtggatgccctaatgtcaatgcttagatctttgtcaagagtagacctacagcgccaagtgcaaaccctaatgggccttcacctttccggcccatcacactcccaacactatcgccatacaccactcgagaccgatttctacgactacaaggacgacgatgacaagactagtggctccggcgagggcagaggaagtctactaacctgcggagatgtggaagaaaatcctggcccacatatgaccgagtacaagcccacggtgcgcctcgccacccgcgacgacgtccccagggccgtacgcaccctcgccgccgcgttcgccgactaccccgccacgcgccacaccgtcgatccggaccgccacatcgagcgggtcaccgagctgcaagaactcttcctcacgcgcgtcgggctcgacatcggcaaggtgtgggtcgcggacgacggcgccgcggtggcggtctggaccacgccggagagcgtcgaagcgggggcggtgttcgccgagatcggcccgcgcatggccgagttgagcggttcccggctggccgcgcagcaacagatggaaggcctcctggcgccgcaccggcccaaggagcccgcgtggttcctggccaccgtcggcgtctcgcccgaccaccagggcaagggtctgggcagcgccgtcgtgctccccggagtggaggcggccgagcgcgccggggtgcccgccttcctggagacctccgcgccccgcaacctccccttctacgagcggctcggcttcaccgtcaccgccgacgtcgaggtgcccgaaggaccgcgcacctggtgcatgacccgcaagcccggtgcctga

SEQ ID NO: 1176 - DNA, 2757 bp, Artificial Sequence
  Synthetic Polynucleotides
atggccttaccagtgaccgccttgctcctgccgctggccttgctgctccacgccgccaggccggaccagaccgtcgtgacacagcctcctagcgcctctggcacaccaggccagagagtgaccatctcctgtagcggcagcagcagcaacatcggcagcaactacgtgtactggtatcagcaactgcccggcaccgcccccaagctgctgatctacagaagcaaccagcggcccagcggcgtgcccgatagattttctggcagcaagagcggcaccagcgccagcctggctatctctggacctagaagcgtggacgaggccgactactactgcgccgcctgggacgatagcctgaacggcgtggtgtttggcggaggcaccaagctgacagtgctgggtggcggaggcggaagtggaggcggaggatctggcggcggaggctctcaggtgcaactggtgcagtctggggccgaagtgaagaaacccggcagctccgtgaaggtgtcctgcaaggcttccggcggcaccttcagcagctacgccatttcttgggtgcgccaggcccctggacagggcctggaatggatgggcggcatcatccccatctttggcaccgccaactacgcccagaaattccagggccgcgtgaccatcaccgccgacgagtctacaagcaccgcctacatggaactgagcagcctgcggagcgaggataccgccgtgtactactgtgccagaagaatccccccctactacggcatggacgtgtggggccagggaaccaccgtgaccgtgtcatctacgcgtgagcagaaactgatctcggaagaggatctggcgaagcccaccacgacgccagcgccgcgaccaccaacaccggcgcccaccatcgcgtcgcagcccctgtccctgcgcccagaggcgtgccggccagcggcggggggcgcagtgcacacgagggggctggacttcgcctgtgacatctacatctgggcgcccttggccgggacttgtggggtccttctcctgtcactggttatcaccctttactgcgggcgcgccagagtgaagttcagcaggagcgcagacgcccccgcgtaccagcagggccagaaccagctctataacgagctgaatctaggacgaagagaggagtacgatgttttggacaagagacgtggccgggaccctgagatggggggaaagccgagaaggaagaaccctcaggaaggcctgtacaatgaactgcagaaagataagatggcggaggcctacagtgagattgggatgaaaggcgagcgccggaggggcaaggggcacgatggcctttaccagggtctcagtacagccaccaaggacacctacgacgcccttcacatgcaggccctgccccctcgctctagaggatctggagcaacaaacttctcactactcaaacaagcaggtgacgtggaggagaatcccgggcctgggatccacatggccacttacgaggttctctgtgaggtggcgcggaaactgggcacggatgacagggaagtggtattgttcctcctaaacgtgttcatacctcaacccacactggcccaattaattggagctcttagagctttaaaggaggagggcaggttaacgtttcccctgttagcggaatgtctgtttcgtgcaggtcgcagagacctcttgcgcgacctgcttcacttagacccgcgttttttagagcgccacctagcgggcacaatgagttatttcagcccttatcagctcactgttctccacgtagacggggagctgtgtgcgagggatattaggtctttgatatttttaagcaaggacactatagggtctcgcagcacaccacagacattcttacactgggtgtactgtatggaaaacttagacctactgggtcccactgacgtggatgccctaatgtcaatgcttagatctttgtcaagagtagacctacagcgccaagtgcaaaccctaatgggccttcacctttccggcccatcacactcccaacactatcgccatacaccactcgagaccgatttctacgactacaaggacgacgatgacaagactagtggctccggcgagggcagaggaagtctactaacctgcggagatgtggaagaaaatcctggcccacatatgaccgagtacaagcccacggtgcgcctcgccacccgcgacgacgtccccagggccgtacgcaccctcgccgccgcgttcgccgactaccccgccacgcgccacaccgtcgatccggaccgccacatcgagcgggtcaccgagctgcaagaactcttcctcacgcgcgtcgggctcgacatcggcaaggtgtgggtcgcggacgacggcgccgcggtggcggtctggaccacgccggagagcgtcgaagcgggggcggtgttcgccgagatcggcccgcgcatggccgagttgagcggttcccggctggccgcgcagcaacagatggaaggcctcctggcgccgcaccggcccaaggagcccgcgtggttcctggccaccgtcggcgtctcgcccgaccaccagggcaagggtctgggcagcgccgtcgtgctccccggagtggaggcggccgagcgcgccggggtgcccgccttcctggagacctccgcgccccgcaacctccccttctacgagcggctcggcttcaccgtcaccgccgacgtcgaggtgcccgaaggaccgcgcacctggtgcatgacccgcaagcccggtgcctga

SEQ ID NO: 1177 - DNA, 2757 bp, Artificial Sequence
  Synthetic Polynucleotides
atggccttaccagtgaccgccttgctcctgccgctggccttgctgctccacgccgccaggccggaccagagcgtcgtgacacagcctcctagcgtgtcagtggcccctggcaagaccgccagaatcacctgtggccggaacaacatcggcagcaagagcgtgcactggtatcagcagaagcccggccaggctcctgtgctggtggtgtacgacgacagcgacagacccagcggcatccccgagagattcagcggcagcaactccggcaataccgccaccctgaccatcagcagagtggaagccggcgacgaggccgactactactgccaagtgtgggacagcagcagcgatcacgtggtgtttggcggaggcaccaagctgacagtgctgggtggcggaggcggaagtggaggcggaggatctggcggcggaggctctgaagtgcaactggtgcagtctggcggaggggtcgtgcggcctggcggatctctgagactgtcttgtgccgccagcggcttcaccttcgacgactacggcatgagctgggtgcgccaggcccctggaaaaggcctggaatgggtgtccggcatcaactggaatggcggcagcaccggctacgccgattctgtgcggggcagattcaccatcagccgggacaacgccaagaacagcctgtacctgcagatgaactccctgcgggccgaggacaccgccctgtactattgcgccagagagcggggctacggctaccacgaccctcacgattattggggccagggcacccttgtcaccgtgtcctctacgcgtgagcagaaactgatctcggaagaggatctggcgaagcccaccacgacgccagcgccgcgaccaccaacaccggcgcccaccatcgcgtcgcagcccctgtccctgcgcccagaggcgtgccggccagcggcggggggcgcagtgcacacgagggggctggacttcgcctgtgacatctacatctgggcgcccttggccgggacttgtggggtccttctcctgtcactggttatcaccctttactgcgggcgcgccagagtgaagttcagcaggagcgcagacgcccccgcgtaccagcagggccagaaccagctctataacgagctgaatctaggacgaagagaggagtacgatgttttggacaagagacgtggccgggaccctgagatggggggaaagccgagaaggaagaaccctcaggaaggcctgtacaatgaactgcagaaagataagatggcggaggcctacagtgagattgggatgaaaggcgagcgccggaggggcaaggggcacgatggcctttaccagggtctcagtacagccaccaaggacacctacgacgcccttcacatgcaggccctgccccctcgctctagaggatctggagcaacaaacttctcactactcaaacaagcaggtgacgtggaggagaatcccgggcctgggatccacatggccacttacgaggttctctgtgaggtggcgcggaaactgggcacggatgacagggaagtggtattgttcctcctaaacgtgttcatacctcaacccacactggcccaattaattggagctcttagagctttaaaggaggagggcaggttaacgtttcccctgttagcggaatgtctgtttcgtgcaggtcgcagagacctcttgcgcgacctgcttcacttagacccgcgttttttagagcgccacctagcgggcacaatgagttatttcagcccttatcagctcactgttctccacgtagacggggagctgtgtgcgagggatattaggtctttgatatttttaagcaaggacactatagggtctcgcagcacaccacagacattcttacactgggtgtactgtatggaaaacttagacctactgggtcccactgacgtggatgccctaatgtcaatgcttagatctttgtcaagagtagacctacagcgccaagtgcaaaccctaatgggccttcacctttccggcccatcacactcccaacactatcgccatacaccactcgagaccgatttctacgactacaaggacgacgatgacaagactagtggctccggcgagggcagaggaagtctactaacctgcggagatgtggaagaaaatcctggcccacatatgaccgagtacaagcccacggtgcgcctcgccacccgcgacgacgtccccagggccgtacgcaccctcgccgccgcgttcgccgactaccccgccacgcgccacaccgtcgatccggaccgccacatcgagcgggtcaccgagctgcaagaactcttcctcacgcgcgtcgggctcgacatcggcaaggtgtgggtcgcggacgacggcgccgcggtggcggtctggaccacgccggagagcgtcgaagcgggggcggtgttcgccgagatcggcccgcgcatggccgagttgagcggttcccggctggccgcgcagcaacagatggaaggcctcctggcgccgcaccggcccaaggagcccgcgtggttcctggccaccgtcggcgtctcgcccgaccaccagggcaagggtctgggcagcgccgtcgtgctccccggagtggaggcggccgagcgcgccggggtgcccgccttcctggagacctccgcgccccgcaacctccccttctacgagcggctcggcttcaccgtcaccgccgacgtcgaggtgcccgaaggaccgcgcacctggtgcatgacccgcaagcccggtgcctga

SEQ ID NO: 1178 - DNA, 2793 bp, Artificial Sequence
  Synthetic Polynucleotides
atggccttaccagtgaccgccttgctcctgccgctggccttgctgctccacgccgccaggccggaacagaaactcatcagtgaagaagacctggaattccaggctgtcgtgacacagcctcctagcgcctctggcacaccaggccagagagtgaccatctcctgtagcggcagcagcagcaacatcggcagcaacaccgtgaactggtatcagcaggtgcccggcaccgctcccaagctgctgatctacagcaacaaccagcggcccagcggcgtgcccgatagattttctggcagcaagagcggcaccagcgccagcctggctatctctggactccagtccgaggacgaggccgactactattgcgccgcctgggacgatagcctgaacggctgggtgttcggcggaggcaccaagctgacagtgctgggcggaggcggaagtggaggcggaggatctggcggcggaggctctcagatgcaactggtgcagagcggagccgaagtgaaagagcctggcgagagcctgcggatctcctgcaagggcagcggctacagcttcaccaatttctggatctcttgggtgcgccagatgcccggcaagggcctggaatggatgggcagagtggaccccggctactcctacagcacctacagccctagcttccagggccacgtgaccatcagcgccgacaagagcaccagcaccgcctacctccagtggaacagcctgaaggccagcgacaccgccatgtactactgcgccagagtgcagtacagcggctattacgattggttcgacccctggggccagggcacactcgtgacagtgtcaagcacgcgtgagcagaaactgatctcggaagaggatctggcgaagcccaccacgacgccagcgccgcgaccaccaacaccggcgcccaccatcgcgtcgcagcccctgtccctgcgcccagaggcgtgccggccagcggcggggggcgcagtgcacacgagggggctggacttcgcctgtgacatctacatctgggcgcccttggccgggacttgtggggtccttctcctgtcactggttatcaccctttactgcgggcgcgccagagtgaagttcagcaggagcgcagacgcccccgcgtaccagcagggccagaaccagctctataacgagctgaatctaggacgaagagaggagtacgatgttttggacaagagacgtggccgggaccctgagatggggggaaagccgagaaggaagaaccctcaggaaggcctgtacaatgaactgcagaaagataagatggcggaggcctacagtgagattgggatgaaaggcgagcgccggaggggcaaggggcacgatggcctttaccagggtctcagtacagccaccaaggacacctacgacgcccttcacatgcaggccctgccccctcgctctagaggatctggagcaacaaacttctcactactcaaacaagcaggtgacgtggaggagaatcccgggcctgggatccacatggccacttacgaggttctctgtgaggtggcgcggaaactgggcacggatgacagggaagtggtattgttcctcctaaacgtgttcatacctcaacccacactggcccaattaattggagctcttagagctttaaaggaggagggcaggttaacgtttcccctgttagcggaatgtctgtttcgtgcaggtcgcagagacctcttgcgcgacctgcttcacttagacccgcgttttttagagcgccacctagcgggcacaatgagttatttcagcccttatcagctcactgttctccacgtagacggggagctgtgtgcgagggatattaggtctttgatatttttaagcaaggacactatagggtctcgcagcacaccacagacattcttacactgggtgtactgtatggaaaacttagacctactgggtcccactgacgtggatgccctaatgtcaatgcttagatctttgtcaagagtagacctacagcgccaagtgcaaaccctaatgggccttcacctttccggcccatcacactcccaacactatcgccatacaccactcgagaccgatttctacgactacaaggacgacgatgacaagactagtggctccggcgagggcagaggaagtctactaacctgcggagatgtggaagaaaatcctggcccacatatgaccgagtacaagcccacggtgcgcctcgccacccgcgacgacgtccccagggccgtacgcaccctcgccgccgcgttcgccgactaccccgccacgcgccacaccgtcgatccggaccgccacatcgagcgggtcaccgagctgcaagaactcttcctcacgcgcgtcgggctcgacatcggcaaggtgtgggtcgcggacgacggcgccgcggtggcggtctggaccacgccggagagcgtcgaagcgggggcggtgttcgccgagatcggcccgcgcatggccgagttgagcggttcccggctggccgcgcagcaacagatggaaggcctcctggcgccgcaccggcccaaggagcccgcgtggttcctggccaccgtcggcgtctcgcccgaccaccagggcaagggtctgggcagcgccgtcgtgctccccggagtggaggcggccgagcgcgccggggtgcccgccttcctggagacctccgcgccccgcaacctccccttctacgagcggctcggcttcaccgtcaccgccgacgtcgaggtgcccgaaggaccgcgcacctggtgcatgacccgcaagcccggtgcctga

SEQ ID NO: 1179 - DNA, 2775 bp, Artificial Sequence
  Synthetic Polynucleotides
atggccttaccagtgaccgccttgctcctgccgctggccttgctgctccacgccgccaggccggaacagaaactcatcagtgaagaagacctggaattcgacatccagatgacccagagccccagcacactgagcgccagcgtgggcgacagagtgaccatcacctgtcgggccagccagaacatcaacaagtggctggcctggtatcagcagaggcccggaaaagccccccagctgctgatctacaaggccagcagcctggaaagcggcgtgcccagcagattttctggcagcggctctggcaccgagtacaccctgaccatcagctccctccagcccgacgacttcgccacctactactgccagcagtacaacagctacgccaccttcggccagggcaccaaggtggaaatcaagagaggcggaggcggaagtggaggcggaggatctggcggcggaggctctcaggtgcagctggtgcagtctggggccgaagtgaagaagcctggcgagagcctgaagatcagctgcaagggctccggctacaacttctctaacaagtggatcggctgggtgcgccagctgcctggcagaggactggaatggatcgccatcatctaccccggctacagcgacatcacctacagccccagcttccagggccgcgtgacaatcagcgccgacaccagcatcaacaccgcctacctgcactggcacagcctgaaggccagcgacaccgccatgtactactgcgtgcggcatacagccctggctggcttcgattattggggcctgggcaccctcgtgaccgtgtctagtacgcgtgagcagaaactgatctcggaagaggatctggcgaagcccaccacgacgccagcgccgcgaccaccaacaccggcgcccaccatcgcgtcgcagcccctgtccctgcgcccagaggcgtgccggccagcggcggggggcgcagtgcacacgagggggctggacttcgcctgtgacatctacatctgggcgcccttggccgggacttgtggggtccttctcctgtcactggttatcaccctttactgcgggcgcgccagagtgaagttcagcaggagcgcagacgcccccgcgtaccagcagggccagaaccagctctataacgagctgaatctaggacgaagagaggagtacgatgttttggacaagagacgtggccgggaccctgagatggggggaaagccgagaaggaagaaccctcaggaaggcctgtacaatgaactgcagaaagataagatggcggaggcctacagtgagattgggatgaaaggcgagcgccggaggggcaaggggcacgatggcctttaccagggtctcagtacagccaccaaggacacctacgacgcccttcacatgcaggccctgccccctcgctctagaggatctggagcaacaaacttctcactactcaaacaagcaggtgacgtggaggagaatcccgggcctgggatccacatggccacttacgaggttctctgtgaggtggcgcggaaactgggcacggatgacagggaagtggtattgttcctcctaaacgtgttcatacctcaacccacactggcccaattaattggagctcttagagctttaaaggaggagggcaggttaacgtttcccctgttagcggaatgtctgtttcgtgcaggtcgcagagacctcttgcgcgacctgcttcacttagacccgcgttttttagagcgccacctagcgggcacaatgagttatttcagcccttatcagctcactgttctccacgtagacggggagctgtgtgcgagggatattaggtctttgatatttttaagcaaggacactatagggtctcgcagcacaccacagacattcttacactgggtgtactgtatggaaaacttagacctactgggtcccactgacgtggatgccctaatgtcaatgcttagatctttgtcaagagtagacctacagcgccaagtgcaaaccctaatgggccttcacctttccggcccatcacactcccaacactatcgccatacaccactcgagaccgatttctacgactacaaggacgacgatgacaagactagtggctccggcgagggcagaggaagtctactaacctgcggagatgtggaagaaaatcctggcccacatatgaccgagtacaagcccacggtgcgcctcgccacccgcgacgacgtccccagggccgtacgcaccctcgccgccgcgttcgccgactaccccgccacgcgccacaccgtcgatccggaccgccacatcgagcgggtcaccgagctgcaagaactcttcctcacgcgcgtcgggctcgacatcggcaaggtgtgggtcgcggacgacggcgccgcggtggcggtctggaccacgccggagagcgtcgaagcgggggcggtgttcgccgagatcggcccgcgcatggccgagttgagcggttcccggctggccgcgcagcaacagatggaaggcctcctggcgccgcaccggcccaaggagcccgcgtggttcctggccaccgtcggcgtctcgcccgaccaccagggcaagggtctgggcagcgccgtcgtgctccccggagtggaggcggccgagcgcgccggggtgcccgccttcctggagacctccgcgccccgcaacctccccttctacgagcggctcggcttcaccgtcaccgccgacgtcgaggtgcccgaaggaccgcgcacctggtgcatgacccgcaagcccggtgcctga

SEQ ID NO: 1180 - DNA, 2745 bp, Artificial Sequence
  Synthetic Polynucleotides
atggccttaccagtgaccgccttgctcctgccgctggccttgctgctccacgccgccaggccggagatcgtgctgacacagagccctggcaccctgagcctgtctccaggcgaaagagccacactgagctgtcgggccagccagagcgtgtccaatacctacctggcctggtatcaccagaggcccggacaggctccccggctgctgatctatggcgcttctagcagagccaccggcatccccgatagattcagcggctctggcagcggcaccgacttcgccctgacaatcagctccctggaacccgaggacttcgccgtgtactactgccagcagtacagcaactcctggaccttcggccagggcaccaaggtggaaatcaagagaggcggaggcggaagtggaggcggaggatctggcggcggaggctctcaggtgcaactggtggaatctggcgggggagtggtgcagcctggcagaagcctgagactgtcttgtgccgccagcggcttcaccttcagcagctacgacatgcactgggtgcgccaggcccctggcaaaggactggaatgggtggccgtgatctcctacgacggcaccaacgagtattacgccgacagcgtgaagggccggttcaccatctccagagacaccagcaagaacaccctgtacctccagatgaacagcctgcgggccgaggacacagccgtgtattattgcgccagagagcggtacttcgactggtccttcgactactggggccagggaaccctggtgtccgtgtctagtacgcgtgagcagaaactgatctcggaagaggatctggcgaagcccaccacgacgccagcgccgcgaccaccaacaccggcgcccaccatcgcgtcgcagcccctgtccctgcgcccagaggcgtgccggccagcggcggggggcgcagtgcacacgagggggctggacttcgcctgtgacatctacatctgggcgcccttggccgggacttgtggggtccttctcctgtcactggttatcaccctttactgcgggcgcgccagagtgaagttcagcaggagcgcagacgcccccgcgtaccagcagggccagaaccagctctataacgagctgaatctaggacgaagagaggagtacgatgttttggacaagagacgtggccgggaccctgagatggggggaaagccgagaaggaagaaccctcaggaaggcctgtacaatgaactgcagaaagataagatggcggaggcctacagtgagattgggatgaaaggcgagcgccggaggggcaaggggcacgatggcctttaccagggtctcagtacagccaccaaggacacctacgacgcccttcacatgcaggccctgccccctcgctctagaggatctggagcaacaaacttctcactactcaaacaagcaggtgacgtggaggagaatcccgggcctgggatccacatggccacttacgaggttctctgtgaggtggcgcggaaactgggcacggatgacagggaagtggtattgttcctcctaaacgtgttcatacctcaacccacactggcccaattaattggagctcttagagctttaaaggaggagggcaggttaacgtttcccctgttagcggaatgtctgtttcgtgcaggtcgcagagacctcttgcgcgacctgcttcacttagacccgcgttttttagagcgccacctagcgggcacaatgagttatttcagcccttatcagctcactgttctccacgtagacggggagctgtgtgcgagggatattaggtctttgatatttttaagcaaggacactatagggtctcgcagcacaccacagacattcttacactgggtgtactgtatggaaaacttagacctactgggtcccactgacgtggatgccctaatgtcaatgcttagatctttgtcaagagtagacctacagcgccaagtgcaaaccctaatgggccttcacctttccggcccatcacactcccaacactatcgccatacaccactcgagaccgatttctacgactacaaggacgacgatgacaagactagtggctccggcgagggcagaggaagtctactaacctgcggagatgtggaagaaaatcctggcccacatatgaccgagtacaagcccacggtgcgcctcgccacccgcgacgacgtccccagggccgtacgcaccctcgccgccgcgttcgccgactaccccgccacgcgccacaccgtcgatccggaccgccacatcgagcgggtcaccgagctgcaagaactcttcctcacgcgcgtcgggctcgacatcggcaaggtgtgggtcgcggacgacggcgccgcggtggcggtctggaccacgccggagagcgtcgaagcgggggcggtgttcgccgagatcggcccgcgcatggccgagttgagcggttcccggctggccgcgcagcaacagatggaaggcctcctggcgccgcaccggcccaaggagcccgcgtggttcctggccaccgtcggcgtctcgcccgaccaccagggcaagggtctgggcagcgccgtcgtgctccccggagtggaggcggccgagcgcgccggggtgcccgccttcctggagacctccgcgccccgcaacctccccttctacgagcggctcggcttcaccgtcaccgccgacgtcgaggtgcccgaaggaccgcgcacctggtgcatgacccgcaagcccggtgcctga

SEQ ID NO: 1181 - DNA, 2742 bp, Artificial Sequence
  Synthetic Polynucleotides
atggccttaccagtgaccgccttgctcctgccgctggccttgctgctccacgccgccaggccggagctgacacaggaccctgctgtgtctgttgccctgggccagacagtgcggattacctgtcaaggcgacagcctgagaagcaactacgccaactggtatcagcagaagcccggacaggctcccgtgctggttatctacggccagaacaacagacccagcggcatccccgatagattcagcggctctagctctggcaataccgccagcctgacaatcactggcgctcaggctgccgatgaggccgactactactgcgatagcagagtgtccaccggcaatcacgtggtgtttggcggcggaacaaagctgacagtgctcggacaaggcggaggcggaagtggaggcggaggatctggcggcggaggctctgaagttcagctggtgcagagcggagccgaagtgaagaaacctggggcctctgtgaaggtgtcctgcaaggcttccggctacacctttaccagctacgccatgcactgggtccgacaggcacctggacaacggcttgaatggatgggctggatcaacgccggcaacggcaacaccaagtacagccagaaattccagggccgcgtgaccatcaccagagatacaagcgccagcaccgcctacatggaactgtctagcctgagatccgaggacaccgccgtgtactactgtgccagagacatcagctacggcagcttcgactattggggccagggcacactggtcaccgttagctctacgcgtgagcagaaactgatctcggaagaggatctggcgaagcccaccacgacgccagcgccgcgaccaccaacaccggcgcccaccatcgcgtcgcagcccctgtccctgcgcccagaggcgtgccggccagcggcggggggcgcagtgcacacgagggggctggacttcgcctgtgacatctacatctgggcgcccttggccgggacttgtggggtccttctcctgtcactggttatcaccctttactgcgggcgcgccagagtgaagttcagcaggagcgcagacgcccccgcgtaccagcagggccagaaccagctctataacgagctgaatctaggacgaagagaggagtacgatgttttggacaagagacgtggccgggaccctgagatggggggaaagccgagaaggaagaaccctcaggaaggcctgtacaatgaactgcagaaagataagatggcggaggcctacagtgagattgggatgaaaggcgagcgccggaggggcaaggggcacgatggcctttaccagggtctcagtacagccaccaaggacacctacgacgcccttcacatgcaggccctgccccctcgctctagaggatctggagcaacaaacttctcactactcaaacaagcaggtgacgtggaggagaatcccgggcctgggatccacatggccacttacgaggttctctgtgaggtggcgcggaaactgggcacggatgacagggaagtggtattgttcctcctaaacgtgttcatacctcaacccacactggcccaattaattggagctcttagagctttaaaggaggagggcaggttaacgtttcccctgttagcggaatgtctgtttcgtgcaggtcgcagagacctcttgcgcgacctgcttcacttagacccgcgttttttagagcgccacctagcgggcacaatgagttatttcagcccttatcagctcactgttctccacgtagacggggagctgtgtgcgagggatattaggtctttgatatttttaagcaaggacactatagggtctcgcagcacaccacagacattcttacactgggtgtactgtatggaaaacttagacctactgggtcccactgacgtggatgccctaatgtcaatgcttagatctttgtcaagagtagacctacagcgccaagtgcaaaccctaatgggccttcacctttccggcccatcacactcccaacactatcgccatacaccactcgagaccgatttctacgactacaaggacgacgatgacaagactagtggctccggcgagggcagaggaagtctactaacctgcggagatgtggaagaaaatcctggcccacatatgaccgagtacaagcccacggtgcgcctcgccacccgcgacgacgtccccagggccgtacgcaccctcgccgccgcgttcgccgactaccccgccacgcgccacaccgtcgatccggaccgccacatcgagcgggtcaccgagctgcaagaactcttcctcacgcgcgtcgggctcgacatcggcaaggtgtgggtcgcggacgacggcgccgcggtggcggtctggaccacgccggagagcgtcgaagcgggggcggtgttcgccgagatcggcccgcgcatggccgagttgagcggttcccggctggccgcgcagcaacagatggaaggcctcctggcgccgcaccggcccaaggagcccgcgtggttcctggccaccgtcggcgtctcgcccgaccaccagggcaagggtctgggcagcgccgtcgtgctccccggagtggaggcggccgagcgcgccggggtgcccgccttcctggagacctccgcgccccgcaacctccccttctacgagcggctcggcttcaccgtcaccgccgacgtcgaggtgcccgaaggaccgcgcacctggtgcatgacccgcaagcccggtgcctga

SEQ ID NO: 1182 - DNA, 2748 bp, Artificial Sequence
  Synthetic Polynucleotides
atggccttaccagtgaccgccttgctcctgccgctggccttgctgctccacgccgccaggccggacatcgtgctgacacagacaccagccacactgagcgtgacacctggcgattctgtgtccctgagctgtagagccagccagagcatcagcaacaacctgcactggtatcagcagaagtcccacgagagccccagactgctgattaagaacgccagccagtctatcagcggcatccccagcaagtttagcggctctggcagcggcaccgacttcaccctgagaatcaacagcgtggaaaccgaggacttcgggatgtacttctgccagcagagcaatagctggccctacacatttggctccggcaccaagctggaaatcaaaggcggaggcggaagtggaggcggaggatctggcggcggaggctctcaagtgaagctgcaacagagcggacccgagctggttaagccaggcgcttccgtgaagattagctgcaaggccagcggctacagcttcaccggctactacatgcactgggtcaagcagagccacggcaacatcctggactggatcggctacatctacccctacaacggcgtgtccagctacaaccagaagttcaagggcaaagccactctgaccgtggacaagagcagcagcaccgcctacatggaactgagaagcctgaccagcgaggacagcgccgtgtactattgtgccagagagcggggcctgtaccagctcagagcaatggattattggggccagggcaccagcgtgaccgtttcttctacgcgtgagcagaaactgatctcggaagaggatctggcgaagcccaccacgacgccagcgccgcgaccaccaacaccggcgcccaccatcgcgtcgcagcccctgtccctgcgcccagaggcgtgccggccagcggcggggggcgcagtgcacacgagggggctggacttcgcctgtgacatctacatctgggcgcccttggccgggacttgtggggtccttctcctgtcactggttatcaccctttactgcgggcgcgccagagtgaagttcagcaggagcgcagacgcccccgcgtaccagcagggccagaaccagctctataacgagctgaatctaggacgaagagaggagtacgatgttttggacaagagacgtggccgggaccctgagatggggggaaagccgagaaggaagaaccctcaggaaggcctgtacaatgaactgcagaaagataagatggcggaggcctacagtgagattgggatgaaaggcgagcgccggaggggcaaggggcacgatggcctttaccagggtctcagtacagccaccaaggacacctacgacgcccttcacatgcaggccctgccccctcgctctagaggatctggagcaacaaacttctcactactcaaacaagcaggtgacgtggaggagaatcccgggcctgggatccacatggccacttacgaggttctctgtgaggtggcgcggaaactgggcacggatgacagggaagtggtattgttcctcctaaacgtgttcatacctcaacccacactggcccaattaattggagctcttagagctttaaaggaggagggcaggttaacgtttcccctgttagcggaatgtctgtttcgtgcaggtcgcagagacctcttgcgcgacctgcttcacttagacccgcgttttttagagcgccacctagcgggcacaatgagttatttcagcccttatcagctcactgttctccacgtagacggggagctgtgtgcgagggatattaggtctttgatatttttaagcaaggacactatagggtctcgcagcacaccacagacattcttacactgggtgtactgtatggaaaacttagacctactgggtcccactgacgtggatgccctaatgtcaatgcttagatctttgtcaagagtagacctacagcgccaagtgcaaaccctaatgggccttcacctttccggcccatcacactcccaacactatcgccatacaccactcgagaccgatttctacgactacaaggacgacgatgacaagactagtggctccggcgagggcagaggaagtctactaacctgcggagatgtggaagaaaatcctggcccacatatgaccgagtacaagcccacggtgcgcctcgccacccgcgacgacgtccccagggccgtacgcaccctcgccgccgcgttcgccgactaccccgccacgcgccacaccgtcgatccggaccgccacatcgagcgggtcaccgagctgcaagaactcttcctcacgcgcgtcgggctcgacatcggcaaggtgtgggtcgcggacgacggcgccgcggtggcggtctggaccacgccggagagcgtcgaagcgggggcggtgttcgccgagatcggcccgcgcatggccgagttgagcggttcccggctggccgcgcagcaacagatggaaggcctcctggcgccgcaccggcccaaggagcccgcgtggttcctggccaccgtcggcgtctcgcccgaccaccagggcaagggtctgggcagcgccgtcgtgctccccggagtggaggcggccgagcgcgccggggtgcccgccttcctggagacctccgcgccccgcaacctccccttctacgagcggctcggcttcaccgtcaccgccgacgtcgaggtgcccgaaggaccgcgcacctggtgcatgacccgcaagcccggtgcctga

SEQ ID NO: 1183 - DNA, 2721 bp, Artificial Sequence
  Synthetic Polynucleotides
atggccttaccagtgaccgccttgctcctgccgctggccttgctgctccacgccgccaggccggacatcgtgatgacacagacccctgccatcatgagcgcctctccaggccagaaagtgaccatcacatgtagcgccagcagcagcgtgaactacatgcactggtatcagcagaagctgggcagcagccccaagctgtggatctacgataccagcaaactggcccctggcgtgccagccagattttctggttctggcagcggcaccagctacagcctgacaatcagcagcatggaagccgaggatgccgccagctacttctgccatcagtggtctagctacccctacacctttggctccggcaccaagctggaaatcaaaggcggaggcggaagtggaggcggaggatctggcggcggaggctctgaagttcagctccaagagtctggccccgacctggtcaagcctagccaaagcctgagcctgacctgtaccgtgaccggctacagcatcacaagcggctatggatggcactggatcagacagttccccggcaacaaactggaatggatgggctacatccactacagcggcagcaccacctacaatcccagcctgaagtcccggatcagcatcagcagagacaccagcaagaaccagttcttcctgcaactgaacagcgtgaccaccgaggacaccgccacctactattgtgctcggagcctgagatattggggccagggcacaaccctgaccgtgtcatctacgcgtgagcagaaactgatctcggaagaggatctggcgaagcccaccacgacgccagcgccgcgaccaccaacaccggcgcccaccatcgcgtcgcagcccctgtccctgcgcccagaggcgtgccggccagcggcggggggcgcagtgcacacgagggggctggacttcgcctgtgacatctacatctgggcgcccttggccgggacttgtggggtccttctcctgtcactggttatcaccctttactgcgggcgcgccagagtgaagttcagcaggagcgcagacgcccccgcgtaccagcagggccagaaccagctctataacgagctgaatctaggacgaagagaggagtacgatgttttggacaagagacgtggccgggaccctgagatggggggaaagccgagaaggaagaaccctcaggaaggcctgtacaatgaactgcagaaagataagatggcggaggcctacagtgagattgggatgaaaggcgagcgccggaggggcaaggggcacgatggcctttaccagggtctcagtacagccaccaaggacacctacgacgcccttcacatgcaggccctgccccctcgctctagaggatctggagcaacaaacttctcactactcaaacaagcaggtgacgtggaggagaatcccgggcctgggatccacatggccacttacgaggttctctgtgaggtggcgcggaaactgggcacggatgacagggaagtggtattgttcctcctaaacgtgttcatacctcaacccacactggcccaattaattggagctcttagagctttaaaggaggagggcaggttaacgtttcccctgttagcggaatgtctgtttcgtgcaggtcgcagagacctcttgcgcgacctgcttcacttagacccgcgttttttagagcgccacctagcgggcacaatgagttatttcagcccttatcagctcactgttctccacgtagacggggagctgtgtgcgagggatattaggtctttgatatttttaagcaaggacactatagggtctcgcagcacaccacagacattcttacactgggtgtactgtatggaaaacttagacctactgggtcccactgacgtggatgccctaatgtcaatgcttagatctttgtcaagagtagacctacagcgccaagtgcaaaccctaatgggccttcacctttccggcccatcacactcccaacactatcgccatacaccactcgagaccgatttctacgactacaaggacgacgatgacaagactagtggctccggcgagggcagaggaagtctactaacctgcggagatgtggaagaaaatcctggcccacatatgaccgagtacaagcccacggtgcgcctcgccacccgcgacgacgtccccagggccgtacgcaccctcgccgccgcgttcgccgactaccccgccacgcgccacaccgtcgatccggaccgccacatcgagcgggtcaccgagctgcaagaactcttcctcacgcgcgtcgggctcgacatcggcaaggtgtgggtcgcggacgacggcgccgcggtggcggtctggaccacgccggagagcgtcgaagcgggggcggtgttcgccgagatcggcccgcgcatggccgagttgagcggttcccggctggccgcgcagcaacagatggaaggcctcctggcgccgcaccggcccaaggagcccgcgtggttcctggccaccgtcggcgtctcgcccgaccaccagggcaagggtctgggcagcgccgtcgtgctccccggagtggaggcggccgagcgcgccggggtgcccgccttcctggagacctccgcgccccgcaacctccccttctacgagcggctcggcttcaccgtcaccgccgacgtcgaggtgcccgaaggaccgcgcacctggtgcatgacccgcaagcccggtgcctga

SEQ ID NO: 1184 - DNA, 2730 bp, Artificial Sequence
  Synthetic Polynucleotides
atggccttaccagtgaccgccttgctcctgccgctggccttgctgctccacgccgccaggccggacatccagatgacacagagccctagcagcctgtctgccagcgtgggagacagagtgaccatcacctgtagcgccaccagcagcatcagctacatgcactggtatcagcagaagcccggcaaggcccctaaaggctggatctacgataccagcaaactggcccacggcgtgcccagcagattttctggttctggcagcggcaccgacttcaccctgacaatatctagcctccagcctgaggacttcgccacctactactgccaccagagaagaagctaccccttcaccttcggccagggcaccaaggtggaaatcaaaggcggaggcggaagtggaggcggaggatctggcggcggaggctctgaagtgcaactggttcagagcggagccgaagtgaagaaacctggggcctctgtgaaggtgtcctgcaaggcttccggctacacctttaccaatttctggattcactgggtccgacaggctccaggccaaggactggaatggatcggagagatcgaccccagcgacagctacaccaactacaaccagaaattcaaaggccgggtcaccatcaccagagacaccagcacaagcaccgcctacctggaactgagcagcctgagaagcgaggacaccgccgtgtactactgcgccagggaaatcaccaccgtggattattggggccagggaaccctggtcaccgtgtcatctacgcgtgagcagaaactgatctcggaagaggatctggcgaagcccaccacgacgccagcgccgcgaccaccaacaccggcgcccaccatcgcgtcgcagcccctgtccctgcgcccagaggcgtgccggccagcggcggggggcgcagtgcacacgagggggctggacttcgcctgtgacatctacatctgggcgcccttggccgggacttgtggggtccttctcctgtcactggttatcaccctttactgcgggcgcgccagagtgaagttcagcaggagcgcagacgcccccgcgtaccagcagggccagaaccagctctataacgagctgaatctaggacgaagagaggagtacgatgttttggacaagagacgtggccgggaccctgagatggggggaaagccgagaaggaagaaccctcaggaaggcctgtacaatgaactgcagaaagataagatggcggaggcctacagtgagattgggatgaaaggcgagcgccggaggggcaaggggcacgatggcctttaccagggtctcagtacagccaccaaggacacctacgacgcccttcacatgcaggccctgccccctcgctctagaggatctggagcaacaaacttctcactactcaaacaagcaggtgacgtggaggagaatcccgggcctgggatccacatggccacttacgaggttctctgtgaggtggcgcggaaactgggcacggatgacagggaagtggtattgttcctcctaaacgtgttcatacctcaacccacactggcccaattaattggagctcttagagctttaaaggaggagggcaggttaacgtttcccctgttagcggaatgtctgtttcgtgcaggtcgcagagacctcttgcgcgacctgcttcacttagacccgcgttttttagagcgccacctagcgggcacaatgagttatttcagcccttatcagctcactgttctccacgtagacggggagctgtgtgcgagggatattaggtctttgatatttttaagcaaggacactatagggtctcgcagcacaccacagacattcttacactgggtgtactgtatggaaaacttagacctactgggtcccactgacgtggatgccctaatgtcaatgcttagatctttgtcaagagtagacctacagcgccaagtgcaaaccctaatgggccttcacctttccggcccatcacactcccaacactatcgccatacaccactcgagaccgatttctacgactacaaggacgacgatgacaagactagtggctccggcgagggcagaggaagtctactaacctgcggagatgtggaagaaaatcctggcccacatatgaccgagtacaagcccacggtgcgcctcgccacccgcgacgacgtccccagggccgtacgcaccctcgccgccgcgttcgccgactaccccgccacgcgccacaccgtcgatccggaccgccacatcgagcgggtcaccgagctgcaagaactcttcctcacgcgcgtcgggctcgacatcggcaaggtgtgggtcgcggacgacggcgccgcggtggcggtctggaccacgccggagagcgtcgaagcgggggcggtgttcgccgagatcggcccgcgcatggccgagttgagcggttcccggctggccgcgcagcaacagatggaaggcctcctggcgccgcaccggcccaaggagcccgcgtggttcctggccaccgtcggcgtctcgcccgaccaccagggcaagggtctgggcagcgccgtcgtgctccccggagtggaggcggccgagcgcgccggggtgcccgccttcctggagacctccgcgccccgcaacctccccttctacgagcggctcggcttcaccgtcaccgccgacgtcgaggtgcccgaaggaccgcgcacctggtgcatgacccgcaagcccggtgcctga

SEQ ID NO: 1185 - DNA, 2751 bp, Artificial Sequence
  Synthetic Polynucleotides
atggccttaccagtgaccgccttgctcctgccgctggccttgctgctccacgccgccaggccggacatccagatgacacagagccctagcagcctgtctgccagcgtgggagacagagtgaccatcacatgcaaggccagccagggcttcaacaaatacgtggcctggtatcagcagaagcccggcaaggctcctaagctgctgatctactacaccagcacactccagcctggcgtgcccagcagattttctggctctggcagcggcagagactacaccctgacaatatccagcctccagccagaggacttcgccacctactactgtctccagtacggcaacctgctgtacgcctttggacagggcaccaaggtggaaatcaagagaggcggaggcggaagtggaggcggaggatctggcggcggaggctctgaagttcagcttgtgcagagcggagccgaagtgaagaaacctggggcctctgtgaaggtgtcctgcaaagccagcggctacacctttaccagctactggatcggctgggtccgacaggctcctggacaaggactggaatggatcggcgacatctatcccggcggaggctacaccaactacaacgagaagttcaagggccgcgtgacaatcaccagagacacctctacaagcaccgcctacctggaactgagcagcctgagaagcgaggacaccgccgtgtactactgcgccagactggatggcagcagctacagaggcgctatggattcttggggccagggcacactggtcaccgtttcttctacgcgtgagcagaaactgatctcggaagaggatctggcgaagcccaccacgacgccagcgccgcgaccaccaacaccggcgcccaccatcgcgtcgcagcccctgtccctgcgcccagaggcgtgccggccagcggcggggggcgcagtgcacacgagggggctggacttcgcctgtgacatctacatctgggcgcccttggccgggacttgtggggtccttctcctgtcactggttatcaccctttactgcgggcgcgccagagtgaagttcagcaggagcgcagacgcccccgcgtaccagcagggccagaaccagctctataacgagctgaatctaggacgaagagaggagtacgatgttttggacaagagacgtggccgggaccctgagatggggggaaagccgagaaggaagaaccctcaggaaggcctgtacaatgaactgcagaaagataagatggcggaggcctacagtgagattgggatgaaaggcgagcgccggaggggcaaggggcacgatggcctttaccagggtctcagtacagccaccaaggacacctacgacgcccttcacatgcaggccctgccccctcgctctagaggatctggagcaacaaacttctcactactcaaacaagcaggtgacgtggaggagaatcccgggcctgggatccacatggccacttacgaggttctctgtgaggtggcgcggaaactgggcacggatgacagggaagtggtattgttcctcctaaacgtgttcatacctcaacccacactggcccaattaattggagctcttagagctttaaaggaggagggcaggttaacgtttcccctgttagcggaatgtctgtttcgtgcaggtcgcagagacctcttgcgcgacctgcttcacttagacccgcgttttttagagcgccacctagcgggcacaatgagttatttcagcccttatcagctcactgttctccacgtagacggggagctgtgtgcgagggatattaggtctttgatatttttaagcaaggacactatagggtctcgcagcacaccacagacattcttacactgggtgtactgtatggaaaacttagacctactgggtcccactgacgtggatgccctaatgtcaatgcttagatctttgtcaagagtagacctacagcgccaagtgcaaaccctaatgggccttcacctttccggcccatcacactcccaacactatcgccatacaccactcgagaccgatttctacgactacaaggacgacgatgacaagactagtggctccggcgagggcagaggaagtctactaacctgcggagatgtggaagaaaatcctggcccacatatgaccgagtacaagcccacggtgcgcctcgccacccgcgacgacgtccccagggccgtacgcaccctcgccgccgcgttcgccgactaccccgccacgcgccacaccgtcgatccggaccgccacatcgagcgggtcaccgagctgcaagaactcttcctcacgcgcgtcgggctcgacatcggcaaggtgtgggtcgcggacgacggcgccgcggtggcggtctggaccacgccggagagcgtcgaagcgggggcggtgttcgccgagatcggcccgcgcatggccgagttgagcggttcccggctggccgcgcagcaacagatggaaggcctcctggcgccgcaccggcccaaggagcccgcgtggttcctggccaccgtcggcgtctcgcccgaccaccagggcaagggtctgggcagcgccgtcgtgctccccggagtggaggcggccgagcgcgccggggtgcccgccttcctggagacctccgcgccccgcaacctccccttctacgagcggctcggcttcaccgtcaccgccgacgtcgaggtgcccgaaggaccgcgcacctggtgcatgacccgcaagcccggtgcctga

SEQ ID NO: 1186 - DNA, 2763 bp, Artificial Sequence
  Synthetic Polynucleotides
atggccttaccagtgaccgccttgctcctgccgctggccttgctgctccacgccgccaggccggacatccagctcacacagagcccttctagcctgtctgccagcgtgggcgacagagtgaccatcacatgtagagccagccagagcgtggactacgacggcgacagctacatgaactggtatcagcagaagcccggcaaggcccctaagctgctgatctacgccgccagctatctggaaagcggcgtgccaagcagattttccggctctggcagcggcaccgatttcaccctgacaatatccagcctccagcctgaggacttcgccacctactactgccagcagagccatgaggacccctacacctttggacagggcaccaaggtggaaatcaagagaggcggaggcggaagtggaggcggaggatctggcggcggaggctctgaagtgcaactggttgaatctggcggcggactggttcagcctggcggatctctgagactgagctgtgccgtgtctggctacagcatcaccagcggctactcttggaactggatcagacaggcccctggcaaaggactggaatgggtcgcctccatcacctacgatggcagcaccaactacaaccccagcgtgaagggcagaatcaccatcagcagggacgacagcaagaacaccttctacctgcaaatgaacagcctgagagccgaggacaccgccgtgtactattgtgccagaggcagccactacttcggccactggcattttgctgtgtggggccagggaaccctggtcacagtttcttctacgcgtgagcagaaactgatctcggaagaggatctggcgaagcccaccacgacgccagcgccgcgaccaccaacaccggcgcccaccatcgcgtcgcagcccctgtccctgcgcccagaggcgtgccggccagcggcggggggcgcagtgcacacgagggggctggacttcgcctgtgacatctacatctgggcgcccttggccgggacttgtggggtccttctcctgtcactggttatcaccctttactgcgggcgcgccagagtgaagttcagcaggagcgcagacgcccccgcgtaccagcagggccagaaccagctctataacgagctgaatctaggacgaagagaggagtacgatgttttggacaagagacgtggccgggaccctgagatggggggaaagccgagaaggaagaaccctcaggaaggcctgtacaatgaactgcagaaagataagatggcggaggcctacagtgagattgggatgaaaggcgagcgccggaggggcaaggggcacgatggcctttaccagggtctcagtacagccaccaaggacacctacgacgcccttcacatgcaggccctgccccctcgctctagaggatctggagcaacaaacttctcactactcaaacaagcaggtgacgtggaggagaatcccgggcctgggatccacatggccacttacgaggttctctgtgaggtggcgcggaaactgggcacggatgacagggaagtggtattgttcctcctaaacgtgttcatacctcaacccacactggcccaattaattggagctcttagagctttaaaggaggagggcaggttaacgtttcccctgttagcggaatgtctgtttcgtgcaggtcgcagagacctcttgcgcgacctgcttcacttagacccgcgttttttagagcgccacctagcgggcacaatgagttatttcagcccttatcagctcactgttctccacgtagacggggagctgtgtgcgagggatattaggtctttgatatttttaagcaaggacactatagggtctcgcagcacaccacagacattcttacactgggtgtactgtatggaaaacttagacctactgggtcccactgacgtggatgccctaatgtcaatgcttagatctttgtcaagagtagacctacagcgccaagtgcaaaccctaatgggccttcacctttccggcccatcacactcccaacactatcgccatacaccactcgagaccgatttctacgactacaaggacgacgatgacaagactagtggctccggcgagggcagaggaagtctactaacctgcggagatgtggaagaaaatcctggcccacatatgaccgagtacaagcccacggtgcgcctcgccacccgcgacgacgtccccagggccgtacgcaccctcgccgccgcgttcgccgactaccccgccacgcgccacaccgtcgatccggaccgccacatcgagcgggtcaccgagctgcaagaactcttcctcacgcgcgtcgggctcgacatcggcaaggtgtgggtcgcggacgacggcgccgcggtggcggtctggaccacgccggagagcgtcgaagcgggggcggtgttcgccgagatcggcccgcgcatggccgagttgagcggttcccggctggccgcgcagcaacagatggaaggcctcctggcgccgcaccggcccaaggagcccgcgtggttcctggccaccgtcggcgtctcgcccgaccaccagggcaagggtctgggcagcgccgtcgtgctccccggagtggaggcggccgagcgcgccggggtgcccgccttcctggagacctccgcgccccgcaacctccccttctacgagcggctcggcttcaccgtcaccgccgacgtcgaggtgcccgaaggaccgcgcacctggtgcatgacccgcaagcccggtgcctga

SEQ ID NO: 1187 - DNA, 2739 bp, Artificial Sequence
  Synthetic Polynucleotides
atggccttaccagtgaccgccttgctcctgccgctggccttgctgctccacgccgccaggccggacatccagatgacacagagccctagcagcctgtctgccagcgtgggagacagagtgaccatcacctgtagagccagccaggacatccggtactacctgaactggtatcagcagaagcccggcaaggcccctaagctgctgatctatgtggcctccagcctccagagcggagtgccttctagattttctggcagcggctccggcaccgagtttaccctgacagtgtctagcttgcagcccgaggacttcgccacctactactgcctgcaagtgtacagcacccctcggacctttggacagggcaccaaggtggaaatcaaaggcggaggcggaagtggaggcggaggatctggcggcggaggctctgaagtgcagcttgttgaatctggcggcggactggctaagcctggcggatctctgagactgtcttgtgccgccagcggcttccggttcaccttcaacaactactacatggactgggtccgacaggcccctggacaaggacttgaatgggtgtccagaatcagcagcagcggcgaccctacttggtacgccgattctgtgaagggcagattcaccatcagcagagagaacgccaagaacaccctgttcctccagatgaactccctgagagccgaggacaccgccgtgtactattgtgcctctctgaccaccggcagcgattcttggggacagggcgtgctggttaccgtgtcatctacgcgtgagcagaaactgatctcggaagaggatctggcgaagcccaccacgacgccagcgccgcgaccaccaacaccggcgcccaccatcgcgtcgcagcccctgtccctgcgcccagaggcgtgccggccagcggcggggggcgcagtgcacacgagggggctggacttcgcctgtgacatctacatctgggcgcccttggccgggacttgtggggtccttctcctgtcactggttatcaccctttactgcgggcgcgccagagtgaagttcagcaggagcgcagacgcccccgcgtaccagcagggccagaaccagctctataacgagctgaatctaggacgaagagaggagtacgatgttttggacaagagacgtggccgggaccctgagatggggggaaagccgagaaggaagaaccctcaggaaggcctgtacaatgaactgcagaaagataagatggcggaggcctacagtgagattgggatgaaaggcgagcgccggaggggcaaggggcacgatggcctttaccagggtctcagtacagccaccaaggacacctacgacgcccttcacatgcaggccctgccccctcgctctagaggatctggagcaacaaacttctcactactcaaacaagcaggtgacgtggaggagaatcccgggcctgggatccacatggccacttacgaggttctctgtgaggtggcgcggaaactgggcacggatgacagggaagtggtattgttcctcctaaacgtgttcatacctcaacccacactggcccaattaattggagctcttagagctttaaaggaggagggcaggttaacgtttcccctgttagcggaatgtctgtttcgtgcaggtcgcagagacctcttgcgcgacctgcttcacttagacccgcgttttttagagcgccacctagcgggcacaatgagttatttcagcccttatcagctcactgttctccacgtagacggggagctgtgtgcgagggatattaggtctttgatatttttaagcaaggacactatagggtctcgcagcacaccacagacattcttacactgggtgtactgtatggaaaacttagacctactgggtcccactgacgtggatgccctaatgtcaatgcttagatctttgtcaagagtagacctacagcgccaagtgcaaaccctaatgggccttcacctttccggcccatcacactcccaacactatcgccatacaccactcgagaccgatttctacgactacaaggacgacgatgacaagactagtggctccggcgagggcagaggaagtctactaacctgcggagatgtggaagaaaatcctggcccacatatgaccgagtacaagcccacggtgcgcctcgccacccgcgacgacgtccccagggccgtacgcaccctcgccgccgcgttcgccgactaccccgccacgcgccacaccgtcgatccggaccgccacatcgagcgggtcaccgagctgcaagaactcttcctcacgcgcgtcgggctcgacatcggcaaggtgtgggtcgcggacgacggcgccgcggtggcggtctggaccacgccggagagcgtcgaagcgggggcggtgttcgccgagatcggcccgcgcatggccgagttgagcggttcccggctggccgcgcagcaacagatggaaggcctcctggcgccgcaccggcccaaggagcccgcgtggttcctggccaccgtcggcgtctcgcccgaccaccagggcaagggtctgggcagcgccgtcgtgctccccggagtggaggcggccgagcgcgccggggtgcccgccttcctggagacctccgcgccccgcaacctccccttctacgagcggctcggcttcaccgtcaccgccgacgtcgaggtgcccgaaggaccgcgcacctggtgcatgacccgcaagcccggtgcctga

SEQ ID NO: 1188 - DNA, 2742 bp, Artificial Sequence
  Synthetic Polynucleotides
atggccttaccagtgaccgccttgctcctgccgctggccttgctgctccacgccgccaggccggagatcgtgatgacacagagccccgccacactgagtgtgtctccaggcgaaagagccacactgtcctgtagagccagccagagcgtgtccagaaacctggcctggtatcagcagaagcctggacaggctccccggctgttgatctacggcgcttctacaagagccaccggcattcccgccagattttctggctctggcagcggcaccgagttcaccctgacaatcggaagcctccagagcgaggacttcgccgtgtactactgccagcagtacaagacctggcctcggacctttggacagggcaccaacgtggaaatcaaaggcggaggcggaagtggaggcggaggatctggcggcggaggctctcaagttcagctgcaacaatggggagccggcctgctgaagcctagcgaaacactgtctctgacctgcgccgtgttcggcggctctttcagcggctactactggtcctggatcagacagcctcctggcaaaggactggaatggatcggcgagatcaaccaccggggcaacaccaacgacaaccccagcctgaaaagcagagtgaccatcagcgtggacaccagcaagaaccagttcgccctgaagctgagcagcgtgacagccgctgataccgccgtgtattattgcgccagagagcggggctacacctacggcaatttcgatcactggggccagggcaccctggtcacagtttcttctacgcgtgagcagaaactgatctcggaagaggatctggcgaagcccaccacgacgccagcgccgcgaccaccaacaccggcgcccaccatcgcgtcgcagcccctgtccctgcgcccagaggcgtgccggccagcggcggggggcgcagtgcacacgagggggctggacttcgcctgtgacatctacatctgggcgcccttggccgggacttgtggggtccttctcctgtcactggttatcaccctttactgcgggcgcgccagagtgaagttcagcaggagcgcagacgcccccgcgtaccagcagggccagaaccagctctataacgagctgaatctaggacgaagagaggagtacgatgttttggacaagagacgtggccgggaccctgagatggggggaaagccgagaaggaagaaccctcaggaaggcctgtacaatgaactgcagaaagataagatggcggaggcctacagtgagattgggatgaaaggcgagcgccggaggggcaaggggcacgatggcctttaccagggtctcagtacagccaccaaggacacctacgacgcccttcacatgcaggccctgccccctcgctctagaggatctggagcaacaaacttctcactactcaaacaagcaggtgacgtggaggagaatcccgggcctgggatccacatggccacttacgaggttctctgtgaggtggcgcggaaactgggcacggatgacagggaagtggtattgttcctcctaaacgtgttcatacctcaacccacactggcccaattaattggagctcttagagctttaaaggaggagggcaggttaacgtttcccctgttagcggaatgtctgtttcgtgcaggtcgcagagacctcttgcgcgacctgcttcacttagacccgcgttttttagagcgccacctagcgggcacaatgagttatttcagcccttatcagctcactgttctccacgtagacggggagctgtgtgcgagggatattaggtctttgatatttttaagcaaggacactatagggtctcgcagcacaccacagacattcttacactgggtgtactgtatggaaaacttagacctactgggtcccactgacgtggatgccctaatgtcaatgcttagatctttgtcaagagtagacctacagcgccaagtgcaaaccctaatgggccttcacctttccggcccatcacactcccaacactatcgccatacaccactcgagaccgatttctacgactacaaggacgacgatgacaagactagtggctccggcgagggcagaggaagtctactaacctgcggagatgtggaagaaaatcctggcccacatatgaccgagtacaagcccacggtgcgcctcgccacccgcgacgacgtccccagggccgtacgcaccctcgccgccgcgttcgccgactaccccgccacgcgccacaccgtcgatccggaccgccacatcgagcgggtcaccgagctgcaagaactcttcctcacgcgcgtcgggctcgacatcggcaaggtgtgggtcgcggacgacggcgccgcggtggcggtctggaccacgccggagagcgtcgaagcgggggcggtgttcgccgagatcggcccgcgcatggccgagttgagcggttcccggctggccgcgcagcaacagatggaaggcctcctggcgccgcaccggcccaaggagcccgcgtggttcctggccaccgtcggcgtctcgcccgaccaccagggcaagggtctgggcagcgccgtcgtgctccccggagtggaggcggccgagcgcgccggggtgcccgccttcctggagacctccgcgccccgcaacctccccttctacgagcggctcggcttcaccgtcaccgccgacgtcgaggtgcccgaaggaccgcgcacctggtgcatgacccgcaagcccggtgcctga

SEQ ID NO: 1189 - DNA, 2745 bp, Artificial Sequence
  Synthetic Polynucleotides
atggccttaccagtgaccgccttgctcctgccgctggccttgctgctccacgccgccaggccggagatcgtgatgacccctagcagcgccacactgagtgtgtctccaggcgaaagagccacactgtcctgtagagccagccagagcgtgtccagaaacctggcctggtatcagcagaagcctggacaggctccccggctgttgatctacggcgcttctacaagagccaccggcattcccgccagattttctggctctggcagcggcaccgagttcaccctgacaatctctagcctccagagcgaggacttcgccgtgtactactgccaccagtacagcaactggatgtgcagcttcggccagggcaccaagctggaaatcaaaggcggaggcggaagtggaggcggaggatctggcggcggaggctctgaagttcagctccttgagtcaggtggcggcctggttcaacctggcggatctctgagactgagctgtgccgccagcggcttcacctttagcagatacgccatgaactgggtccgacaggcccctggcaaaggactggaatgggtgtccggcatctctggaagcggcggcagaacctactacgccgattctgtgaagggcagattcaccatcagccgggacaacagcaagaacaccctgtacctccagatgaacagcctgagagccgaggacacagccgtgtattattgcgccaaggaccgggacttttggagcggcccttttgactattggggccagggaaccctggtcaccgttagctctacgcgtgagcagaaactgatctcggaagaggatctggcgaagcccaccacgacgccagcgccgcgaccaccaacaccggcgcccaccatcgcgtcgcagcccctgtccctgcgcccagaggcgtgccggccagcggcggggggcgcagtgcacacgagggggctggacttcgcctgtgacatctacatctgggcgcccttggccgggacttgtggggtccttctcctgtcactggttatcaccctttactgcgggcgcgccagagtgaagttcagcaggagcgcagacgcccccgcgtaccagcagggccagaaccagctctataacgagctgaatctaggacgaagagaggagtacgatgttttggacaagagacgtggccgggaccctgagatggggggaaagccgagaaggaagaaccctcaggaaggcctgtacaatgaactgcagaaagataagatggcggaggcctacagtgagattgggatgaaaggcgagcgccggaggggcaaggggcacgatggcctttaccagggtctcagtacagccaccaaggacacctacgacgcccttcacatgcaggccctgccccctcgctctagaggatctggagcaacaaacttctcactactcaaacaagcaggtgacgtggaggagaatcccgggcctgggatccacatggccacttacgaggttctctgtgaggtggcgcggaaactgggcacggatgacagggaagtggtattgttcctcctaaacgtgttcatacctcaacccacactggcccaattaattggagctcttagagctttaaaggaggagggcaggttaacgtttcccctgttagcggaatgtctgtttcgtgcaggtcgcagagacctcttgcgcgacctgcttcacttagacccgcgttttttagagcgccacctagcgggcacaatgagttatttcagcccttatcagctcactgttctccacgtagacggggagctgtgtgcgagggatattaggtctttgatatttttaagcaaggacactatagggtctcgcagcacaccacagacattcttacactgggtgtactgtatggaaaacttagacctactgggtcccactgacgtggatgccctaatgtcaatgcttagatctttgtcaagagtagacctacagcgccaagtgcaaaccctaatgggccttcacctttccggcccatcacactcccaacactatcgccatacaccactcgagaccgatttctacgactacaaggacgacgatgacaagactagtggctccggcgagggcagaggaagtctactaacctgcggagatgtggaagaaaatcctggcccacatatgaccgagtacaagcccacggtgcgcctcgccacccgcgacgacgtccccagggccgtacgcaccctcgccgccgcgttcgccgactaccccgccacgcgccacaccgtcgatccggaccgccacatcgagcgggtcaccgagctgcaagaactcttcctcacgcgcgtcgggctcgacatcggcaaggtgtgggtcgcggacgacggcgccgcggtggcggtctggaccacgccggagagcgtcgaagcgggggcggtgttcgccgagatcggcccgcgcatggccgagttgagcggttcccggctggccgcgcagcaacagatggaaggcctcctggcgccgcaccggcccaaggagcccgcgtggttcctggccaccgtcggcgtctcgcccgaccaccagggcaagggtctgggcagcgccgtcgtgctccccggagtggaggcggccgagcgcgccggggtgcccgccttcctggagacctccgcgccccgcaacctccccttctacgagcggctcggcttcaccgtcaccgccgacgtcgaggtgcccgaaggaccgcgcacctggtgcatgacccgcaagcccggtgcctga

SEQ ID NO: 1190 - DNA, 2745 bp, Artificial Sequence; identical to SEQ ID NO: 1189
  Synthetic Polynucleotides

SEQ ID NO: 1191 - DNA, 2751 bp, Artificial Sequence
  Synthetic Polynucleotides
atggccttaccagtgaccgccttgctcctgccgctggccttgctgctccacgccgccaggccgcaggttcagctccagcagtctgatgccgagctggtcaagcctggcagcagcgtgaagattagctgcaaggccagcggctacaccttcaccgatcacgccatccactgggtcaagcagaagcctgagcagggcctcgaatggatcggccactttagccctggcaacaccgacatcaagtacaacgacaagttcaagggcaaagccacactgaccgtggacagaagcagcagcacagcctacatgcagctgaacagcctgaccagcgaggacagcgccgtgtacttctgcaagaccagcaccttctttttcgactactggggccagggcacaaccctgacagtttcttctggcggaggcggaagtggaggcggaggatctggcggcggaggctctgaactggttatgacacagagccccagcagcctgacagtgacagccggcgagaaagtgaccatgatctgcaagtctagccagagcctgctgaactccggcgatcagaagaactacctgacctggtatcagcagaaacccggccagcctcctaagctgctgatcttctgggccagcaccagagaaagcggcgtgcccgatagattcacaggcagcggcagcggaaccgacttcaccctgacaatcagctctgtgcaggccgaggacctggccgtgtattactgccagaacgactacagctaccctctgacctttggagccggcaccaagctggaactgaagacgcgtgagcagaaactgatctcggaagaggatctggcgaagcccaccacgacgccagcgccgcgaccaccaacaccggcgcccaccatcgcgtcgcagcccctgtccctgcgcccagaggcgtgccggccagcggcggggggcgcagtgcacacgagggggctggacttcgcctgtgacatctacatctgggcgcccttggccgggacttgtggggtccttctcctgtcactggttatcaccctttactgcgggcgcgccagagtgaagttcagcaggagcgcagacgcccccgcgtaccagcagggccagaaccagctctataacgagctgaatctaggacgaagagaggagtacgatgttttggacaagagacgtggccgggaccctgagatggggggaaagccgagaaggaagaaccctcaggaaggcctgtacaatgaactgcagaaagataagatggcggaggcctacagtgagattgggatgaaaggcgagcgccggaggggcaaggggcacgatggcctttaccagggtctcagtacagccaccaaggacacctacgacgcccttcacatgcaggccctgccccctcgctctagaggatctggagcaacaaacttctcactactcaaacaagcaggtgacgtggaggagaatcccgggcctgggatccacatggccacttacgaggttctctgtgaggtggcgcggaaactgggcacggatgacagggaagtggtattgttcctcctaaacgtgttcatacctcaacccacactggcccaattaattggagctcttagagctttaaaggaggagggcaggttaacgtttcccctgttagcggaatgtctgtttcgtgcaggtcgcagagacctcttgcgcgacctgcttcacttagacccgcgttttttagagcgccacctagcgggcacaatgagttatttcagcccttatcagctcactgttctccacgtagacggggagctgtgtgcgagggatattaggtctttgatatttttaagcaaggacactatagggtctcgcagcacaccacagacattcttacactgggtgtactgtatggaaaacttagacctactgggtcccactgacgtggatgccctaatgtcaatgcttagatctttgtcaagagtagacctacagcgccaagtgcaaaccctaatgggccttcacctttccggcccatcacactcccaacactatcgccatacaccactcgagaccgatttctacgactacaaggacgacgatgacaagactagtggctccggcgagggcagaggaagtctactaacctgcggagatgtggaagaaaatcctggcccacatatgaccgagtacaagcccacggtgcgcctcgccacccgcgacgacgtccccagggccgtacgcaccctcgccgccgcgttcgccgactaccccgccacgcgccacaccgtcgatccggaccgccacatcgagcgggtcaccgagctgcaagaactcttcctcacgcgcgtcgggctcgacatcggcaaggtgtgggtcgcggacgacggcgccgcggtggcggtctggaccacgccggagagcgtcgaagcgggggcggtgttcgccgagatcggcccgcgcatggccgagttgagcggttcccggctggccgcgcagcaacagatggaaggcctcctggcgccgcaccggcccaaggagcccgcgtggttcctggccaccgtcggcgtctcgcccgaccaccagggcaagggtctgggcagcgccgtcgtgctccccggagtggaggcggccgagcgcgccggggtgcccgccttcctggagacctccgcgccccgcaacctccccttctacgagcggctcggcttcaccgtcaccgccgacgtcgaggtgcccgaaggaccgcgcacctggtgcatgacccgcaagcccggtgcctga

SEQ ID NO: 1192 - DNA, 2754 bp, Artificial Sequence
  Synthetic Polynucleotides
atggccttaccagtgaccgccttgctcctgccgctggccttgctgctccacgccgccaggccggaggtgcaactggttgagtctggcggaggactggtgcagcctggaagaagcctgagactgtcttgtgccgccagcggcttcaccttcgacgattatgccatgcactgggtccgacaggcccctggcaaaggacttgaatgggtgtccggcatctcctggaacagcggctctatcggctacgccgattccgtgaagggcagattcaccatcagccgggacaacgccaagaacagcctgtacctccagatgaactccctgagagccgaggacacagccctgtactactgcgccaaagacaaaggcggaggctactacgacttttggagcggcagcgattattggggccagggcacactggtcacagtgtctagcggcggaggcggaagtggaggcggaggatctggcggcggaggctcttcttctgagctgacacaggaccctgccgtgtctgttgctctgggccagacagtgcggattacctgtcagggcgatagcctgagaagctactacgcctcctggtatcagcagaagccaggccaggctcctgtgctggtcatctacggcaagaacaacagacccagcggcatccccgatagattcagcggaagcagctctggcaataccgccagcctgacaattactggcgctcaggccgaggacgaggccgactactactgcaacagcagagatagcagcggctgggttttcggcggaggcacaaaactgacagtgctgacgcgtgagcagaaactgatctcggaagaggatctggcgaagcccaccacgacgccagcgccgcgaccaccaacaccggcgcccaccatcgcgtcgcagcccctgtccctgcgcccagaggcgtgccggccagcggcggggggcgcagtgcacacgagggggctggacttcgcctgtgacatctacatctgggcgcccttggccgggacttgtggggtccttctcctgtcactggttatcaccctttactgcgggcgcgccagagtgaagttcagcaggagcgcagacgcccccgcgtaccagcagggccagaaccagctctataacgagctgaatctaggacgaagagaggagtacgatgttttggacaagagacgtggccgggaccctgagatggggggaaagccgagaaggaagaaccctcaggaaggcctgtacaatgaactgcagaaagataagatggcggaggcctacagtgagattgggatgaaaggcgagcgccggaggggcaaggggcacgatggcctttaccagggtctcagtacagccaccaaggacacctacgacgcccttcacatgcaggccctgccccctcgctctagaggatctggagcaacaaacttctcactactcaaacaagcaggtgacgtggaggagaatcccgggcctgggatccacatggccacttacgaggttctctgtgaggtggcgcggaaactgggcacggatgacagggaagtggtattgttcctcctaaacgtgttcatacctcaacccacactggcccaattaattggagctcttagagctttaaaggaggagggcaggttaacgtttcccctgttagcggaatgtctgtttcgtgcaggtcgcagagacctcttgcgcgacctgcttcacttagacccgcgttttttagagcgccacctagcgggcacaatgagttatttcagcccttatcagctcactgttctccacgtagacggggagctgtgtgcgagggatattaggtctttgatatttttaagcaaggacactatagggtctcgcagcacaccacagacattcttacactgggtgtactgtatggaaaacttagacctactgggtcccactgacgtggatgccctaatgtcaatgcttagatctttgtcaagagtagacctacagcgccaagtgcaaaccctaatgggccttcacctttccggcccatcacactcccaacactatcgccatacaccactcgagaccgatttctacgactacaaggacgacgatgacaagactagtggctccggcgagggcagaggaagtctactaacctgcggagatgtggaagaaaatcctggcccacatatgaccgagtacaagcccacggtgcgcctcgccacccgcgacgacgtccccagggccgtacgcaccctcgccgccgcgttcgccgactaccccgccacgcgccacaccgtcgatccggaccgccacatcgagcgggtcaccgagctgcaagaactcttcctcacgcgcgtcgggctcgacatcggcaaggtgtgggtcgcggacgacggcgccgcggtggcggtctggaccacgccggagagcgtcgaagcgggggcggtgttcgccgagatcggcccgcgcatggccgagttgagcggttcccggctggccgcgcagcaacagatggaaggcctcctggcgccgcaccggcccaaggagcccgcgtggttcctggccaccgtcggcgtctcgcccgaccaccagggcaagggtctgggcagcgccgtcgtgctccccggagtggaggcggccgagcgcgccggggtgcccgccttcctggagacctccgcgccccgcaacctccccttctacgagcggctcggcttcaccgtcaccgccgacgtcgaggtgcccgaaggaccgcgcacctggtgcatgacccgcaagcccggtgcctga

SEQ ID NO: 1193 - DNA, 2898 bp, Artificial Sequence
  Synthetic Polynucleotides
atggccttaccagtgaccgccttgctcctgccgctggccttgctgctccacgccgccaggccggaagtgcagctccagcagtctggacctggcctggttaagcctagccagacactgagcctgacctgtgccatcagcggcgatagcgtgctgagcaacagcgacacctggaactggatcagacagagccctagcagaggactggaatggctgggcagaacctaccacagaagcacttggtacgacgactacgccagctctgtgcggggcagagtgtccatcaatgtggacaccagcaagaaccagtacagcctgcaactgaacgccgtgacacctgaggataccggcgtgtactactgcgccagagacagactccaggacggcaactcttggagcgacgcctttgatgtgtggggccagggcacaatggtcaccgtttctagcggcggaggcggaagtggaggcggaggatctggcggcggaggctctcaatctgctctgacacagcctgccagcgtgtcaggatctcctggacagagcatcaccatctcttgcaccggcaccagctctgatgtcggcggctacaattacgtgtcctggtatcagcagcaccccggcaaggcccctaagctgatgatctacgacgtgtccaacagacccagcggcgtgtccaatagattctccggcagcaagagcggcaacaccgccagcctgacaatttctggactgcaagccgaggacgaggccgactactactgtagcagctacaccagcagcagcacactggtgtacgtgttcggcacaggcaccaaagtgaccgtgcttacgcgtgagcagaaactgatctcggaagaggatctggcgaagcccaccacgacgccagcgccgcgaccaccaacaccggcgcccaccatcgcgtcgcagcccctgtccctgcgcccagaggcgtgccggccagcggcggggggcgcagtgcacacgagggggctggacttcgcctgtgacatctacatctgggcgcccttggccgggacttgtggggtccttctcctgtcactggttatcaccctttactgcaaacggggcagaaagaaactcctgtatatattcaaacaaccatttatgagaccagtacaaactactcaagaggaagatggctgtagctgccgatttccagaagaagaagaaggaggatgtgaactgagagtgaagttcagcaggagcgcagacgcccccgcgtaccagcagggccagaaccagctctataacgagctgaatctaggacgaagagaggagtacgatgttttggacaagagacgtggccgggaccctgagatggggggaaagccgagaaggaagaaccctcaggaaggcctgtacaatgaactgcagaaagataagatggcggaggcctacagtgagattgggatgaaaggcgagcgccggaggggcaaggggcacgatggcctttaccagggtctcagtacagccaccaaggacacctacgacgcccttcacatgcaggccctgccccctcgctctagaggatctggagcaacaaacttctcactactcaaacaagcaggtgacgtggaggagaatcccgggcctgggatccacatggccacttacgaggttctctgtgaggtggcgcggaaactgggcacggatgacagggaagtggtattgttcctcctaaacgtgttcatacctcaacccacactggcccaattaattggagctcttagagctttaaaggaggagggcaggttaacgtttcccctgttagcggaatgtctgtttcgtgcaggtcgcagagacctcttgcgcgacctgcttcacttagacccgcgttttttagagcgccacctagcgggcacaatgagttatttcagcccttatcagctcactgttctccacgtagacggggagctgtgtgcgagggatattaggtctttgatatttttaagcaaggacactatagggtctcgcagcacaccacagacattcttacactgggtgtactgtatggaaaacttagacctactgggtcccactgacgtggatgccctaatgtcaatgcttagatctttgtcaagagtagacctacagcgccaagtgcaaaccctaatgggccttcacctttccggcccatcacactcccaacactatcgccatacaccactcgagaccgatttctacgactacaaggacgacgatgacaagactagtggctccggcgagggcagaggaagtctactaacctgcggagatgtggaagaaaatcctggcccacatatgaccgagtacaagcccacggtgcgcctcgccacccgcgacgacgtccccagggccgtacgcaccctcgccgccgcgttcgccgactaccccgccacgcgccacaccgtcgatccggaccgccacatcgagcgggtcaccgagctgcaagaactcttcctcacgcgcgtcgggctcgacatcggcaaggtgtgggtcgcggacgacggcgccgcggtggcggtctggaccacgccggagagcgtcgaagcgggggcggtgttcgccgagatcggcccgcgcatggccgagttgagcggttcccggctggccgcgcagcaacagatggaaggcctcctggcgccgcaccggcccaaggagcccgcgtggttcctggccaccgtcggcgtctcgcccgaccaccagggcaagggtctgggcagcgccgtcgtgctccccggagtggaggcggccgagcgcgccggggtgcccgccttcctggagacctccgcgccccgcaacctccccttctacgagcggctcggcttcaccgtcaccgccgacgtcgaggtgcccgaaggaccgcgcacctggtgcatgacccgcaagcccggtgcctga

SEQ ID NO: 1194 - DNA, 2775 bp, Artificial Sequence
  Synthetic Polynucleotides
atggccttaccagtgaccgccttgctcctgccgctggccttgctgctccacgccgccaggccgcaggtgcaactggttcagtctggggccgaagtgaagaaacctggggcctctgtgaaggtgtcctgcaaggcttccggctacacctttaccagctacgacatcaactgggtccgacaggccacaggccaaggactggaatggatgggctggatgaaccccaacagcggcaataccggctacgcccagaaattccagggcagagtgaccatgaccagaaacaccagcatcagcaccgcctacatggaactgagcagcctgagaagcgaggacaccgccgtgtactattgcgccagaggcgacagcaactactggtcctactacggcatggacgtgtggggccagggaacactggttacagtttctagcggcggaggcggaagtggaggcggaggatctggcggcggaggctctggcggtggtggatctcaatctgtgctgacccagcctagatccgtgtctggctctcctggacagagcgtgaccatctcttgtaccggcaccagctctgatgtcggcggctacaattacgtgtcctggtatcagcagcaccccggcgaagcccctaagctgattatctacgacgccgacaagcggcccagcggcatcagcaatagattcagctctggcaagagcggcaacaccgccagcctgacaatcagcggactccaggtggaagatgaggccgactactactgctgctcctatgccggcggaagcacctgggttttcggaggcggtacaaaagtgaccgtgctgacgcgtgagcagaaactgatctcggaagaggatctggcgaagcccaccacgacgccagcgccgcgaccaccaacaccggcgcccaccatcgcgtcgcagcccctgtccctgcgcccagaggcgtgccggccagcggcggggggcgcagtgcacacgagggggctggacttcgcctgtgacatctacatctgggcgcccttggccgggacttgtggggtccttctcctgtcactggttatcaccctttactgcgggcgcgccagagtgaagttcagcaggagcgcagacgcccccgcgtaccagcagggccagaaccagctctataacgagctgaatctaggacgaagagaggagtacgatgttttggacaagagacgtggccgggaccctgagatggggggaaagccgagaaggaagaaccctcaggaaggcctgtacaatgaactgcagaaagataagatggcggaggcctacagtgagattgggatgaaaggcgagcgccggaggggcaaggggcacgatggcctttaccagggtctcagtacagccaccaaggacacctacgacgcccttcacatgcaggccctgccccctcgctctagaggatctggagcaacaaacttctcactactcaaacaagcaggtgacgtggaggagaatcccgggcctgggatccacatggccacttacgaggttctctgtgaggtggcgcggaaactgggcacggatgacagggaagtggtattgttcctcctaaacgtgttcatacctcaacccacactggcccaattaattggagctcttagagctttaaaggaggagggcaggttaacgtttcccctgttagcggaatgtctgtttcgtgcaggtcgcagagacctcttgcgcgacctgcttcacttagacccgcgttttttagagcgccacctagcgggcacaatgagttatttcagcccttatcagctcactgttctccacgtagacggggagctgtgtgcgagggatattaggtctttgatatttttaagcaaggacactatagggtctcgcagcacaccacagacattcttacactgggtgtactgtatggaaaacttagacctactgggtcccactgacgtggatgccctaatgtcaatgcttagatctttgtcaagagtagacctacagcgccaagtgcaaaccctaatgggccttcacctttccggcccatcacactcccaacactatcgccatacaccactcgagaccgatttctacgactacaaggacgacgatgacaagactagtggctccggcgagggcagaggaagtctactaacctgcggagatgtggaagaaaatcctggcccacatatgaccgagtacaagcccacggtgcgcctcgccacccgcgacgacgtccccagggccgtacgcaccctcgccgccgcgttcgccgactaccccgccacgcgccacaccgtcgatccggaccgccacatcgagcgggtcaccgagctgcaagaactcttcctcacgcgcgtcgggctcgacatcggcaaggtgtgggtcgcggacgacggcgccgcggtggcggtctggaccacgccggagagcgtcgaagcgggggcggtgttcgccgagatcggcccgcgcatggccgagttgagcggttcccggctggccgcgcagcaacagatggaaggcctcctggcgccgcaccggcccaaggagcccgcgtggttcctggccaccgtcggcgtctcgcccgaccaccagggcaagggtctgggcagcgccgtcgtgctccccggagtggaggcggccgagcgcgccggggtgcccgccttcctggagacctccgcgccccgcaacctccccttctacgagcggctcggcttcaccgtcaccgccgacgtcgaggtgcccgaaggaccgcgcacctggtgcatgacccgcaagcccggtgcctga

SEQ ID NO: 1195 - DNA, 2781 bp, Artificial Sequence
  Synthetic Polynucleotides
atggccttaccagtgaccgccttgctcctgccgctggccttgctgctccacgccgccaggccggaagtgcagctccagcagtctggacctggcctggttaagcctagccagacactgagcctgacctgtgccatcagcggcgatagcgtgtcctctaatagcgccgcctggaactggatcagacagagccctagcagaggactggaatggctgggcagaacctactaccgcagcaagtggtacagcgactacgccgtgtccgtgaagtcccggatcaccatcaatcccgacaccagcaagaaccagttcagcctgcaactgaacagcgtgacccctgaggataccgccgtgtactactgcgccagagatccctacgacttttggagcggctaccccgacgcctttgacatctggggacagggcacaatggtcaccgtttctagcggcggaggcggaagtggaggcggaggatctggcggcggaggctctcaatctgctctgacacagcctgccagcgtgtcaggatctcctggacagagcatcaccatctcttgcaccggcaccagctctgatgtcggcggctacaattacgtgtcctggtatcagcagcaccccggcaaggcccctaaagtgattatcagcgaagtgaacaacagacccagcggcgtgtcccacagattcagcggctctaagtctggcaacaccgccagcctgacaatctctggactgcaagccgaggacgaggccgactacttctgtagcagctacaccagcggcagaaccctgtacgtgttcggcacaggcagcaaagtgacagtgctgggaacgcgtgagcagaaactgatctcggaagaggatctggcgaagcccaccacgacgccagcgccgcgaccaccaacaccggcgcccaccatcgcgtcgcagcccctgtccctgcgcccagaggcgtgccggccagcggcggggggcgcagtgcacacgagggggctggacttcgcctgtgacatctacatctgggcgcccttggccgggacttgtggggtccttctcctgtcactggttatcaccctttactgcgggcgcgccagagtgaagttcagcaggagcgcagacgcccccgcgtaccagcagggccagaaccagctctataacgagctgaatctaggacgaagagaggagtacgatgttttggacaagagacgtggccgggaccctgagatggggggaaagccgagaaggaagaaccctcaggaaggcctgtacaatgaactgcagaaagataagatggcggaggcctacagtgagattgggatgaaaggcgagcgccggaggggcaaggggcacgatggcctttaccagggtctcagtacagccaccaaggacacctacgacgcccttcacatgcaggccctgccccctcgctctagaggatctggagcaacaaacttctcactactcaaacaagcaggtgacgtggaggagaatcccgggcctgggatccacatggccacttacgaggttctctgtgaggtggcgcggaaactgggcacggatgacagggaagtggtattgttcctcctaaacgtgttcatacctcaacccacactggcccaattaattggagctcttagagctttaaaggaggagggcaggttaacgtttcccctgttagcggaatgtctgtttcgtgcaggtcgcagagacctcttgcgcgacctgcttcacttagacccgcgttttttagagcgccacctagcgggcacaatgagttatttcagcccttatcagctcactgttctccacgtagacggggagctgtgtgcgagggatattaggtctttgatatttttaagcaaggacactatagggtctcgcagcacaccacagacattcttacactgggtgtactgtatggaaaacttagacctactgggtcccactgacgtggatgccctaatgtcaatgcttagatctttgtcaagagtagacctacagcgccaagtgcaaaccctaatgggccttcacctttccggcccatcacactcccaacactatcgccatacaccactcgagaccgatttctacgactacaaggacgacgatgacaagactagtggctccggcgagggcagaggaagtctactaacctgcggagatgtggaagaaaatcctggcccacatatgaccgagtacaagcccacggtgcgcctcgccacccgcgacgacgtccccagggccgtacgcaccctcgccgccgcgttcgccgactaccccgccacgcgccacaccgtcgatccggaccgccacatcgagcgggtcaccgagctgcaagaactcttcctcacgcgcgtcgggctcgacatcggcaaggtgtgggtcgcggacgacggcgccgcggtggcggtctggaccacgccggagagcgtcgaagcgggggcggtgttcgccgagatcggcccgcgcatggccgagttgagcggttcccggctggccgcgcagcaacagatggaaggcctcctggcgccgcaccggcccaaggagcccgcgtggttcctggccaccgtcggcgtctcgcccgaccaccagggcaagggtctgggcagcgccgtcgtgctccccggagtggaggcggccgagcgcgccggggtgcccgccttcctggagacctccgcgccccgcaacctccccttctacgagcggctcggcttcaccgtcaccgccgacgtcgaggtgcccgaaggaccgcgcacctggtgcatgacccgcaagcccggtgcctga

SEQ ID NO: 1196 - DNA, 2778 bp, Artificial Sequence
  Synthetic Polynucleotides
atggccttaccagtgaccgccttgctcctgccgctggccttgctgctccacgccgccaggccggaagtgcagctccagcagtctggacctggcctggttaagcctagccagacactgagcctgacctgtgccatcagcggcgattccatgctgagcaacagcgacacctggaactggatcagacagagccccagcagaggcctggaatggctgggcagaacataccacagaagcacttggtacgacgactacgccagctctgtgcggggcagagtgtccatcaatgtggacaccagcaagaaccagtacagcctgcaactgaacgccgtgacacctgaggataccggcgtgtactactgtgccagagtgcggctccaggacggcaattcttggagcgacgcctttgatgtgtggggccagggcacaatggtcaccgtttctagcggcggaggcggaagtggaggcggaggatctggcggcggaggctctcaatctgctctgacacagcctgccagcgcctctggatctcctggacagagcgtgaccatctcctgtaccggcacctcttctgatgtcggcggctacaactacgtgtcctggtatcagcagcaccccggcaaggcccctaagctgatgatctacgacgtgtccaacagacccagcggcgtgtccaatagattctccggcagcaagagcggcaacaccgccagcctgacaatttctggactgcaagccgaggacgaggccgactactactgtagcagctacaccagcagcagcacactgtacgtgttcggcacaggcacccagctcacagttcttacgcgtgagcagaaactgatctcggaagaggatctggcgaagcccaccacgacgccagcgccgcgaccaccaacaccggcgcccaccatcgcgtcgcagcccctgtccctgcgcccagaggcgtgccggccagcggcggggggcgcagtgcacacgagggggctggacttcgcctgtgacatctacatctgggcgcccttggccgggacttgtggggtccttctcctgtcactggttatcaccctttactgcgggcgcgccagagtgaagttcagcaggagcgcagacgcccccgcgtaccagcagggccagaaccagctctataacgagctgaatctaggacgaagagaggagtacgatgttttggacaagagacgtggccgggaccctgagatggggggaaagccgagaaggaagaaccctcaggaaggcctgtacaatgaactgcagaaagataagatggcggaggcctacagtgagattgggatgaaaggcgagcgccggaggggcaaggggcacgatggcctttaccagggtctcagtacagccaccaaggacacctacgacgcccttcacatgcaggccctgccccctcgctctagaggatctggagcaacaaacttctcactactcaaacaagcaggtgacgtggaggagaatcccgggcctgggatccacatggccacttacgaggttctctgtgaggtggcgcggaaactgggcacggatgacagggaagtggtattgttcctcctaaacgtgttcatacctcaacccacactggcccaattaattggagctcttagagctttaaaggaggagggcaggttaacgtttcccctgttagcggaatgtctgtttcgtgcaggtcgcagagacctcttgcgcgacctgcttcacttagacccgcgttttttagagcgccacctagcgggcacaatgagttatttcagcccttatcagctcactgttctccacgtagacggggagctgtgtgcgagggatattaggtctttgatatttttaagcaaggacactatagggtctcgcagcacaccacagacattcttacactgggtgtactgtatggaaaacttagacctactgggtcccactgacgtggatgccctaatgtcaatgcttagatctttgtcaagagtagacctacagcgccaagtgcaaaccctaatgggccttcacctttccggcccatcacactcccaacactatcgccatacaccactcgagaccgatttctacgactacaaggacgacgatgacaagactagtggctccggcgagggcagaggaagtctactaacctgcggagatgtggaagaaaatcctggcccacatatgaccgagtacaagcccacggtgcgcctcgccacccgcgacgacgtccccagggccgtacgcaccctcgccgccgcgttcgccgactaccccgccacgcgccacaccgtcgatccggaccgccacatcgagcgggtcaccgagctgcaagaactcttcctcacgcgcgtcgggctcgacatcggcaaggtgtgggtcgcggacgacggcgccgcggtggcggtctggaccacgccggagagcgtcgaagcgggggcggtgttcgccgagatcggcccgcgcatggccgagttgagcggttcccggctggccgcgcagcaacagatggaaggcctcctggcgccgcaccggcccaaggagcccgcgtggttcctggccaccgtcggcgtctcgcccgaccaccagggcaagggtctgggcagcgccgtcgtgctccccggagtggaggcggccgagcgcgccggggtgcccgccttcctggagacctccgcgccccgcaacctccccttctacgagcggctcggcttcaccgtcaccgccgacgtcgaggtgcccgaaggaccgcgcacctggtgcatgacccgcaagcccggtgcctga

SEQ ID NO: 1197 - DNA, 2862 bp, Artificial Sequence
  Synthetic Polynucleotides
atggccttaccagtgaccgccttgctcctgccgctggccttgctgctccacgccgccaggccggacatccagatgacacagactacatcctccctgtctgcctctctgggagacagagtcaccatcagttgcagggcaagtcaggacattagtaaatatttaaattggtatcagcagaaaccagatggaactgttaaactcctgatctaccatacatcaagattacactcaggagtcccatcaaggttcagtggcagtgggtctggaacagattattctctcaccattagcaacctggagcaagaagatattgccacttacttttgccaacagggtaatacgcttccgtacacgttcggaggggggaccaagctggagatcacaggtggcggtggctcgggcggtggtgggtcgggtggcggcggatctgaggtgaaactgcaggagtcaggacctggcctggtggcgccctcacagagcctgtccgtcacatgcactgtctcaggggtctcattacccgactatggtgtaagctggattcgccagcctccacgaaagggtctggagtggctgggagtaatatggggtagtgaaaccacatactataattcagctctcaaatccagactgaccatcatcaaggacaactccaagagccaagttttcttaaaaatgaacagtctgcaaactgatgacacagccatttactactgtgccaaacattattactacggtggtagctatgctatggactactggggtcaaggaacctcagtcaccgtctcctcacgcgtagagcagaaactgatctcggaagaggatctggcgaagcccaccacgacgccagcgccgcgaccaccaacaccggcgcccaccatcgcgtcgcagcccctgtccctgcgcccagaggcgtgccggccagcggcggggggcgcagtgcacacgagggggctggacttcgcctgtgacatctacatctgggcgcccttggccgggacttgtggggtccttctcctgtcactggttatcaccctttactgcaaacggggcagaaagaaactcctgtatatattcaaacaaccatttatgagaccagtacaaactactcaagaggaagatggctgtagctgccgatttccagaagaagaagaaggaggatgtgaactgagagtgaagttcagcaggagcgcagacgcccccgcgtaccagcagggccagaaccagctctataacgagctgaatctaggacgaagagaggagtacgatgttttggacaagagacgtggccgggaccctgagatggggggaaagccgagaaggaagaaccctcaggaaggcctgtacaatgaactgcagaaagataagatggcggaggcctacagtgagattgggatgaaaggcgagcgccggaggggcaaggggcacgatggcctttaccagggtctcagtacagccaccaaggacacctacgacgcccttcacatgcaggccctgccccctcgctctagaggatctggagcaacaaacttctcactactcaaacaagcaggtgacgtggaggagaatcccgggcctgggatccacatggccacttacgaggttctctgtgaggtggcgcggaaactgggcacggatgacagggaagtggtattgttcctcctaaacgtgttcatacctcaacccacactggcccaattaattggagctcttagagctttaaaggaggagggcaggttaacgtttcccctgttagcggaatgtctgtttcgtgcaggtcgcagagacctcttgcgcgacctgcttcacttagacccgcgttttttagagcgccacctagcgggcacaatgagttatttcagcccttatcagctcactgttctccacgtagacggggagctgtgtgcgagggatattaggtctttgatatttttaagcaaggacactatagggtctcgcagcacaccacagacattcttacactgggtgtactgtatggaaaacttagacctactgggtcccactgacgtggatgccctaatgtcaatgcttagatctttgtcaagagtagacctacagcgccaagtgcaaaccctaatgggccttcacctttccggcccatcacactcccaacactatcgccatacaccactcgagaccgatttctacgactacaaggacgacgatgacaagactagtggctccggcgagggcagaggaagtctactaacctgcggagatgtggaagaaaatcctggcccacatatgaccgagtacaagcccacggtgcgcctcgccacccgcgacgacgtccccagggccgtacgcaccctcgccgccgcgttcgccgactaccccgccacgcgccacaccgtcgatccggaccgccacatcgagcgggtcaccgagctgcaagaactcttcctcacgcgcgtcgggctcgacatcggcaaggtgtgggtcgcggacgacggcgccgcggtggcggtctggaccacgccggagagcgtcgaagcgggggcggtgttcgccgagatcggcccgcgcatggccgagttgagcggttcccggctggccgcgcagcaacagatggaaggcctcctggcgccgcaccggcccaaggagcccgcgtggttcctggccaccgtcggcgtctcgcccgaccaccagggcaagggtctgggcagcgccgtcgtgctccccggagtggaggcggccgagcgcgccggggtgcccgccttcctggagacctccgcgccccgcaacctccccttctacgagcggctcggcttcaccgtcaccgccgacgtcgaggtgcccgaaggaccgcgcacctggtgcatgacccgcaagcccggtgcctga

SEQ ID NO: 1198 - DNA, 2862 bp, Artificial Sequence
  Synthetic Polynucleotides
atggccttaccagtgaccgccttgctcctgccgctggccttgctgctccacgccgccaggccggagatcgtgatgacccagagccctgccaccctgtctctgagccctggcgaaagagccaccctgagctgtagagccagccaggacatcagcaagtacctgaactggtatcagcagaagcccggccaggcccccagactgctgatctaccacaccagcagactgcacagcggcatccccgccagattttctggctctggcagcggcaccgactacaccctgacaatcagcagcctccagcccgaggacttcgccgtgtacttctgtcagcaaggcaacaccctgccctacaccttcggccagggcaccaagctggaaatcaagggcggaggcggaagtggaggcggaggatctggcggcggaggctctcaggtgcaactccaggaatctggccctggcctcgtgaagcccagcgagacactgagcctgacctgtaccgtgtccggcgtgtccctgcctgactatggcgtgtcctggatcagacagccccctggcaagggcctggaatggatcggagtgatttggggcagcgaaaccacctactacaacagctccctgaagtccagagtgaccatctccaaggacaactccaagaaccaggtgtccctgaagctgagcagcgtgacagccgccgacaccgccgtgtattactgcgccaagcactactactacggcggcagctacgctatggactactggggccagggaaccctcgtgaccgtgtctagtacgcgtgagcagaaactgatctcggaagaggatctggcgaagcccaccacgacgccagcgccgcgaccaccaacaccggcgcccaccatcgcgtcgcagcccctgtccctgcgcccagaggcgtgccggccagcggcggggggcgcagtgcacacgagggggctggacttcgcctgtgacatctacatctgggcgcccttggccgggacttgtggggtccttctcctgtcactggttatcaccctttactgcaaacggggcagaaagaaactcctgtatatattcaaacaaccatttatgagaccagtacaaactactcaagaggaagatggctgtagctgccgatttccagaagaagaagaaggaggatgtgaactgagagtgaagttcagcaggagcgcagacgcccccgcgtaccagcagggccagaaccagctctataacgagctgaatctaggacgaagagaggagtacgatgttttggacaagagacgtggccgggaccctgagatggggggaaagccgagaaggaagaaccctcaggaaggcctgtacaatgaactgcagaaagataagatggcggaggcctacagtgagattgggatgaaaggcgagcgccggaggggcaaggggcacgatggcctttaccagggtctcagtacagccaccaaggacacctacgacgcccttcacatgcaggccctgccccctcgctctagaggatctggagcaacaaacttctcactactcaaacaagcaggtgacgtggaggagaatcccgggcctgggatccacatggccacttacgaggttctctgtgaggtggcgcggaaactgggcacggatgacagggaagtggtattgttcctcctaaacgtgttcatacctcaacccacactggcccaattaattggagctcttagagctttaaaggaggagggcaggttaacgtttcccctgttagcggaatgtctgtttcgtgcaggtcgcagagacctcttgcgcgacctgcttcacttagacccgcgttttttagagcgccacctagcgggcacaatgagttatttcagcccttatcagctcactgttctccacgtagacggggagctgtgtgcgagggatattaggtctttgatatttttaagcaaggacactatagggtctcgcagcacaccacagacattcttacactgggtgtactgtatggaaaacttagacctactgggtcccactgacgtggatgccctaatgtcaatgcttagatctttgtcaagagtagacctacagcgccaagtgcaaaccctaatgggccttcacctttccggcccatcacactcccaacactatcgccatacaccactcgagaccgatttctacgactacaaggacgacgatgacaagactagtggctccggcgagggcagaggaagtctactaacctgcggagatgtggaagaaaatcctggcccacatatgaccgagtacaagcccacggtgcgcctcgccacccgcgacgacgtccccagggccgtacgcaccctcgccgccgcgttcgccgactaccccgccacgcgccacaccgtcgatccggaccgccacatcgagcgggtcaccgagctgcaagaactcttcctcacgcgcgtcgggctcgacatcggcaaggtgtgggtcgcggacgacggcgccgcggtggcggtctggaccacgccggagagcgtcgaagcgggggcggtgttcgccgagatcggcccgcgcatggccgagttgagcggttcccggctggccgcgcagcaacagatggaaggcctcctggcgccgcaccggcccaaggagcccgcgtggttcctggccaccgtcggcgtctcgcccgaccaccagggcaagggtctgggcagcgccgtcgtgctccccggagtggaggcggccgagcgcgccggggtgcccgccttcctggagacctccgcgccccgcaacctccccttctacgagcggctcggcttcaccgtcaccgccgacgtcgaggtgcccgaaggaccgcgcacctggtgcatgacccgcaagcccggtgcctga

SEQ ID NO: 1199 - DNA, 2862 bp, Artificial Sequence
  Synthetic Polynucleotides
atggccttaccagtgaccgccttgctcctgccgctggccttgctgctccacgccgccaggccggagatcgtgatgacccagagccctgccaccctgtctctgagccctggcgaaagagccaccctgagctgtagagccagccaggacatcagcaagtacctgaactggtatcagcagaagcccggccaggcccccagactgctgatctaccacaccagcagactgcacagcggcatccccgccagattttctggctctggcagcggcaccgactacaccctgacaatcagcagcctccagcccgaggacttcgccgtgtacttctgtcagcaaggcaacaccctgccctacaccttcggccagggcaccaagctggaaatcaagggcggaggcggaagtggaggcggaggatctggcggcggaggctctcaggtgcaactccaggaatctggccctggcctcgtgaagcccagcgagacactgagcctgacctgtaccgtgtccggcgtgtccctgcctgactatggcgtgtcctggatcagacagccccctggcaagggcctggaatggatcggagtgatttggggcagcgaaaccacctactaccaaagctccctgaagtccagagtgaccatctccaaggacaactccaagaaccaggtgtccctgaagctgagcagcgtgacagccgccgacaccgccgtgtattactgcgccaagcactactactacggcggcagctacgctatggactactggggccagggaaccctcgtgaccgtgtctagtacgcgtgagcagaaactgatctcggaagaggatctggcgaagcccaccacgacgccagcgccgcgaccaccaacaccggcgcccaccatcgcgtcgcagcccctgtccctgcgcccagaggcgtgccggccagcggcggggggcgcagtgcacacgagggggctggacttcgcctgtgacatctacatctgggcgcccttggccgggacttgtggggtccttctcctgtcactggttatcaccctttactgcaaacggggcagaaagaaactcctgtatatattcaaacaaccatttatgagaccagtacaaactactcaagaggaagatggctgtagctgccgatttccagaagaagaagaaggaggatgtgaactgagagtgaagttcagcaggagcgcagacgcccccgcgtaccagcagggccagaaccagctctataacgagctgaatctaggacgaagagaggagtacgatgttttggacaagagacgtggccgggaccctgagatggggggaaagccgagaaggaagaaccctcaggaaggcctgtacaatgaactgcagaaagataagatggcggaggcctacagtgagattgggatgaaaggcgagcgccggaggggcaaggggcacgatggcctttaccagggtctcagtacagccaccaaggacacctacgacgcccttcacatgcaggccctgccccctcgctctagaggatctggagcaacaaacttctcactactcaaacaagcaggtgacgtggaggagaatcccgggcctgggatccacatggccacttacgaggttctctgtgaggtggcgcggaaactgggcacggatgacagggaagtggtattgttcctcctaaacgtgttcatacctcaacccacactggcccaattaattggagctcttagagctttaaaggaggagggcaggttaacgtttcccctgttagcggaatgtctgtttcgtgcaggtcgcagagacctcttgcgcgacctgcttcacttagacccgcgttttttagagcgccacctagcgggcacaatgagttatttcagcccttatcagctcactgttctccacgtagacggggagctgtgtgcgagggatattaggtctttgatatttttaagcaaggacactatagggtctcgcagcacaccacagacattcttacactgggtgtactgtatggaaaacttagacctactgggtcccactgacgtggatgccctaatgtcaatgcttagatctttgtcaagagtagacctacagcgccaagtgcaaaccctaatgggccttcacctttccggcccatcacactcccaacactatcgccatacaccactcgagaccgatttctacgactacaaggacgacgatgacaagactagtggctccggcgagggcagaggaagtctactaacctgcggagatgtggaagaaaatcctggcccacatatgaccgagtacaagcccacggtgcgcctcgccacccgcgacgacgtccccagggccgtacgcaccctcgccgccgcgttcgccgactaccccgccacgcgccacaccgtcgatccggaccgccacatcgagcgggtcaccgagctgcaagaactcttcctcacgcgcgtcgggctcgacatcggcaaggtgtgggtcgcggacgacggcgccgcggtggcggtctggaccacgccggagagcgtcgaagcgggggcggtgttcgccgagatcggcccgcgcatggccgagttgagcggttcccggctggccgcgcagcaacagatggaaggcctcctggcgccgcaccggcccaaggagcccgcgtggttcctggccaccgtcggcgtctcgcccgaccaccagggcaagggtctgggcagcgccgtcgtgctccccggagtggaggcggccgagcgcgccggggtgcccgccttcctggagacctccgcgccccgcaacctccccttctacgagcggctcggcttcaccgtcaccgccgacgtcgaggtgcccgaaggaccgcgcacctggtgcatgacccgcaagcccggtgcctga

SEQ ID NO: 1200 - DNA, 2865 bp, Artificial Sequence
  Synthetic Polynucleotides
atggccttaccagtgaccgccttgctcctgccgctggccttgctgctccacgccgccaggccggacgagatcgtgctgacacagagccccgccaccctgtcactgtctccaggcgaaagagccaccctgagctgtagcgccagcagcagcgtgtcctacatgcactggtatcagcagaagcccggccaggcccccagactgctgatctacgataccagcaagctggcctccggcatccccgccagattttctggcagcggctccggcaccgacttcaccctgacaatcagcagcctggaacccgaggacgtggccgtgtactactgttttcaaggcagcgtgtaccccttcaccttcggccagggcaccaagctggaaatcaagagaggtggcggtggctcgggcggtggtgggtcgggtggcggcggatctcaggtgcagctccaggaatctggccctggcctcgtgaagcctagccagaccctgagcctgacctgtaccgtgtctggcggcagcatcagcacaagcggcatgggcgtgggctggatcagacagcaccctggcaagggcctggaatggatcggccacatttggtgggacgacgacaagcggtacaaccccgccctgaagtccagagtgaccatcagcgtggacaccagcaagaaccagttcagcctgaagctgagcagcgtgacagccgccgataccgccgtgtattattgcgcccggatggaactgtggtcctactacttcgactactggggccagggaaccctcgtgaccgtgtctagtacgcgtgagcagaaactgatctcggaagaggatctggcgaagcccaccacgacgccagcgccgcgaccaccaacaccggcgcccaccatcgcgtcgcagcccctgtccctgcgcccagaggcgtgccggccagcggcggggggcgcagtgcacacgagggggctggacttcgcctgtgacatctacatctgggcgcccttggccgggacttgtggggtccttctcctgtcactggttatcaccctttactgcaaacggggcagaaagaaactcctgtatatattcaaacaaccatttatgagaccagtacaaactactcaagaggaagatggctgtagctgccgatttccagaagaagaagaaggaggatgtgaactgagagtgaagttcagcaggagcgcagacgcccccgcgtaccagcagggccagaaccagctctataacgagctgaatctaggacgaagagaggagtacgatgttttggacaagagacgtggccgggaccctgagatggggggaaagccgagaaggaagaaccctcaggaaggcctgtacaatgaactgcagaaagataagatggcggaggcctacagtgagattgggatgaaaggcgagcgccggaggggcaaggggcacgatggcctttaccagggtctcagtacagccaccaaggacacctacgacgcccttcacatgcaggccctgccccctcgctctagaggatctggagcaacaaacttctcactactcaaacaagcaggtgacgtggaggagaatcccgggcctgggatccacatggccacttacgaggttctctgtgaggtggcgcggaaactgggcacggatgacagggaagtggtattgttcctcctaaacgtgttcatacctcaacccacactggcccaattaattggagctcttagagctttaaaggaggagggcaggttaacgtttcccctgttagcggaatgtctgtttcgtgcaggtcgcagagacctcttgcgcgacctgcttcacttagacccgcgttttttagagcgccacctagcgggcacaatgagttatttcagcccttatcagctcactgttctccacgtagacggggagctgtgtgcgagggatattaggtctttgatatttttaagcaaggacactatagggtctcgcagcacaccacagacattcttacactgggtgtactgtatggaaaacttagacctactgggtcccactgacgtggatgccctaatgtcaatgcttagatctttgtcaagagtagacctacagcgccaagtgcaaaccctaatgggccttcacctttccggcccatcacactcccaacactatcgccatacaccactcgagaccgatttctacgactacaaggacgacgatgacaagactagtggctccggcgagggcagaggaagtctactaacctgcggagatgtggaagaaaatcctggcccacatatgaccgagtacaagcccacggtgcgcctcgccacccgcgacgacgtccccagggccgtacgcaccctcgccgccgcgttcgccgactaccccgccacgcgccacaccgtcgatccggaccgccacatcgagcgggtcaccgagctgcaagaactcttcctcacgcgcgtcgggctcgacatcggcaaggtgtgggtcgcggacgacggcgccgcggtggcggtctggaccacgccggagagcgtcgaagcgggggcggtgttcgccgagatcggcccgcgcatggccgagttgagcggttcccggctggccgcgcagcaacagatggaaggcctcctggcgccgcaccggcccaaggagcccgcgtggttcctggccaccgtcggcgtctcgcccgaccaccagggcaagggtctgggcagcgccgtcgtgctccccggagtggaggcggccgagcgcgccggggtgcccgccttcctggagacctccgcgccccgcaacctccccttctacgagcggctcggcttcaccgtcaccgccgacgtcgaggtgcccgaaggaccgcgcacctggtgcatgacccgcaagcccggtgcctga

SEQ ID NO: 1201 - DNA, 2886 bp, Artificial Sequence
  Synthetic Polynucleotides
atggccctgcctgtgacagctctgctgctgcctctggcactgctgctgcacgccgccagacctgacatccagctgacacagagccctgccagcctggccgtgtctctgggacagagagccaccatcagctgcaaggccagccagagcgtggactacgacggcgacagctacctgaactggtatcagcagatccccggccagccccccaagctgctgatctacgatgccagcaacctggtgtccggcatcccccctagattttccggcagcggctccggcaccgacttcaccctgaatatccaccccgtggaaaaggtggacgccgccacctaccactgccagcagagcaccgaagatccctggacctttggcggaggcaccaagctggaaatcaagggaggcggaggaagtggcggcggaggatctgggggaggcggaagccaggtacagctccaacagtcaggggccgagctggtacgcccagggtccagcgtcaaaatatcatgtaaggcatctggctacgccttcagctcttactggatgaattgggtgaaacaacggccaggccagggactggagtggattggtcaaatttggccaggagacggggacacaaattacaacggaaaattcaagggaaaggccacacttaccgccgatgaaagtagttcaaccgcttatatgcagctgtcctccctcgcttctgaggactctgctgtgtacttttgcgcacgccgagaaaccaccactgtgggaagatactactacgctatggattattggggacagggcacaaccgtgaccgttagcagtacgcgtgagcagaaactgatctcggaagaggatctggcgaagcccaccacgacgccagcgccgcgaccaccaacaccggcgcccaccatcgcgtcgcagcccctgtccctgcgcccagaggcgtgccggccagcggcggggggcgcagtgcacacgagggggctggacttcgcctgtgacatctacatctgggcgcccttggccgggacttgtggggtccttctcctgtcactggttatcaccctttactgcaaacggggcagaaagaaactcctgtatatattcaaacaaccatttatgagaccagtacaaactactcaagaggaagatggctgtagctgccgatttccagaagaagaagaaggaggatgtgaactgagagtgaagttcagcaggagcgcagacgcccccgcgtaccagcagggccagaaccagctctataacgagctgaatctaggacgaagagaggagtacgatgttttggacaagagacgtggccgggaccctgagatggggggaaagccgagaaggaagaaccctcaggaaggcctgtacaatgaactgcagaaagataagatggcggaggcctacagtgagattgggatgaaaggcgagcgccggaggggcaaggggcacgatggcctttaccagggtctcagtacagccaccaaggacacctacgacgcccttcacatgcaggccctgccccctcgctctagaggatctggagcaacaaacttctcactactcaaacaagcaggtgacgtggaggagaatcccgggcctgggatccacatggccacttacgaggttctctgtgaggtggcgcggaaactgggcacggatgacagggaagtggtattgttcctcctaaacgtgttcatacctcaacccacactggcccaattaattggagctcttagagctttaaaggaggagggcaggttaacgtttcccctgttagcggaatgtctgtttcgtgcaggtcgcagagacctcttgcgcgacctgcttcacttagacccgcgttttttagagcgccacctagcgggcacaatgagttatttcagcccttatcagctcactgttctccacgtagacggggagctgtgtgcgagggatattaggtctttgatatttttaagcaaggacactatagggtctcgcagcacaccacagacattcttacactgggtgtactgtatggaaaacttagacctactgggtcccactgacgtggatgccctaatgtcaatgcttagatctttgtcaagagtagacctacagcgccaagtgcaaaccctaatgggccttcacctttccggcccatcacactcccaacactatcgccatacaccactcgagaccgatttctacgactacaaggacgacgatgacaagactagtggctccggcgagggcagaggaagtctactaacctgcggagatgtggaagaaaatcctggcccacatatgaccgagtacaagcccacggtgcgcctcgccacccgcgacgacgtccccagggccgtacgcaccctcgccgccgcgttcgccgactaccccgccacgcgccacaccgtcgatccggaccgccacatcgagcgggtcaccgagctgcaagaactcttcctcacgcgcgtcgggctcgacatcggcaaggtgtgggtcgcggacgacggcgccgcggtggcggtctggaccacgccggagagcgtcgaagcgggggcggtgttcgccgagatcggcccgcgcatggccgagttgagcggttcccggctggccgcgcagcaacagatggaaggcctcctggcgccgcaccggcccaaggagcccgcgtggttcctggccaccgtcggcgtctcgcccgaccaccagggcaagggtctgggcagcgccgtcgtgctccccggagtggaggcggccgagcgcgccggggtgcccgccttcctggagacctccgcgccccgcaacctccccttctacgagcggctcggcttcaccgtcaccgccgacgtcgaggtgcccgaaggaccgcgcacctggtgcatgacccgcaagcccggtgcctga

SEQ ID NO: 1202 - DNA, 2883 bp, Artificial Sequence
  Synthetic Polynucleotides
atggccttaccagtgaccgccttgctcctgccgctggccttgctgctccacgccgccaggccggacatcgtgatgacccaggccgctcccagcatccctgtgacacctggcgagagcgtgtccatctcctgccggtctagcaagagcctgctgaacagcaacggcaatacctacctgtactggttcctccagcggccaggccagtctccccaactgctgatctaccggatgagcaacctggcctccggcgtgcccgatagattttctggcagcggctccggcaccgccttcaccctgagaatcagcagagtggaagccgaggacgtgggcgtgtactactgtatgcagcacctggaataccccttcaccttcggagccggcaccaagctggaactgaagagaggcggaggcggaagtggaggcggaggatctggcggcggaggctctgaagtgcaactccagcagagcggccctgagctgattaagcctggggccagcgtgaagatgagctgcaaggccagcggctacaccttcaccagctacgtgatgcactgggtcaagcagaagcccggccagggcctggaatggatcggctacatcaacccctacaacgatggcaccaagtacaacgagaagttcaagggcaaggccaccctgaccagcgacaagagcagcagcaccgcctacatggaactgagcagcctgacaagcgaggacagcgccgtgtactattgcgccagaggcacctactactacggcagccgggtgttcgactattggggccagggcaccacactgaccgtgtcctctacgcgtgagcagaaactgatctcggaagaggatctggcgaagcccaccacgacgccagcgccgcgaccaccaacaccggcgcccaccatcgcgtcgcagcccctgtccctgcgcccagaggcgtgccggccagcggcggggggcgcagtgcacacgagggggctggacttcgcctgtgacatctacatctgggcgcccttggccgggacttgtggggtccttctcctgtcactggttatcaccctttactgcaaacggggcagaaagaaactcctgtatatattcaaacaaccatttatgagaccagtacaaactactcaagaggaagatggctgtagctgccgatttccagaagaagaagaaggaggatgtgaactgagagtgaagttcagcaggagcgcagacgcccccgcgtaccagcagggccagaaccagctctataacgagctgaatctaggacgaagagaggagtacgatgttttggacaagagacgtggccgggaccctgagatggggggaaagccgagaaggaagaaccctcaggaaggcctgtacaatgaactgcagaaagataagatggcggaggcctacagtgagattgggatgaaaggcgagcgccggaggggcaaggggcacgatggcctttaccagggtctcagtacagccaccaaggacacctacgacgcccttcacatgcaggccctgccccctcgctctagaggatctggagcaacaaacttctcactactcaaacaagcaggtgacgtggaggagaatcccgggcctgggatccacatggccacttacgaggttctctgtgaggtggcgcggaaactgggcacggatgacagggaagtggtattgttcctcctaaacgtgttcatacctcaacccacactggcccaattaattggagctcttagagctttaaaggaggagggcaggttaacgtttcccctgttagcggaatgtctgtttcgtgcaggtcgcagagacctcttgcgcgacctgcttcacttagacccgcgttttttagagcgccacctagcgggcacaatgagttatttcagcccttatcagctcactgttctccacgtagacggggagctgtgtgcgagggatattaggtctttgatatttttaagcaaggacactatagggtctcgcagcacaccacagacattcttacactgggtgtactgtatggaaaacttagacctactgggtcccactgacgtggatgccctaatgtcaatgcttagatctttgtcaagagtagacctacagcgccaagtgcaaaccctaatgggccttcacctttccggcccatcacactcccaacactatcgccatacaccactcgagaccgatttctacgactacaaggacgacgatgacaagactagtggctccggcgagggcagaggaagtctactaacctgcggagatgtggaagaaaatcctggcccacatatgaccgagtacaagcccacggtgcgcctcgccacccgcgacgacgtccccagggccgtacgcaccctcgccgccgcgttcgccgactaccccgccacgcgccacaccgtcgatccggaccgccacatcgagcgggtcaccgagctgcaagaactcttcctcacgcgcgtcgggctcgacatcggcaaggtgtgggtcgcggacgacggcgccgcggtggcggtctggaccacgccggagagcgtcgaagcgggggcggtgttcgccgagatcggcccgcgcatggccgagttgagcggttcccggctggccgcgcagcaacagatggaaggcctcctggcgccgcaccggcccaaggagcccgcgtggttcctggccaccgtcggcgtctcgcccgaccaccagggcaagggtctgggcagcgccgtcgtgctccccggagtggaggcggccgagcgcgccggggtgcccgccttcctggagacctccgcgccccgcaacctccccttctacgagcggctcggcttcaccgtcaccgccgacgtcgaggtgcccgaaggaccgcgcacctggtgcatgacccgcaagcccggtgcctga

SEQ ID NO: 1203 - DNA, 2877 bp, Artificial Sequence
  Synthetic Polynucleotides
atggccttaccagtgaccgccttgctcctgccgctggccttgctgctccacgccgccaggccggagatcgtgctgacacagagccccgatttccagagcgtgacccctaaagaaaaagtgaccatcacctgtcgggccagcgagagcgtggacacattcggcatcagcttcatgaactggttccagcagaagcccgatcagagccccaagctgctgattcacgccgccagcaatcaaggcagcggagtgcctagcagattttccggctctggcagcggcaccgatttcaccctgaccatcaatagcctggaagccgaggatgccgccacctactactgccagcagagcaaagaggtgcccttcacctttggcggaggcaccaaggtggaaatcaaaggcggaggcggaagtggaggcggaggatctggcggcggaggctctgaagtgcagctcgttgagtctggtggcggactggttcaacctggcggaagcctgagactgtcttgtgccgccagcggcttcaccttcagcagctcttggatgaactgggtccgacaggcccctggcaaaggactggaatgggtcggaagaatctaccccggcgacggcgacaccaactacaacggcaagttcaagggcagattcaccatcagccgggacgacagcaagaacagcctgtacctgcagatgaactccctgaaaaccgaggacaccgccgtgtactactgtgccagatccggcttcatcaccaccgtgctggacttcgattattggggccagggcaccctggtcaccgtttcttctacgcgtgagcagaaactgatctcggaagaggatctggcgaagcccaccacgacgccagcgccgcgaccaccaacaccggcgcccaccatcgcgtcgcagcccctgtccctgcgcccagaggcgtgccggccagcggcggggggcgcagtgcacacgagggggctggacttcgcctgtgacatctacatctgggcgcccttggccgggacttgtggggtccttctcctgtcactggttatcaccctttactgcaaacggggcagaaagaaactcctgtatatattcaaacaaccatttatgagaccagtacaaactactcaagaggaagatggctgtagctgccgatttccagaagaagaagaaggaggatgtgaactgagagtgaagttcagcaggagcgcagacgcccccgcgtaccagcagggccagaaccagctctataacgagctgaatctaggacgaagagaggagtacgatgttttggacaagagacgtggccgggaccctgagatggggggaaagccgagaaggaagaaccctcaggaaggcctgtacaatgaactgcagaaagataagatggcggaggcctacagtgagattgggatgaaaggcgagcgccggaggggcaaggggcacgatggcctttaccagggtctcagtacagccaccaaggacacctacgacgcccttcacatgcaggccctgccccctcgctctagaggatctggagcaacaaacttctcactactcaaacaagcaggtgacgtggaggagaatcccgggcctgggatccacatggccacttacgaggttctctgtgaggtggcgcggaaactgggcacggatgacagggaagtggtattgttcctcctaaacgtgttcatacctcaacccacactggcccaattaattggagctcttagagctttaaaggaggagggcaggttaacgtttcccctgttagcggaatgtctgtttcgtgcaggtcgcagagacctcttgcgcgacctgcttcacttagacccgcgttttttagagcgccacctagcgggcacaatgagttatttcagcccttatcagctcactgttctccacgtagacggggagctgtgtgcgagggatattaggtctttgatatttttaagcaaggacactatagggtctcgcagcacaccacagacattcttacactgggtgtactgtatggaaaacttagacctactgggtcccactgacgtggatgccctaatgtcaatgcttagatctttgtcaagagtagacctacagcgccaagtgcaaaccctaatgggccttcacctttccggcccatcacactcccaacactatcgccatacaccactcgagaccgatttctacgactacaaggacgacgatgacaagactagtggctccggcgagggcagaggaagtctactaacctgcggagatgtggaagaaaatcctggcccacatatgaccgagtacaagcccacggtgcgcctcgccacccgcgacgacgtccccagggccgtacgcaccctcgccgccgcgttcgccgactaccccgccacgcgccacaccgtcgatccggaccgccacatcgagcgggtcaccgagctgcaagaactcttcctcacgcgcgtcgggctcgacatcggcaaggtgtgggtcgcggacgacggcgccgcggtggcggtctggaccacgccggagagcgtcgaagcgggggcggtgttcgccgagatcggcccgcgcatggccgagttgagcggttcccggctggccgcgcagcaacagatggaaggcctcctggcgccgcaccggcccaaggagcccgcgtggttcctggccaccgtcggcgtctcgcccgaccaccagggcaagggtctgggcagcgccgtcgtgctccccggagtggaggcggccgagcgcgccggggtgcccgccttcctggagacctccgcgccccgcaacctccccttctacgagcggctcggcttcaccgtcaccgccgacgtcgaggtgcccgaaggaccgcgcacctggtgcatgacccgcaagcccggtgcctga

SEQ ID NO: 1204 - DNA, 2865 bp, Artificial Sequence
  Synthetic Polynucleotides
atggccttaccagtgaccgccttgctcctgccgctggccttgctgctccacgccgccaggccggccattcagctcacacagagcccttctagcctgagcgcctctgtgggcgacagagtgaccatcacatgtagagccagccagggcatcagcagcgcccagcagaaacctggaaaggcccctaagctgctgatcctggcctggtacagcagcctggaaagcggagtgcctagcagattcagcggctacgatgcctctggcagcggcaccgatttcaccctgacaatatccagcctccagcctgaggacttcgccacctactactgccagcagttcaacagctacccctacaccttcggccagggcaccaagctggaaatcaaaggcggaggcggaagtggaggcggaggatctggcggcggaggctctgaagtgcaactggttcagagcggagccgaagtgaagaagcctggcgagagcctgaagattagctgcaaaggctccggctacagcttcagcagctcttggatcggctgggtccgacagatgcctggcaaaggactggaatggatgggcatcatctaccccgacgacagcgacaccagatacagccctagcttccagggccaagtgacaatcagcgccgacaagagcatcagaaccgcctacctccagtggtcctctctgaaggccagcgataccgccatgtactactgcgccagacacgtgaccatgatctggggagtgattatcgacttctggggccagggaaccctggtcacagtctcttctacgcgtgagcagaaactgatctcggaagaggatctggcgaagcccaccacgacgccagcgccgcgaccaccaacaccggcgcccaccatcgcgtcgcagcccctgtccctgcgcccagaggcgtgccggccagcggcggggggcgcagtgcacacgagggggctggacttcgcctgtgacatctacatctgggcgcccttggccgggacttgtggggtccttctcctgtcactggttatcaccctttactgcaaacggggcagaaagaaactcctgtatatattcaaacaaccatttatgagaccagtacaaactactcaagaggaagatggctgtagctgccgatttccagaagaagaagaaggaggatgtgaactgagagtgaagttcagcaggagcgcagacgcccccgcgtaccagcagggccagaaccagctctataacgagctgaatctaggacgaagagaggagtacgatgttttggacaagagacgtggccgggaccctgagatggggggaaagccgagaaggaagaaccctcaggaaggcctgtacaatgaactgcagaaagataagatggcggaggcctacagtgagattgggatgaaaggcgagcgccggaggggcaaggggcacgatggcctttaccagggtctcagtacagccaccaaggacacctacgacgcccttcacatgcaggccctgccccctcgctctagaggatctggagcaacaaacttctcactactcaaacaagcaggtgacgtggaggagaatcccgggcctgggatccacatggccacttacgaggttctctgtgaggtggcgcggaaactgggcacggatgacagggaagtggtattgttcctcctaaacgtgttcatacctcaacccacactggcccaattaattggagctcttagagctttaaaggaggagggcaggttaacgtttcccctgttagcggaatgtctgtttcgtgcaggtcgcagagacctcttgcgcgacctgcttcacttagacccgcgttttttagagcgccacctagcgggcacaatgagttatttcagcccttatcagctcactgttctccacgtagacggggagctgtgtgcgagggatattaggtctttgatatttttaagcaaggacactatagggtctcgcagcacaccacagacattcttacactgggtgtactgtatggaaaacttagacctactgggtcccactgacgtggatgccctaatgtcaatgcttagatctttgtcaagagtagacctacagcgccaagtgcaaaccctaatgggccttcacctttccggcccatcacactcccaacactatcgccatacaccactcgagaccgatttctacgactacaaggacgacgatgacaagactagtggctccggcgagggcagaggaagtctactaacctgcggagatgtggaagaaaatcctggcccacatatgaccgagtacaagcccacggtgcgcctcgccacccgcgacgacgtccccagggccgtacgcaccctcgccgccgcgttcgccgactaccccgccacgcgccacaccgtcgatccggaccgccacatcgagcgggtcaccgagctgcaagaactcttcctcacgcgcgtcgggctcgacatcggcaaggtgtgggtcgcggacgacggcgccgcggtggcggtctggaccacgccggagagcgtcgaagcgggggcggtgttcgccgagatcggcccgcgcatggccgagttgagcggttcccggctggccgcgcagcaacagatggaaggcctcctggcgccgcaccggcccaaggagcccgcgtggttcctggccaccgtcggcgtctcgcccgaccaccagggcaagggtctgggcagcgccgtcgtgctccccggagtggaggcggccgagcgcgccggggtgcccgccttcctggagacctccgcgccccgcaacctccccttctacgagcggctcggcttcaccgtcaccgccgacgtcgaggtgcccgaaggaccgcgcacctggtgcatgacccgcaagcccggtgcctga

SEQ ID NO: 1205 - DNA, 2937 bp, Artificial Sequence
  Synthetic Polynucleotides
atggccttaccagtgaccgccttgctcctgccgctggccttgctgctccacgccgccaggccgatcaacatctacaacgccgagcctgccaatcctagcgagaagaacagccccgaattcgacatcgtgatgacacagagccccgccacactgtcactgtctccaggcgaaagagccacactgagctgtcggagcagcaagagcctccagaacgtgaacggcaacacctacctgtactggttccagcagaagcccggccagtctcctcagctcctgatctacagaatgagcaacctgaacagcggcgtgcccgacagattttctggcagcggaagcggcaccgagttcaccctgaccataagcagcctggaacctgaggacttcgccgtgtactactgtatgcagcacctggaataccccatcaccttcggagccggcaccaagctggaaatcaaaggcggaggcggaagtggaggcggaggatctggcggcggaggctctgaagtgcaactggttgaatctggcggcggactggttaagcctggcggatctctgaagctgagctgtgccgccagcggctacacctttaccagctacgtgatgcactgggtccgacaggcccctggcaaaggacttgagtggatcggctacatcaacccctacaacgatggcaccaagtacaacgagaagttccagggcagagtgaccatcagctccgacaagagcatcagcaccgcctacatggaactgagcagcctgagaagcgaggataccgccatgtactattgcgccagaggcacctactactacggcaccagagtgttcgactactggggccagggaaccctggtcacagtctcttctacgcgtgagcagaaactgatctcggaagaggatctggcgaagcccaccacgacgccagcgccgcgaccaccaacaccggcgcccaccatcgcgtcgcagcccctgtccctgcgcccagaggcgtgccggccagcggcggggggcgcagtgcacacgagggggctggacttcgcctgtgacatctacatctgggcgcccttggccgggacttgtggggtccttctcctgtcactggttatcaccctttactgcaaacggggcagaaagaaactcctgtatatattcaaacaaccatttatgagaccagtacaaactactcaagaggaagatggctgtagctgccgatttccagaagaagaagaaggaggatgtgaactgagagtgaagttcagcaggagcgcagacgcccccgcgtaccagcagggccagaaccagctctataacgagctgaatctaggacgaagagaggagtacgatgttttggacaagagacgtggccgggaccctgagatggggggaaagccgagaaggaagaaccctcaggaaggcctgtacaatgaactgcagaaagataagatggcggaggcctacagtgagattgggatgaaaggcgagcgccggaggggcaaggggcacgatggcctttaccagggtctcagtacagccaccaaggacacctacgacgcccttcacatgcaggccctgccccctcgctctagaggatctggagcaacaaacttctcactactcaaacaagcaggtgacgtggaggagaatcccgggcctgggatccacatggccacttacgaggttctctgtgaggtggcgcggaaactgggcacggatgacagggaagtggtattgttcctcctaaacgtgttcatacctcaacccacactggcccaattaattggagctcttagagctttaaaggaggagggcaggttaacgtttcccctgttagcggaatgtctgtttcgtgcaggtcgcagagacctcttgcgcgacctgcttcacttagacccgcgttttttagagcgccacctagcgggcacaatgagttatttcagcccttatcagctcactgttctccacgtagacggggagctgtgtgcgagggatattaggtctttgatatttttaagcaaggacactatagggtctcgcagcacaccacagacattcttacactgggtgtactgtatggaaaacttagacctactgggtcccactgacgtggatgccctaatgtcaatgcttagatctttgtcaagagtagacctacagcgccaagtgcaaaccctaatgggccttcacctttccggcccatcacactcccaacactatcgccatacaccactcgagaccgatttctacgactacaaggacgacgatgacaagactagtggctccggcgagggcagaggaagtctactaacctgcggagatgtggaagaaaatcctggcccacatatgaccgagtacaagcccacggtgcgcctcgccacccgcgacgacgtccccagggccgtacgcaccctcgccgccgcgttcgccgactaccccgccacgcgccacaccgtcgatccggaccgccacatcgagcgggtcaccgagctgcaagaactcttcctcacgcgcgtcgggctcgacatcggcaaggtgtgggtcgcggacgacggcgccgcggtggcggtctggaccacgccggagagcgtcgaagcgggggcggtgttcgccgagatcggcccgcgcatggccgagttgagcggttcccggctggccgcgcagcaacagatggaaggcctcctggcgccgcaccggcccaaggagcccgcgtggttcctggccaccgtcggcgtctcgcccgaccaccagggcaagggtctgggcagcgccgtcgtgctccccggagtggaggcggccgagcgcgccggggtgcccgccttcctggagacctccgcgccccgcaacctccccttctacgagcggctcggcttcaccgtcaccgccgacgtcgaggtgcccgaaggaccgcgcacctggtgcatgacccgcaagcccggtgcctga

SEQ ID NO: 1206 - DNA, 2883 bp, Artificial Sequence
  Synthetic Polynucleotides
atggccttaccagtgaccgccttgctcctgccgctggccttgctgctccacgccgccaggccggacatcctgctgacacagtctcccgccacactgtcactgtctccaggcgaaagagccacactgagctgtagagccagccagagcgtggactacgacggcgacagctacctgaactggtatcagcagaagcccggccagcctcctaagctgctgatctacgatgccagcaacctggtgtctggcatccctcctagattttccggcagcggctctggcaccgatttcaccctgaccatcagcagactggaacccgaggacttcgccgtgtaccactgtcagcagagcacagaggacccctggacatttggcggaggcaccaagctggaaatcaaaggcggaggcggaagtggaggcggaggatctggcggcggaggctctcaggtgcagctggttgaatctggcggcggacttgttgagcctggcggatctctgagactgagctgcatgagcggctacgccttcagcagctactggatgaactgggtccgacagatgcccggcaaaggactggaatggatgggccagatttggcctggcgacggcgataccaactacaaccccagcctgaagtccagagtgaccatcaccgccgatgagagcaccagcaccgcctacatggaactgtctagcctgaaggccgaggatacagccgtgtacttctgcgccagacgggaaaccacaaccgtgggcagatattactacgctatggactactggggccagggcaccctggttacagtctcttctacgcgtgagcagaaactgatctcggaagaggatctggcgaagcccaccacgacgccagcgccgcgaccaccaacaccggcgcccaccatcgcgtcgcagcccctgtccctgcgcccagaggcgtgccggccagcggcggggggcgcagtgcacacgagggggctggacttcgcctgtgacatctacatctgggcgcccttggccgggacttgtggggtccttctcctgtcactggttatcaccctttactgcaaacggggcagaaagaaactcctgtatatattcaaacaaccatttatgagaccagtacaaactactcaagaggaagatggctgtagctgccgatttccagaagaagaagaaggaggatgtgaactgagagtgaagttcagcaggagcgcagacgcccccgcgtaccagcagggccagaaccagctctataacgagctgaatctaggacgaagagaggagtacgatgttttggacaagagacgtggccgggaccctgagatggggggaaagccgagaaggaagaaccctcaggaaggcctgtacaatgaactgcagaaagataagatggcggaggcctacagtgagattgggatgaaaggcgagcgccggaggggcaaggggcacgatggcctttaccagggtctcagtacagccaccaaggacacctacgacgcccttcacatgcaggccctgccccctcgctctagaggatctggagcaacaaacttctcactactcaaacaagcaggtgacgtggaggagaatcccgggcctgggatccacatggccacttacgaggttctctgtgaggtggcgcggaaactgggcacggatgacagggaagtggtattgttcctcctaaacgtgttcatacctcaacccacactggcccaattaattggagctcttagagctttaaaggaggagggcaggttaacgtttcccctgttagcggaatgtctgtttcgtgcaggtcgcagagacctcttgcgcgacctgcttcacttagacccgcgttttttagagcgccacctagcgggcacaatgagttatttcagcccttatcagctcactgttctccacgtagacggggagctgtgtgcgagggatattaggtctttgatatttttaagcaaggacactatagggtctcgcagcacaccacagacattcttacactgggtgtactgtatggaaaacttagacctactgggtcccactgacgtggatgccctaatgtcaatgcttagatctttgtcaagagtagacctacagcgccaagtgcaaaccctaatgggccttcacctttccggcccatcacactcccaacactatcgccatacaccactcgagaccgatttctacgactacaaggacgacgatgacaagactagtggctccggcgagggcagaggaagtctactaacctgcggagatgtggaagaaaatcctggcccacatatgaccgagtacaagcccacggtgcgcctcgccacccgcgacgacgtccccagggccgtacgcaccctcgccgccgcgttcgccgactaccccgccacgcgccacaccgtcgatccggaccgccacatcgagcgggtcaccgagctgcaagaactcttcctcacgcgcgtcgggctcgacatcggcaaggtgtgggtcgcggacgacggcgccgcggtggcggtctggaccacgccggagagcgtcgaagcgggggcggtgttcgccgagatcggcccgcgcatggccgagttgagcggttcccggctggccgcgcagcaacagatggaaggcctcctggcgccgcaccggcccaaggagcccgcgtggttcctggccaccgtcggcgtctcgcccgaccaccagggcaagggtctgggcagcgccgtcgtgctccccggagtggaggcggccgagcgcgccggggtgcccgccttcctggagacctccgcgccccgcaacctccccttctacgagcggctcggcttcaccgtcaccgccgacgtcgaggtgcccgaaggaccgcgcacctggtgcatgacccgcaagcccggtgcctga

SEQ ID NO: 1207 - DNA, 2874 bp, Artificial Sequence
  Synthetic Polynucleotides
atggccttaccagtgaccgccttgctcctgccgctggccttgctgctccacgccgccaggccggacatcctgctgacacagtctcccgccacactgtcactgtctccaggcgaaagagccacactgagctgtagagccagccagagcgtggacaactacggcatcagcttcatgaactggtatcagcagaagcccggccagcctcctaagctgctgatctacgccgccagcaatcaaggctctggcatccccagcagattttccggctctggaagcggcaccgacttcaccctgaccataagcagcctggaacctgaggacttcgccatgtacttttgccagcagagcaacgaggtgcccagaacctttggcggaggcaccaagctggaaatcaaaggcggaggcggaagtggaggcggaggatctggcggcggaggctctcaggtgcaactggttgagtctggcggcggacttgttgaacctggcggaagcctgagactgagctgcatgagcggctacgcctttagcagctcctggatgaactgggtccgacagatgcctggcaaaggactggaatggatgggcagaatctaccccggcgacggcgacaccaactacaacggcaagttcaaagaacgggtcaccatcaccgccgacgagagcacaagcaccgcctacatggaactgagcagcctgaaggccgaggataccgccgtgtacttctgcgccagaagcgagtattggggcaactactgggctatggactactggggccagggcacactggtcacagtgtctagcacgcgtgagcagaaactgatctcggaagaggatctggcgaagcccaccacgacgccagcgccgcgaccaccaacaccggcgcccaccatcgcgtcgcagcccctgtccctgcgcccagaggcgtgccggccagcggcggggggcgcagtgcacacgagggggctggacttcgcctgtgacatctacatctgggcgcccttggccgggacttgtggggtccttctcctgtcactggttatcaccctttactgcaaacggggcagaaagaaactcctgtatatattcaaacaaccatttatgagaccagtacaaactactcaagaggaagatggctgtagctgccgatttccagaagaagaagaaggaggatgtgaactgagagtgaagttcagcaggagcgcagacgcccccgcgtaccagcagggccagaaccagctctataacgagctgaatctaggacgaagagaggagtacgatgttttggacaagagacgtggccgggaccctgagatggggggaaagccgagaaggaagaaccctcaggaaggcctgtacaatgaactgcagaaagataagatggcggaggcctacagtgagattgggatgaaaggcgagcgccggaggggcaaggggcacgatggcctttaccagggtctcagtacagccaccaaggacacctacgacgcccttcacatgcaggccctgccccctcgctctagaggatctggagcaacaaacttctcactactcaaacaagcaggtgacgtggaggagaatcccgggcctgggatccacatggccacttacgaggttctctgtgaggtggcgcggaaactgggcacggatgacagggaagtggtattgttcctcctaaacgtgttcatacctcaacccacactggcccaattaattggagctcttagagctttaaaggaggagggcaggttaacgtttcccctgttagcggaatgtctgtttcgtgcaggtcgcagagacctcttgcgcgacctgcttcacttagacccgcgttttttagagcgccacctagcgggcacaatgagttatttcagcccttatcagctcactgttctccacgtagacggggagctgtgtgcgagggatattaggtctttgatatttttaagcaaggacactatagggtctcgcagcacaccacagacattcttacactgggtgtactgtatggaaaacttagacctactgggtcccactgacgtggatgccctaatgtcaatgcttagatctttgtcaagagtagacctacagcgccaagtgcaaaccctaatgggccttcacctttccggcccatcacactcccaacactatcgccatacaccactcgagaccgatttctacgactacaaggacgacgatgacaagactagtggctccggcgagggcagaggaagtctactaacctgcggagatgtggaagaaaatcctggcccacatatgaccgagtacaagcccacggtgcgcctcgccacccgcgacgacgtccccagggccgtacgcaccctcgccgccgcgttcgccgactaccccgccacgcgccacaccgtcgatccggaccgccacatcgagcgggtcaccgagctgcaagaactcttcctcacgcgcgtcgggctcgacatcggcaaggtgtgggtcgcggacgacggcgccgcggtggcggtctggaccacgccggagagcgtcgaagcgggggcggtgttcgccgagatcggcccgcgcatggccgagttgagcggttcccggctggccgcgcagcaacagatggaaggcctcctggcgccgcaccggcccaaggagcccgcgtggttcctggccaccgtcggcgtctcgcccgaccaccagggcaagggtctgggcagcgccgtcgtgctccccggagtggaggcggccgagcgcgccggggtgcccgccttcctggagacctccgcgccccgcaacctccccttctacgagcggctcggcttcaccgtcaccgccgacgtcgaggtgcccgaaggaccgcgcacctggtgcatgacccgcaagcccggtgcctga

SEQ ID NO: 1208 - DNA, 2871 bp, Artificial Sequence
  Synthetic Polynucleotides
atggccttaccagtgaccgccttgctcctgccgctggccttgctgctccacgccgccaggccggacatcctgctgacacagtctcccgccacactgtcactgtctccaggcgaaagagccacactgagctgcaaggccagtcagaacgtgggcacaaacgtggcctggtatcagcagaagcctggacagcctcctaagctgctgatctacagcgccacctaccggaactctggcatccctgccagattttctggcagcggctctggcaccgagttcaccctgaccatcaccaacgtgcagagcaaggacctggccgactacttctacttctgccagtacaacagatacccctacaccagcggcggaggcaccaagctggaaatcaaaagaggcggaggcggaagtggaggcggaggatctggcggcggaggctctcaggtgcaactggttgaatcaggcggaggactggtggaacctggcggatctctgagactgagctgtatgagcggctacgccttcagcagctactggatgaactgggtccgacagatgcccggcaaaggactggaatggatgggccaaatctaccccggcgacggcgacaccaactacaacggcaagttcaagggcagagtgacaatcaccgccgacgagagcacaagcaccgcctacatggaactgagcagcctgaaggccgaggataccgccgtgtacttctgcgccagaaagaccatcagcagcgtggtggatttctacttcgacaactggggccagggcaccctggtcacagtttcttctacgcgtgagcagaaactgatctcggaagaggatctggcgaagcccaccacgacgccagcgccgcgaccaccaacaccggcgcccaccatcgcgtcgcagcccctgtccctgcgcccagaggcgtgccggccagcggcggggggcgcagtgcacacgagggggctggacttcgcctgtgacatctacatctgggcgcccttggccgggacttgtggggtccttctcctgtcactggttatcaccctttactgcaaacggggcagaaagaaactcctgtatatattcaaacaaccatttatgagaccagtacaaactactcaagaggaagatggctgtagctgccgatttccagaagaagaagaaggaggatgtgaactgagagtgaagttcagcaggagcgcagacgcccccgcgtaccagcagggccagaaccagctctataacgagctgaatctaggacgaagagaggagtacgatgttttggacaagagacgtggccgggaccctgagatggggggaaagccgagaaggaagaaccctcaggaaggcctgtacaatgaactgcagaaagataagatggcggaggcctacagtgagattgggatgaaaggcgagcgccggaggggcaaggggcacgatggcctttaccagggtctcagtacagccaccaaggacacctacgacgcccttcacatgcaggccctgccccctcgctctagaggatctggagcaacaaacttctcactactcaaacaagcaggtgacgtggaggagaatcccgggcctgggatccacatggccacttacgaggttctctgtgaggtggcgcggaaactgggcacggatgacagggaagtggtattgttcctcctaaacgtgttcatacctcaacccacactggcccaattaattggagctcttagagctttaaaggaggagggcaggttaacgtttcccctgttagcggaatgtctgtttcgtgcaggtcgcagagacctcttgcgcgacctgcttcacttagacccgcgttttttagagcgccacctagcgggcacaatgagttatttcagcccttatcagctcactgttctccacgtagacggggagctgtgtgcgagggatattaggtctttgatatttttaagcaaggacactatagggtctcgcagcacaccacagacattcttacactgggtgtactgtatggaaaacttagacctactgggtcccactgacgtggatgccctaatgtcaatgcttagatctttgtcaagagtagacctacagcgccaagtgcaaaccctaatgggccttcacctttccggcccatcacactcccaacactatcgccatacaccactcgagaccgatttctacgactacaaggacgacgatgacaagactagtggctccggcgagggcagaggaagtctactaacctgcggagatgtggaagaaaatcctggcccacatatgaccgagtacaagcccacggtgcgcctcgccacccgcgacgacgtccccagggccgtacgcaccctcgccgccgcgttcgccgactaccccgccacgcgccacaccgtcgatccggaccgccacatcgagcgggtcaccgagctgcaagaactcttcctcacgcgcgtcgggctcgacatcggcaaggtgtgggtcgcggacgacggcgccgcggtggcggtctggaccacgccggagagcgtcgaagcgggggcggtgttcgccgagatcggcccgcgcatggccgagttgagcggttcccggctggccgcgcagcaacagatggaaggcctcctggcgccgcaccggcccaaggagcccgcgtggttcctggccaccgtcggcgtctcgcccgaccaccagggcaagggtctgggcagcgccgtcgtgctccccggagtggaggcggccgagcgcgccggggtgcccgccttcctggagacctccgcgccccgcaacctccccttctacgagcggctcggcttcaccgtcaccgccgacgtcgaggtgcccgaaggaccgcgcacctggtgcatgacccgcaagcccggtgcctga

SEQ ID NO: 1209 - DNA, 2910 bp, Artificial Sequence
  Synthetic Polynucleotides
atggccttaccagtgaccgccttgctcctgccgctggccttgctgctccacgccgccaggccgatcaacatctacaacgccgagcctgccaatcctagcgagaagaacagccccgaattccagatcgtgctgacacagtctccagccacactgagcgcttctccaggcgagaaggccaccatgacatgttctgccagcagcggcgtgaactacatgcactggtatcagcagaagcccggcacaagccccaagcggtggatctacgataccgacaagacagccagcggagtgcccgccagattttctggctctggcagcggcacatcctacagcctgacaatcagcagcatggaagccgaggatgccgccacctactactgtcaccagagaggcagctacaccttcggcggaggcaccaagctggaaatcaaaggcggaggcggaagtggaggcggaggatctggcggcggaggctctcaagttcagctggaacaacctggcgctgaggtggtcaaaccaggggcctctgtgaaggtgtcctgcaagacaagcggctacacattcaccagcaactggatgcactgggtcaagcagacccctggcaaaggactggaatggatcggcgagatcgaccccagcgactcctacaccaactacaaccagaagttcgacggcaaggccaagctgaccgtggacaagtctagcagcaccgcctacatggaagtgtccgatctgaccgccgaagatagcgccacatattactgcgccagaggcagcaacccctactactacgctatggactattggggccagggcaccagcgtgacagtctcttctacgcgtgagcagaaactgatctcggaagaggatctggcgaagcccaccacgacgccagcgccgcgaccaccaacaccggcgcccaccatcgcgtcgcagcccctgtccctgcgcccagaggcgtgccggccagcggcggggggcgcagtgcacacgagggggctggacttcgcctgtgacatctacatctgggcgcccttggccgggacttgtggggtccttctcctgtcactggttatcaccctttactgcaaacggggcagaaagaaactcctgtatatattcaaacaaccatttatgagaccagtacaaactactcaagaggaagatggctgtagctgccgatttccagaagaagaagaaggaggatgtgaactgagagtgaagttcagcaggagcgcagacgcccccgcgtaccagcagggccagaaccagctctataacgagctgaatctaggacgaagagaggagtacgatgttttggacaagagacgtggccgggaccctgagatggggggaaagccgagaaggaagaaccctcaggaaggcctgtacaatgaactgcagaaagataagatggcggaggcctacagtgagattgggatgaaaggcgagcgccggaggggcaaggggcacgatggcctttaccagggtctcagtacagccaccaaggacacctacgacgcccttcacatgcaggccctgccccctcgctctagaggatctggagcaacaaacttctcactactcaaacaagcaggtgacgtggaggagaatcccgggcctgggatccacatggccacttacgaggttctctgtgaggtggcgcggaaactgggcacggatgacagggaagtggtattgttcctcctaaacgtgttcatacctcaacccacactggcccaattaattggagctcttagagctttaaaggaggagggcaggttaacgtttcccctgttagcggaatgtctgtttcgtgcaggtcgcagagacctcttgcgcgacctgcttcacttagacccgcgttttttagagcgccacctagcgggcacaatgagttatttcagcccttatcagctcactgttctccacgtagacggggagctgtgtgcgagggatattaggtctttgatatttttaagcaaggacactatagggtctcgcagcacaccacagacattcttacactgggtgtactgtatggaaaacttagacctactgggtcccactgacgtggatgccctaatgtcaatgcttagatctttgtcaagagtagacctacagcgccaagtgcaaaccctaatgggccttcacctttccggcccatcacactcccaacactatcgccatacaccactcgagaccgatttctacgactacaaggacgacgatgacaagactagtggctccggcgagggcagaggaagtctactaacctgcggagatgtggaagaaaatcctggcccacatatgaccgagtacaagcccacggtgcgcctcgccacccgcgacgacgtccccagggccgtacgcaccctcgccgccgcgttcgccgactaccccgccacgcgccacaccgtcgatccggaccgccacatcgagcgggtcaccgagctgcaagaactcttcctcacgcgcgtcgggctcgacatcggcaaggtgtgggtcgcggacgacggcgccgcggtggcggtctggaccacgccggagagcgtcgaagcgggggcggtgttcgccgagatcggcccgcgcatggccgagttgagcggttcccggctggccgcgcagcaacagatggaaggcctcctggcgccgcaccggcccaaggagcccgcgtggttcctggccaccgtcggcgtctcgcccgaccaccagggcaagggtctgggcagcgccgtcgtgctccccggagtggaggcggccgagcgcgccggggtgcccgccttcctggagacctccgcgccccgcaacctccccttctacgagcggctcggcttcaccgtcaccgccgacgtcgaggtgcccgaaggaccgcgcacctggtgcatgacccgcaagcccggtgcctga

SEQ ID NO: 1210 - DNA, 2868 bp, Artificial Sequence
  Synthetic Polynucleotides
atggccttaccagtgaccgccttgctcctgccgctggccttgctgctccacgccgccaggccggacatccagatgacacagagccctagcagcctgtctgccagcgtgggagacagagtgaccatcacatgcaaggccagcgaccacatcaacaactggctggcctggtatcagcagaagcctggacaggcccctaagctgctgatctacggcgctaccacactggaaacaggcgtgcccagcagattttctggcagcggctctggcaccgactacaccctgacaatatccagcctccagcctgaggacttcgccacctactactgtcagcagagctggaacaccccttggacattcggccagggcaccaagctggaaatcaagagaggcggaggcggaagtggaggcggaggatctggcggcggaggctctcaagttcagcttcaacagcctggcgctgagctggtcaaacctggcgcttctgtgaagatgagctgcaaagccagcggctacgccttcagcagctactggatcaactggatgaagcagaaacccggccagggactcgaatggatcggccaaatctatcccggcgacggcgacaccaactacaacggcaagttcaagggcagagccacactgaccgccgatacctctagcagcacagcctacatgcagctgagcagcctgaccagcgaagatagcgccgtgtacttctgtgcccggtccatcacaacagtcgtgggctgcgctatggactattggggccagggaacaagcgtgaccgtgtctagtacgcgtgagcagaaactgatctcggaagaggatctggcgaagcccaccacgacgccagcgccgcgaccaccaacaccggcgcccaccatcgcgtcgcagcccctgtccctgcgcccagaggcgtgccggccagcggcggggggcgcagtgcacacgagggggctggacttcgcctgtgacatctacatctgggcgcccttggccgggacttgtggggtccttctcctgtcactggttatcaccctttactgcaaacggggcagaaagaaactcctgtatatattcaaacaaccatttatgagaccagtacaaactactcaagaggaagatggctgtagctgccgatttccagaagaagaagaaggaggatgtgaactgagagtgaagttcagcaggagcgcagacgcccccgcgtaccagcagggccagaaccagctctataacgagctgaatctaggacgaagagaggagtacgatgttttggacaagagacgtggccgggaccctgagatggggggaaagccgagaaggaagaaccctcaggaaggcctgtacaatgaactgcagaaagataagatggcggaggcctacagtgagattgggatgaaaggcgagcgccggaggggcaaggggcacgatggcctttaccagggtctcagtacagccaccaaggacacctacgacgcccttcacatgcaggccctgccccctcgctctagaggatctggagcaacaaacttctcactactcaaacaagcaggtgacgtggaggagaatcccgggcctgggatccacatggccacttacgaggttctctgtgaggtggcgcggaaactgggcacggatgacagggaagtggtattgttcctcctaaacgtgttcatacctcaacccacactggcccaattaattggagctcttagagctttaaaggaggagggcaggttaacgtttcccctgttagcggaatgtctgtttcgtgcaggtcgcagagacctcttgcgcgacctgcttcacttagacccgcgttttttagagcgccacctagcgggcacaatgagttatttcagcccttatcagctcactgttctccacgtagacggggagctgtgtgcgagggatattaggtctttgatatttttaagcaaggacactatagggtctcgcagcacaccacagacattcttacactgggtgtactgtatggaaaacttagacctactgggtcccactgacgtggatgccctaatgtcaatgcttagatctttgtcaagagtagacctacagcgccaagtgcaaaccctaatgggccttcacctttccggcccatcacactcccaacactatcgccatacaccactcgagaccgatttctacgactacaaggacgacgatgacaagactagtggctccggcgagggcagaggaagtctactaacctgcggagatgtggaagaaaatcctggcccacatatgaccgagtacaagcccacggtgcgcctcgccacccgcgacgacgtccccagggccgtacgcaccctcgccgccgcgttcgccgactaccccgccacgcgccacaccgtcgatccggaccgccacatcgagcgggtcaccgagctgcaagaactcttcctcacgcgcgtcgggctcgacatcggcaaggtgtgggtcgcggacgacggcgccgcggtggcggtctggaccacgccggagagcgtcgaagcgggggcggtgttcgccgagatcggcccgcgcatggccgagttgagcggttcccggctggccgcgcagcaacagatggaaggcctcctggcgccgcaccggcccaaggagcccgcgtggttcctggccaccgtcggcgtctcgcccgaccaccagggcaagggtctgggcagcgccgtcgtgctccccggagtggaggcggccgagcgcgccggggtgcccgccttcctggagacctccgcgccccgcaacctccccttctacgagcggctcggcttcaccgtcaccgccgacgtcgaggtgcccgaaggaccgcgcacctggtgcatgacccgcaagcccggtgcctga

SEQ ID NO: 1211 - DNA, 2892 bp, Artificial Sequence
  Synthetic Polynucleotides
atggccttaccagtgaccgccttgctcctgccgctggccttgctgctccacgccgccaggccggacgacatccagctgacccagagccccagcagcctgagcgccagcgtgggcgacagagtgaccatcacctgcaaggccagccagagcgtggactacgacggcgacagctacctgaactggtaccagcagatccccggcaaggcccccaagctgctgatctacgacgccagcaacctggtgagcggcatcccccccagattcagcggcagcggcagcggcaccgactacaccttcaccatcagcagcctgcagcccgaggacatcgccacctaccactgccagcagagcaccgaggacccctggaccttcggcggcggcaccaagctgcagatcaagagaggcggaggcggaagtggaggcggaggatctggcggcggaggctctcaggtgcagctgcagcagagcggcgccgaggtgaagaagcccggcagcagcgtgaaggtgagctgcaaggccagcggctacgccttcagcagctactggatgaactgggtgagacagagacccggccagggcctggagtggatcggccagatttggcccggcgacggcgacaccaactacaacggcaagttcaagggcagagccaccatcaccgccgacgagagcaccaacaccgcctacatggagctgagcagcctgagaagcgaggacaccgccttctacagctgcgccagaagagagaccaccaccgtgggcagatactactacgctatggactactggggccagggcaccaccgtgaccgtgagcagcacgcgtgagcagaaactgatctcggaagaggatctggcgaagcccaccacgacgccagcgccgcgaccaccaacaccggcgcccaccatcgcgtcgcagcccctgtccctgcgcccagaggcgtgccggccagcggcggggggcgcagtgcacacgagggggctggacttcgcctgtgacatctacatctgggcgcccttggccgggacttgtggggtccttctcctgtcactggttatcaccctttactgcaaacggggcagaaagaaactcctgtatatattcaaacaaccatttatgagaccagtacaaactactcaagaggaagatggctgtagctgccgatttccagaagaagaagaaggaggatgtgaactgagagtgaagttcagcaggagcgcagacgcccccgcgtaccagcagggccagaaccagctctataacgagctgaatctaggacgaagagaggagtacgatgttttggacaagagacgtggccgggaccctgagatggggggaaagccgagaaggaagaaccctcaggaaggcctgtacaatgaactgcagaaagataagatggcggaggcctacagtgagattgggatgaaaggcgagcgccggaggggcaaggggcacgatggcctttaccagggtctcagtacagccaccaaggacacctacgacgcccttcacatgcaggccctgccccctcgctctagaggatctggagcaacaaacttctcactactcaaacaagcaggtgacgtggaggagaatcccgggcctgggatccacatggccacttacgaggttctctgtgaggtggcgcggaaactgggcacggatgacagggaagtggtattgttcctcctaaacgtgttcatacctcaacccacactggcccaattaattggagctcttagagctttaaaggaggagggcaggttaacgtttcccctgttagcggaatgtctgtttcgtgcaggtcgcagagacctcttgcgcgacctgcttcacttagacccgcgttttttagagcgccacctagcgggcacaatgagttatttcagcccttatcagctcactgttctccacgtagacggggagctgtgtgcgagggatattaggtctttgatatttttaagcaaggacactatagggtctcgcagcacaccacagacattcttacactgggtgtactgtatggaaaacttagacctactgggtcccactgacgtggatgccctaatgtcaatgcttagatctttgtcaagagtagacctacagcgccaagtgcaaaccctaatgggccttcacctttccggcccatcacactcccaacactatcgccatacaccactcgagaccgatttctacgactacaaggacgacgatgacaagactagtggctccggcgagggcagaggaagtctactaacctgcggagatgtggaagaaaatcctggcccacatatgaccgagtacaagcccacggtgcgcctcgccacccgcgacgacgtccccagggccgtacgcaccctcgccgccgcgttcgccgactaccccgccacgcgccacaccgtcgatccggaccgccacatcgagcgggtcaccgagctgcaagaactcttcctcacgcgcgtcgggctcgacatcggcaaggtgtgggtcgcggacgacggcgccgcggtggcggtctggaccacgccggagagcgtcgaagcgggggcggtgttcgccgagatcggcccgcgcatggccgagttgagcggttcccggctggccgcgcagcaacagatggaaggcctcctggcgccgcaccggcccaaggagcccgcgtggttcctggccaccgtcggcgtctcgcccgaccaccagggcaagggtctgggcagcgccgtcgtgctccccggagtggaggcggccgagcgcgccggggtgcccgccttcctggagacctccgcgccccgcaacctccccttctacgagcggctcggcttcaccgtcaccgccgacgtcgaggtgcccgaaggaccgcgcacctggtgcatgacccgcaagcccggtgcctga

SEQ ID NO: 1212 - DNA, 2865 bp, Artificial Sequence
  Synthetic Polynucleotides
atggccttaccagtgaccgccttgctcctgccgctggccttgctgctccacgccgccaggccgcagtctgtgctgacacagcctgcctctgtgtctggctctcctggccagagcatcaccatcagctgtaccggcaccagctctgatgtcggcggctacaattacgtgtcctggtatcagcagcaccccggcaaggcccctaagctgatgatctacgacgtgaacaacagacccagcgaggtgtccaacagattcagcggcagcaagagcggcaataccgccagcctgacaatctctggactgcaagccgaggacgaggccgactactactgtagcagctacaccacaggcagcagagccgtttttggcggaggcaccaaactgacagtgcttggaggcggaggcggaagtggaggcggaggatctggcggcggaggctctgaagttcagctggttcagtctggcgccgaagtgaagaagcctggcgagtctctgaccatctcctgcaaggccagcggctacagcttccccaactactggatcacctgggtccgacagatgtccggtggtggccttgagtggatgggcagaatcgatcccggcgactcctacaccacctacaatcctagcttccagggccacgtgaccatcagcatcgacaagagcaccaacaccgcctacctgcactggaacagcctgaaagccagcgacaccgccatgtactactgcgcccggtactatgtgtccctggtggacatttggggccagggcacactggtcacagtgtctagtacgcgtgagcagaaactgatctcggaagaggatctggcgaagcccaccacgacgccagcgccgcgaccaccaacaccggcgcccaccatcgcgtcgcagcccctgtccctgcgcccagaggcgtgccggccagcggcggggggcgcagtgcacacgagggggctggacttcgcctgtgacatctacatctgggcgcccttggccgggacttgtggggtccttctcctgtcactggttatcaccctttactgcaaacggggcagaaagaaactcctgtatatattcaaacaaccatttatgagaccagtacaaactactcaagaggaagatggctgtagctgccgatttccagaagaagaagaaggaggatgtgaactgagagtgaagttcagcaggagcgcagacgcccccgcgtaccagcagggccagaaccagctctataacgagctgaatctaggacgaagagaggagtacgatgttttggacaagagacgtggccgggaccctgagatggggggaaagccgagaaggaagaaccctcaggaaggcctgtacaatgaactgcagaaagataagatggcggaggcctacagtgagattgggatgaaaggcgagcgccggaggggcaaggggcacgatggcctttaccagggtctcagtacagccaccaaggacacctacgacgcccttcacatgcaggccctgccccctcgctctagaggatctggagcaacaaacttctcactactcaaacaagcaggtgacgtggaggagaatcccgggcctgggatccacatggccacttacgaggttctctgtgaggtggcgcggaaactgggcacggatgacagggaagtggtattgttcctcctaaacgtgttcatacctcaacccacactggcccaattaattggagctcttagagctttaaaggaggagggcaggttaacgtttcccctgttagcggaatgtctgtttcgtgcaggtcgcagagacctcttgcgcgacctgcttcacttagacccgcgttttttagagcgccacctagcgggcacaatgagttatttcagcccttatcagctcactgttctccacgtagacggggagctgtgtgcgagggatattaggtctttgatatttttaagcaaggacactatagggtctcgcagcacaccacagacattcttacactgggtgtactgtatggaaaacttagacctactgggtcccactgacgtggatgccctaatgtcaatgcttagatctttgtcaagagtagacctacagcgccaagtgcaaaccctaatgggccttcacctttccggcccatcacactcccaacactatcgccatacaccactcgagaccgatttctacgactacaaggacgacgatgacaagactagtggctccggcgagggcagaggaagtctactaacctgcggagatgtggaagaaaatcctggcccacatatgaccgagtacaagcccacggtgcgcctcgccacccgcgacgacgtccccagggccgtacgcaccctcgccgccgcgttcgccgactaccccgccacgcgccacaccgtcgatccggaccgccacatcgagcgggtcaccgagctgcaagaactcttcctcacgcgcgtcgggctcgacatcggcaaggtgtgggtcgcggacgacggcgccgcggtggcggtctggaccacgccggagagcgtcgaagcgggggcggtgttcgccgagatcggcccgcgcatggccgagttgagcggttcccggctggccgcgcagcaacagatggaaggcctcctggcgccgcaccggcccaaggagcccgcgtggttcctggccaccgtcggcgtctcgcccgaccaccagggcaagggtctgggcagcgccgtcgtgctccccggagtggaggcggccgagcgcgccggggtgcccgccttcctggagacctccgcgccccgcaacctccccttctacgagcggctcggcttcaccgtcaccgccgacgtcgaggtgcccgaaggaccgcgcacctggtgcatgacccgcaagcccggtgcctga

SEQ ID NO: 1213 - DNA, 2883 bp, Artificial Sequence
  Synthetic Polynucleotides
atggccttaccagtgaccgccttgctcctgccgctggccttgctgctccacgccgccaggccgcagtctgtggtcacacagcctccatccgtgtctgctgcccctggacagaaagtgaccatctcctgtagcggcagcagcagcaacatcggcaacaactacgtgtcctggtatcagcagctccccggcacagctcccaaactgctgatctacgacaacaacaagcggcccagcggcatccccgatagattttctggcagcaagagcggcaccagcgccacactgggaattaccggacttcagacaggcgacgaggccgactactactgtggcacatgggatggcagcctgtacaccatgcttttcggcggaggcaccaagctgacagtgcttggcggaggcggaagtggaggcggaggatctggcggcggaggctctgaagtgcaactggtggaatctggcggcggactggttaagcctggcggatctctgagactgtcttgtgccgccagcggcttcaccttcagcaatgcctggatgagctgggttcgacaggcccctggaaaaggactggaatgggtcggattcatccggtccaaagcctacggcggcaccacagaatatgccgcctctgtgaagggcagattcaccatcagccgggacgacagcaagtctatcgcctacctccagatgaacaacctgaaaaccgaggacaccgccgtgtactactgcgccagagatggcctgtacagcagctcttggtacgacagcgattactggggccagggcacactggtcacagtgtcatctacgcgtgagcagaaactgatctcggaagaggatctggcgaagcccaccacgacgccagcgccgcgaccaccaacaccggcgcccaccatcgcgtcgcagcccctgtccctgcgcccagaggcgtgccggccagcggcggggggcgcagtgcacacgagggggctggacttcgcctgtgacatctacatctgggcgcccttggccgggacttgtggggtccttctcctgtcactggttatcaccctttactgcaaacggggcagaaagaaactcctgtatatattcaaacaaccatttatgagaccagtacaaactactcaagaggaagatggctgtagctgccgatttccagaagaagaagaaggaggatgtgaactgagagtgaagttcagcaggagcgcagacgcccccgcgtaccagcagggccagaaccagctctataacgagctgaatctaggacgaagagaggagtacgatgttttggacaagagacgtggccgggaccctgagatggggggaaagccgagaaggaagaaccctcaggaaggcctgtacaatgaactgcagaaagataagatggcggaggcctacagtgagattgggatgaaaggcgagcgccggaggggcaaggggcacgatggcctttaccagggtctcagtacagccaccaaggacacctacgacgcccttcacatgcaggccctgccccctcgctctagaggatctggagcaacaaacttctcactactcaaacaagcaggtgacgtggaggagaatcccgggcctgggatccacatggccacttacgaggttctctgtgaggtggcgcggaaactgggcacggatgacagggaagtggtattgttcctcctaaacgtgttcatacctcaacccacactggcccaattaattggagctcttagagctttaaaggaggagggcaggttaacgtttcccctgttagcggaatgtctgtttcgtgcaggtcgcagagacctcttgcgcgacctgcttcacttagacccgcgttttttagagcgccacctagcgggcacaatgagttatttcagcccttatcagctcactgttctccacgtagacggggagctgtgtgcgagggatattaggtctttgatatttttaagcaaggacactatagggtctcgcagcacaccacagacattcttacactgggtgtactgtatggaaaacttagacctactgggtcccactgacgtggatgccctaatgtcaatgcttagatctttgtcaagagtagacctacagcgccaagtgcaaaccctaatgggccttcacctttccggcccatcacactcccaacactatcgccatacaccactcgagaccgatttctacgactacaaggacgacgatgacaagactagtggctccggcgagggcagaggaagtctactaacctgcggagatgtggaagaaaatcctggcccacatatgaccgagtacaagcccacggtgcgcctcgccacccgcgacgacgtccccagggccgtacgcaccctcgccgccgcgttcgccgactaccccgccacgcgccacaccgtcgatccggaccgccacatcgagcgggtcaccgagctgcaagaactcttcctcacgcgcgtcgggctcgacatcggcaaggtgtgggtcgcggacgacggcgccgcggtggcggtctggaccacgccggagagcgtcgaagcgggggcggtgttcgccgagatcggcccgcgcatggccgagttgagcggttcccggctggccgcgcagcaacagatggaaggcctcctggcgccgcaccggcccaaggagcccgcgtggttcctggccaccgtcggcgtctcgcccgaccaccagggcaagggtctgggcagcgccgtcgtgctccccggagtggaggcggccgagcgcgccggggtgcccgccttcctggagacctccgcgccccgcaacctccccttctacgagcggctcggcttcaccgtcaccgccgacgtcgaggtgcccgaaggaccgcgcacctggtgcatgacccgcaagcccggtgcctga

SEQ ID NO: 1214 - DNA, 2898 bp, Artificial Sequence
  Synthetic Polynucleotides
atggccttaccagtgaccgccttgctcctgccgctggccttgctgctccacgccgccaggccgcagtctgtgctgacacagcctcctagtgtgtctggcgctcctggacagagagtgaccatctcttgtaccggcagcagcagcaatatcggagccggctatgacgtgcactggtatcagcagctccctggcacagcccctaaactgctgatcttcggcaacagcaacagacccagcggcgtgcccgatagattcagcggctttaagagcggcacaagcgccagcctggctatcactggactgcaagccgaggacgaggccgactacttctgccagagctacgatagcagcctgagcggcagcggagtgtttggcacaggcaccaaagtgacagtgcttggcggcggaggcggaagtggaggcggaggatctggcggcggaggctctcaaatgcaactggttcaaagcggcggtggcctggtgcaacctggaagaagtctgagactgagctgtgccgccagcggcttcaccttcgatgattacgccatgcactgggtccgacaggcccctggaaaaggactggaatgggtgtccggcatctcctggaatagcggctctatcggctacgccgacagcgtgaagggcagattcaccatcagccgggacaacgccaagaacagcctgtacctccagatgaactccctgagagccgaggatacagccctgtactactgcgccaaggacatccacagcggcagctactacggcctgctgtactacgctatggacgtgtggggccagggcacaaccgtgacagtttcttctacgcgtgagcagaaactgatctcggaagaggatctggcgaagcccaccacgacgccagcgccgcgaccaccaacaccggcgcccaccatcgcgtcgcagcccctgtccctgcgcccagaggcgtgccggccagcggcggggggcgcagtgcacacgagggggctggacttcgcctgtgacatctacatctgggcgcccttggccgggacttgtggggtccttctcctgtcactggttatcaccctttactgcaaacggggcagaaagaaactcctgtatatattcaaacaaccatttatgagaccagtacaaactactcaagaggaagatggctgtagctgccgatttccagaagaagaagaaggaggatgtgaactgagagtgaagttcagcaggagcgcagacgcccccgcgtaccagcagggccagaaccagctctataacgagctgaatctaggacgaagagaggagtacgatgttttggacaagagacgtggccgggaccctgagatggggggaaagccgagaaggaagaaccctcaggaaggcctgtacaatgaactgcagaaagataagatggcggaggcctacagtgagattgggatgaaaggcgagcgccggaggggcaaggggcacgatggcctttaccagggtctcagtacagccaccaaggacacctacgacgcccttcacatgcaggccctgccccctcgctctagaggatctggagcaacaaacttctcactactcaaacaagcaggtgacgtggaggagaatcccgggcctgggatccacatggccacttacgaggttctctgtgaggtggcgcggaaactgggcacggatgacagggaagtggtattgttcctcctaaacgtgttcatacctcaacccacactggcccaattaattggagctcttagagctttaaaggaggagggcaggttaacgtttcccctgttagcggaatgtctgtttcgtgcaggtcgcagagacctcttgcgcgacctgcttcacttagacccgcgttttttagagcgccacctagcgggcacaatgagttatttcagcccttatcagctcactgttctccacgtagacggggagctgtgtgcgagggatattaggtctttgatatttttaagcaaggacactatagggtctcgcagcacaccacagacattcttacactgggtgtactgtatggaaaacttagacctactgggtcccactgacgtggatgccctaatgtcaatgcttagatctttgtcaagagtagacctacagcgccaagtgcaaaccctaatgggccttcacctttccggcccatcacactcccaacactatcgccatacaccactcgagaccgatttctacgactacaaggacgacgatgacaagactagtggctccggcgagggcagaggaagtctactaacctgcggagatgtggaagaaaatcctggcccacatatgaccgagtacaagcccacggtgcgcctcgccacccgcgacgacgtccccagggccgtacgcaccctcgccgccgcgttcgccgactaccccgccacgcgccacaccgtcgatccggaccgccacatcgagcgggtcaccgagctgcaagaactcttcctcacgcgcgtcgggctcgacatcggcaaggtgtgggtcgcggacgacggcgccgcggtggcggtctggaccacgccggagagcgtcgaagcgggggcggtgttcgccgagatcggcccgcgcatggccgagttgagcggttcccggctggccgcgcagcaacagatggaaggcctcctggcgccgcaccggcccaaggagcccgcgtggttcctggccaccgtcggcgtctcgcccgaccaccagggcaagggtctgggcagcgccgtcgtgctccccggagtggaggcggccgagcgcgccggggtgcccgccttcctggagacctccgcgccccgcaacctccccttctacgagcggctcggcttcaccgtcaccgccgacgtcgaggtgcccgaaggaccgcgcacctggtgcatgacccgcaagcccggtgcctga

SEQ ID NO: 1215 - DNA, 2859 bp, Artificial Sequence
  Synthetic Polynucleotides
atggccttaccagtgaccgccttgctcctgccgctggccttgctgctccacgccgccaggccggactacatccacgtgacacagagccctagcagcctgtccgtgtccatcggcgatagagtgaccatcaactgccagacctctcaaggcgtgggcagcgacctgcactggtatcagcacaaacctggcagagcccctaagctgctgatccaccatgccagctctgtggaagatggcgtgcccagcagattttccggcaccggatttcacaccagcttcaacctgacaatcaacgacctccaggccgacgacatcggcacctactactgtcaagtgctccagagcttcggcagaggcagcagactggatacaaaaggcggaggcggaagtggaggcggaggatctggcggcggaggctctagggcacacctggtgcagtctggcaccgccatgaagaaacctggcgcttccgtcagagtgtcctgtcagacaagcggctacaccttcacagcccacatcctgttctggttcagacaggccccaggcagaggactggaatgggtcggatggatcaagccccagtacggggccgtgaatttcggcggaggcttcagagacagagtgaccctgaccagggacgtgtaccgggaaatcgcctacatggacatccggggcctgaagcctgatgacaccgccgtgtactactgcgccagggatagaagctacggcgacagctcttgggctctcgatgcttggggacagggcacaacagtggtggtgtctgctacgcgtgagcagaaactgatctcggaagaggatctggcgaagcccaccacgacgccagcgccgcgaccaccaacaccggcgcccaccatcgcgtcgcagcccctgtccctgcgcccagaggcgtgccggccagcggcggggggcgcagtgcacacgagggggctggacttcgcctgtgacatctacatctgggcgcccttggccgggacttgtggggtccttctcctgtcactggttatcaccctttactgcaaacggggcagaaagaaactcctgtatatattcaaacaaccatttatgagaccagtacaaactactcaagaggaagatggctgtagctgccgatttccagaagaagaagaaggaggatgtgaactgagagtgaagttcagcaggagcgcagacgcccccgcgtaccagcagggccagaaccagctctataacgagctgaatctaggacgaagagaggagtacgatgttttggacaagagacgtggccgggaccctgagatggggggaaagccgagaaggaagaaccctcaggaaggcctgtacaatgaactgcagaaagataagatggcggaggcctacagtgagattgggatgaaaggcgagcgccggaggggcaaggggcacgatggcctttaccagggtctcagtacagccaccaaggacacctacgacgcccttcacatgcaggccctgccccctcgctctagaggatctggagcaacaaacttctcactactcaaacaagcaggtgacgtggaggagaatcccgggcctgggatccacatggccacttacgaggttctctgtgaggtggcgcggaaactgggcacggatgacagggaagtggtattgttcctcctaaacgtgttcatacctcaacccacactggcccaattaattggagctcttagagctttaaaggaggagggcaggttaacgtttcccctgttagcggaatgtctgtttcgtgcaggtcgcagagacctcttgcgcgacctgcttcacttagacccgcgttttttagagcgccacctagcgggcacaatgagttatttcagcccttatcagctcactgttctccacgtagacggggagctgtgtgcgagggatattaggtctttgatatttttaagcaaggacactatagggtctcgcagcacaccacagacattcttacactgggtgtactgtatggaaaacttagacctactgggtcccactgacgtggatgccctaatgtcaatgcttagatctttgtcaagagtagacctacagcgccaagtgcaaaccctaatgggccttcacctttccggcccatcacactcccaacactatcgccatacaccactcgagaccgatttctacgactacaaggacgacgatgacaagactagtggctccggcgagggcagaggaagtctactaacctgcggagatgtggaagaaaatcctggcccacatatgaccgagtacaagcccacggtgcgcctcgccacccgcgacgacgtccccagggccgtacgcaccctcgccgccgcgttcgccgactaccccgccacgcgccacaccgtcgatccggaccgccacatcgagcgggtcaccgagctgcaagaactcttcctcacgcgcgtcgggctcgacatcggcaaggtgtgggtcgcggacgacggcgccgcggtggcggtctggaccacgccggagagcgtcgaagcgggggcggtgttcgccgagatcggcccgcgcatggccgagttgagcggttcccggctggccgcgcagcaacagatggaaggcctcctggcgccgcaccggcccaaggagcccgcgtggttcctggccaccgtcggcgtctcgcccgaccaccagggcaagggtctgggcagcgccgtcgtgctccccggagtggaggcggccgagcgcgccggggtgcccgccttcctggagacctccgcgccccgcaacctccccttctacgagcggctcggcttcaccgtcaccgccgacgtcgaggtgcccgaaggaccgcgcacctggtgcatgacccgcaagcccggtgcctga

SEQ ID NO: 1216 - DNA, 2889 bp, Artificial Sequence
  Synthetic Polynucleotides
atggccttaccagtgaccgccttgctcctgccgctggccttgctgctccacgccgccaggccggacgtgcagatgatccagacccccgatagcctggccgtgtccctgggacagagagccaccatctcttgcagagccagcgagagcgtggacaactacggcatcagcttcatgcactggtatcagcagaagcccggccagagccccaagctgctgatctacagagcctccaacctggaaagcggcatccccgccagattttccggcagcggcagcagaaccgacttcaccctgaccatcaaccccgtggaaaccgacgacgtggcaacctactactgccagcagaacaacaaggacccccccacctttggcggaggcaccaagctggaaatcaagggcggaggcggaagtggaggcggaggatctggcggcggaggctctgggggaggcggctctcaggtgcaactccagcagtctggcgctgagcttgtgaagcctggggccagcgtgaagattagctgcaaggccagcggctacgccttcagcagctactggatgaactgggtcaagcagcggcctggcaagggcctggaatggatcggccaaatctaccccggcgacggcgacaccacctacaacggcaagttcaagggcaaggccaccctgacagccgacaagagcagcagcaccgtgtacatgcaactgaacagcctgaccagcgaggacagcgccgtgtacttctgcgtgcggtactactacggcagctccggctacttcgactattggggccagggcaccacactgaccgtgtcctctacgcgtgagcagaaactgatctcggaagaggatctggcgaagcccaccacgacgccagcgccgcgaccaccaacaccggcgcccaccatcgcgtcgcagcccctgtccctgcgcccagaggcgtgccggccagcggcggggggcgcagtgcacacgagggggctggacttcgcctgtgacatctacatctgggcgcccttggccgggacttgtggggtccttctcctgtcactggttatcaccctttactgcaaacggggcagaaagaaactcctgtatatattcaaacaaccatttatgagaccagtacaaactactcaagaggaagatggctgtagctgccgatttccagaagaagaagaaggaggatgtgaactgagagtgaagttcagcaggagcgcagacgcccccgcgtaccagcagggccagaaccagctctataacgagctgaatctaggacgaagagaggagtacgatgttttggacaagagacgtggccgggaccctgagatggggggaaagccgagaaggaagaaccctcaggaaggcctgtacaatgaactgcagaaagataagatggcggaggcctacagtgagattgggatgaaaggcgagcgccggaggggcaaggggcacgatggcctttaccagggtctcagtacagccaccaaggacacctacgacgcccttcacatgcaggccctgccccctcgctctagaggatctggagcaacaaacttctcactactcaaacaagcaggtgacgtggaggagaatcccgggcctgggatccacatggccacttacgaggttctctgtgaggtggcgcggaaactgggcacggatgacagggaagtggtattgttcctcctaaacgtgttcatacctcaacccacactggcccaattaattggagctcttagagctttaaaggaggagggcaggttaacgtttcccctgttagcggaatgtctgtttcgtgcaggtcgcagagacctcttgcgcgacctgcttcacttagacccgcgttttttagagcgccacctagcgggcacaatgagttatttcagcccttatcagctcactgttctccacgtagacggggagctgtgtgcgagggatattaggtctttgatatttttaagcaaggacactatagggtctcgcagcacaccacagacattcttacactgggtgtactgtatggaaaacttagacctactgggtcccactgacgtggatgccctaatgtcaatgcttagatctttgtcaagagtagacctacagcgccaagtgcaaaccctaatgggccttcacctttccggcccatcacactcccaacactatcgccatacaccactcgagaccgatttctacgactacaaggacgacgatgacaagactagtggctccggcgagggcagaggaagtctactaacctgcggagatgtggaagaaaatcctggcccacatatgaccgagtacaagcccacggtgcgcctcgccacccgcgacgacgtccccagggccgtacgcaccctcgccgccgcgttcgccgactaccccgccacgcgccacaccgtcgatccggaccgccacatcgagcgggtcaccgagctgcaagaactcttcctcacgcgcgtcgggctcgacatcggcaaggtgtgggtcgcggacgacggcgccgcggtggcggtctggaccacgccggagagcgtcgaagcgggggcggtgttcgccgagatcggcccgcgcatggccgagttgagcggttcccggctggccgcgcagcaacagatggaaggcctcctggcgccgcaccggcccaaggagcccgcgtggttcctggccaccgtcggcgtctcgcccgaccaccagggcaagggtctgggcagcgccgtcgtgctccccggagtggaggcggccgagcgcgccggggtgcccgccttcctggagacctccgcgccccgcaacctccccttctacgagcggctcggcttcaccgtcaccgccgacgtcgaggtgcccgaaggaccgcgcacctggtgcatgacccgcaagcccggtgcctga

SEQ ID NO: 1217 - DNA, 2862 bp, Artificial Sequence
  Synthetic Polynucleotides
atggccttaccagtgaccgccttgctcctgccgctggccttgctgctccacgccgccaggccggacgtgcagatgatccagacccccagcagcctgtctgccagcctgggcgatagagtgaccatcagctgtcgggccagccaggacatcggcaactacctgaactggtatcagcagaaacccgacggcaccgtgaagctgctgatctactacaccagcagactgcacagcggcgtgcccagcagattttctggcagcggctctggcaccgagtacagcctgaccatctccaacctggaacaggaagatattgctacctacttctgtcagcaaggcagcgccctgccccctacatttggcggcggaacaaagctggaaatcaacggcggaggcggaagtggaggcggaggatctggcggcggaggctctgctctccagctccagcagtctggcgcagaactcgtgcggcctggcgcttctgtgaccctgagctgtaaagccagcggctacaccttcaccgactacgagatgcactgggtcaagcagacccctgtgcacggcctggaatggatcggagccatcgaccctgagacaggcggcaccgcctacaaccagaagttcgagggcaaggccatcctgaccgccgacaagagcagcagcacagcctacatggaactgcggagcctgacctccgaggacagccccgtgtactactgtgccagacggcggtactacggcagcagctccttcgactattggggccagggcaccaccctgaccgtgtctagtacgcgtgagcagaaactgatctcggaagaggatctggcgaagcccaccacgacgccagcgccgcgaccaccaacaccggcgcccaccatcgcgtcgcagcccctgtccctgcgcccagaggcgtgccggccagcggcggggggcgcagtgcacacgagggggctggacttcgcctgtgacatctacatctgggcgcccttggccgggacttgtggggtccttctcctgtcactggttatcaccctttactgcaaacggggcagaaagaaactcctgtatatattcaaacaaccatttatgagaccagtacaaactactcaagaggaagatggctgtagctgccgatttccagaagaagaagaaggaggatgtgaactgagagtgaagttcagcaggagcgcagacgcccccgcgtaccagcagggccagaaccagctctataacgagctgaatctaggacgaagagaggagtacgatgttttggacaagagacgtggccgggaccctgagatggggggaaagccgagaaggaagaaccctcaggaaggcctgtacaatgaactgcagaaagataagatggcggaggcctacagtgagattgggatgaaaggcgagcgccggaggggcaaggggcacgatggcctttaccagggtctcagtacagccaccaaggacacctacgacgcccttcacatgcaggccctgccccctcgctctagaggatctggagcaacaaacttctcactactcaaacaagcaggtgacgtggaggagaatcccgggcctgggatccacatggccacttacgaggttctctgtgaggtggcgcggaaactgggcacggatgacagggaagtggtattgttcctcctaaacgtgttcatacctcaacccacactggcccaattaattggagctcttagagctttaaaggaggagggcaggttaacgtttcccctgttagcggaatgtctgtttcgtgcaggtcgcagagacctcttgcgcgacctgcttcacttagacccgcgttttttagagcgccacctagcgggcacaatgagttatttcagcccttatcagctcactgttctccacgtagacggggagctgtgtgcgagggatattaggtctttgatatttttaagcaaggacactatagggtctcgcagcacaccacagacattcttacactgggtgtactgtatggaaaacttagacctactgggtcccactgacgtggatgccctaatgtcaatgcttagatctttgtcaagagtagacctacagcgccaagtgcaaaccctaatgggccttcacctttccggcccatcacactcccaacactatcgccatacaccactcgagaccgatttctacgactacaaggacgacgatgacaagactagtggctccggcgagggcagaggaagtctactaacctgcggagatgtggaagaaaatcctggcccacatatgaccgagtacaagcccacggtgcgcctcgccacccgcgacgacgtccccagggccgtacgcaccctcgccgccgcgttcgccgactaccccgccacgcgccacaccgtcgatccggaccgccacatcgagcgggtcaccgagctgcaagaactcttcctcacgcgcgtcgggctcgacatcggcaaggtgtgggtcgcggacgacggcgccgcggtggcggtctggaccacgccggagagcgtcgaagcgggggcggtgttcgccgagatcggcccgcgcatggccgagttgagcggttcccggctggccgcgcagcaacagatggaaggcctcctggcgccgcaccggcccaaggagcccgcgtggttcctggccaccgtcggcgtctcgcccgaccaccagggcaagggtctgggcagcgccgtcgtgctccccggagtggaggcggccgagcgcgccggggtgcccgccttcctggagacctccgcgccccgcaacctccccttctacgagcggctcggcttcaccgtcaccgccgacgtcgaggtgcccgaaggaccgcgcacctggtgcatgacccgcaagcccggtgcctga

SEQ ID NO: 1218 - DNA, 2883 bp, Artificial Sequence
  Synthetic Polynucleotides
atgaggctccctgctcagctcctggggctgctaatgctctgggtctctggaagcagtggggatgttgtgatgactcagtctccactctccctgcccgtcacccctggagcgccggcctccatctcctgcagatccagtcagagcattgtacatagtaatggaaacacctatttagagtggtatcttcaaaagccagggcagtctccaaagctcctgatctataaagtttccaaccgattttctggagtccctgacaggttcagtggaagtggatcaggcacagattttacactgagaatcagcagagtggaggctgaggatgttggaatttattactgctttcaaggttcacatgttcctccgacgttcggccctgggaccaaattggaaatcaaaggcggaggcggaagtggaggcggaggatctggcggcggaggctctgaagtgcagctggtggagtctgggggaggcttggtccagcctggggggtccctgagactctcctgttcagcctctggattcacctttagtagctttggaatgcactgggtccgccaggctccagggaaggggctggaatgggtggcctacattagtagtggcagtagtaccatctactatggagacaccgtgaagggccgattcaccatctccagagacaacgccaagaactcactgtttctgcaaatgagcagcctgagagccgaggacacggccgtgtattattgtgcgagagaggggggatattactacggaaggagttactatactatggactactggggccaagggaccacggtcaccgtctccacgcgtgagcagaaactgatctcggaagaggatctggcgaagcccaccacgacgccagcgccgcgaccaccaacaccggcgcccaccatcgcgtcgcagcccctgtccctgcgcccagaggcgtgccggccagcggcggggggcgcagtgcacacgagggggctggacttcgcctgtgacatctacatctgggcgcccttggccgggacttgtggggtccttctcctgtcactggttatcaccctttactgcaaacggggcagaaagaaactcctgtatatattcaaacaaccatttatgagaccagtacaaactactcaagaggaagatggctgtagctgccgatttccagaagaagaagaaggaggatgtgaactgagagtgaagttcagcaggagcgcagacgcccccgcgtaccagcagggccagaaccagctctataacgagctgaatctaggacgaagagaggagtacgatgttttggacaagagacgtggccgggaccctgagatggggggaaagccgagaaggaagaaccctcaggaaggcctgtacaatgaactgcagaaagataagatggcggaggcctacagtgagattgggatgaaaggcgagcgccggaggggcaaggggcacgatggcctttaccagggtctcagtacagccaccaaggacacctacgacgcccttcacatgcaggccctgccccctcgctctagaggatctggagcaacaaacttctcactactcaaacaagcaggtgacgtggaggagaatcccgggcctgggatccacatggccacttacgaggttctctgtgaggtggcgcggaaactgggcacggatgacagggaagtggtattgttcctcctaaacgtgttcatacctcaacccacactggcccaattaattggagctcttagagctttaaaggaggagggcaggttaacgtttcccctgttagcggaatgtctgtttcgtgcaggtcgcagagacctcttgcgcgacctgcttcacttagacccgcgttttttagagcgccacctagcgggcacaatgagttatttcagcccttatcagctcactgttctccacgtagacggggagctgtgtgcgagggatattaggtctttgatatttttaagcaaggacactatagggtctcgcagcacaccacagacattcttacactgggtgtactgtatggaaaacttagacctactgggtcccactgacgtggatgccctaatgtcaatgcttagatctttgtcaagagtagacctacagcgccaagtgcaaaccctaatgggccttcacctttccggcccatcacactcccaacactatcgccatacaccactcgagaccgatttctacgactacaaggacgacgatgacaagactagtggctccggcgagggcagaggaagtctactaacctgcggagatgtggaagaaaatcctggcccacatatgaccgagtacaagcccacggtgcgcctcgccacccgcgacgacgtccccagggccgtacgcaccctcgccgccgcgttcgccgactaccccgccacgcgccacaccgtcgatccggaccgccacatcgagcgggtcaccgagctgcaagaactcttcctcacgcgcgtcgggctcgacatcggcaaggtgtgggtcgcggacgacggcgccgcggtggcggtctggaccacgccggagagcgtcgaagcgggggcggtgttcgccgagatcggcccgcgcatggccgagttgagcggttcccggctggccgcgcagcaacagatggaaggcctcctggcgccgcaccggcccaaggagcccgcgtggttcctggccaccgtcggcgtctcgcccgaccaccagggcaagggtctgggcagcgccgtcgtgctccccggagtggaggcggccgagcgcgccggggtgcccgccttcctggagacctccgcgccccgcaacctccccttctacgagcggctcggcttcaccgtcaccgccgacgtcgaggtgcccgaaggaccgcgcacctggtgcatgacccgcaagcccggtgcctga

SEQ ID NO: 1219 - DNA, 2958 bp, Artificial Sequence
  Synthetic Polynucleotides
atggccttaccagtgaccgccttgctcctgccgctggccttgctgctccacgccgccaggccggccagaaagagaacccagcccaccttcggcttcaccgtgaactggaagttcagcgagagcaccaccgtgttcaccggccagtgcttcatcgaccggaacggcaaagaggtgctgaaaaccatgtggctgctgcggagcagcgtgaacgacatcggcgacgactggaaggccaccagagtgggcatcaacatcttcacccggctgcggacacagaaagagggcggctctggcggaagcgccagaaagtgtagcctgaccggcaagtggaccaacgacctgggcagcaacatgaccatcggagccgtgaacagcagaggcgagtttaccggcacctacatcaccgccgtgaccgccaccagcaacgagatcaaagagagccccctgcacggcacccagaacaccatcaacaagagcggcggcagcacaacagtgtttacaggacagtgctttattgaccgcaatgggaaagaagtgctgaaaacaatgtggctgctgaggtcctccgtgaatgacattggagatgattggaaagctacaagagtggggattaacatttttaccagactgaggacccagaaagaagggggcagcggaggctccgccagaaaatgctctctgacagggaagtggacaaatgatctggggtccaatatgacaatcggcgctgtgaactctcggggcgagttcactggaacatatattacagccgtgacagctacctctaacgaaatcaaagagtctcctctgcacgggacacagaataccattaacaaacggacccagcctacatttgggtttacagtgaattggaaattctccgagacgcgtgagcagaaactgatctcggaagaggatctggcgaagcccaccacgacgccagcgccgcgaccaccaacaccggcgcccaccatcgcgtcgcagcccctgtccctgcgcccagaggcgtgccggccagcggcggggggcgcagtgcacacgagggggctggacttcgcctgtgacatctacatctgggcgcccttggccgggacttgtggggtccttctcctgtcactggttatcaccctttactgcaaacggggcagaaagaaactcctgtatatattcaaacaaccatttatgagaccagtacaaactactcaagaggaagatggctgtagctgccgatttccagaagaagaagaaggaggatgtgaactgagagtgaagttcagcaggagcgcagacgcccccgcgtaccagcagggccagaaccagctctataacgagctgaatctaggacgaagagaggagtacgatgttttggacaagagacgtggccgggaccctgagatggggggaaagccgagaaggaagaaccctcaggaaggcctgtacaatgaactgcagaaagataagatggcggaggcctacagtgagattgggatgaaaggcgagcgccggaggggcaaggggcacgatggcctttaccagggtctcagtacagccaccaaggacacctacgacgcccttcacatgcaggccctgccccctcgctctagaggatctggagcaacaaacttctcactactcaaacaagcaggtgacgtggaggagaatcccgggcctgggatccacatggccacttacgaggttctctgtgaggtggcgcggaaactgggcacggatgacagggaagtggtattgttcctcctaaacgtgttcatacctcaacccacactggcccaattaattggagctcttagagctttaaaggaggagggcaggttaacgtttcccctgttagcggaatgtctgtttcgtgcaggtcgcagagacctcttgcgcgacctgcttcacttagacccgcgttttttagagcgccacctagcgggcacaatgagttatttcagcccttatcagctcactgttctccacgtagacggggagctgtgtgcgagggatattaggtctttgatatttttaagcaaggacactatagggtctcgcagcacaccacagacattcttacactgggtgtactgtatggaaaacttagacctactgggtcccactgacgtggatgccctaatgtcaatgcttagatctttgtcaagagtagacctacagcgccaagtgcaaaccctaatgggccttcacctttccggcccatcacactcccaacactatcgccatacaccactcgagaccgatttctacgactacaaggacgacgatgacaagactagtggctccggcgagggcagaggaagtctactaacctgcggagatgtggaagaaaatcctggcccacatatgaccgagtacaagcccacggtgcgcctcgccacccgcgacgacgtccccagggccgtacgcaccctcgccgccgcgttcgccgactaccccgccacgcgccacaccgtcgatccggaccgccacatcgagcgggtcaccgagctgcaagaactcttcctcacgcgcgtcgggctcgacatcggcaaggtgtgggtcgcggacgacggcgccgcggtggcggtctggaccacgccggagagcgtcgaagcgggggcggtgttcgccgagatcggcccgcgcatggccgagttgagcggttcccggctggccgcgcagcaacagatggaaggcctcctggcgccgcaccggcccaaggagcccgcgtggttcctggccaccgtcggcgtctcgcccgaccaccagggcaagggtctgggcagcgccgtcgtgctccccggagtggaggcggccgagcgcgccggggtgcccgccttcctggagacctccgcgccccgcaacctccccttctacgagcggctcggcttcaccgtcaccgccgacgtcgaggtgcccgaaggaccgcgcacctggtgcatgacccgcaagcccggtgcctga

SEQ ID NO: 1220 - DNA, 2874 bp, Artificial Sequence
  Synthetic Polynucleotides
atggccttaccagtgaccgccttgctcctgccgctggccttgctgctccacgccgccaggccggacatcgtcctgacccagtccccagccagcctggcggtgtccctgggtcaacgagctaccatttcctgcagagcctctaagtccgtatccacttccggctatagttacctgcattggtaccaacagaaaccagggcagccacccaagctgctcatctatctggcctcaaacctggagtccggcgtgcccgccagattctccggaagtgggagcggcaccgactttacattgaacatccacccagtcgaagaggaagatgctgccacttattactgtcagcactccagggagctgccatttacatttggctctggcacaaaactggagatcaaaggcggaggcggaagtggaggcggaggatctggcggcggaggctctcaggttcagctggtcgagtccgggggaggtctggtacagccgggtggcagcctcaagctgtcatgtgccgcatctggttttgactttagcaggtattggatgagctgggtccgccaggccccgggcaagggacttgagtggattggagaaataaaccctacttccagcacaatcaacttcacaccttctttgaaagataaggtttttatctctcgggataacgctaaaaacacactgtacttgcagatgtctaaggtgcgaagcgaagacaccgccctctattattgcgcccggggtaattactaccgctatggggatgcgatggactattgggggcaaggtacctccgtcacggtctcaacgcgtgagcagaaactgatctcggaagaggatctggcgaagcccaccacgacgccagcgccgcgaccaccaacaccggcgcccaccatcgcgtcgcagcccctgtccctgcgcccagaggcgtgccggccagcggcggggggcgcagtgcacacgagggggctggacttcgcctgtgacatctacatctgggcgcccttggccgggacttgtggggtccttctcctgtcactggttatcaccctttactgcaaacggggcagaaagaaactcctgtatatattcaaacaaccatttatgagaccagtacaaactactcaagaggaagatggctgtagctgccgatttccagaagaagaagaaggaggatgtgaactgagagtgaagttcagcaggagcgcagacgcccccgcgtaccagcagggccagaaccagctctataacgagctgaatctaggacgaagagaggagtacgatgttttggacaagagacgtggccgggaccctgagatggggggaaagccgagaaggaagaaccctcaggaaggcctgtacaatgaactgcagaaagataagatggcggaggcctacagtgagattgggatgaaaggcgagcgccggaggggcaaggggcacgatggcctttaccagggtctcagtacagccaccaaggacacctacgacgcccttcacatgcaggccctgccccctcgctctagaggatctggagcaacaaacttctcactactcaaacaagcaggtgacgtggaggagaatcccgggcctgggatccacatggccacttacgaggttctctgtgaggtggcgcggaaactgggcacggatgacagggaagtggtattgttcctcctaaacgtgttcatacctcaacccacactggcccaattaattggagctcttagagctttaaaggaggagggcaggttaacgtttcccctgttagcggaatgtctgtttcgtgcaggtcgcagagacctcttgcgcgacctgcttcacttagacccgcgttttttagagcgccacctagcgggcacaatgagttatttcagcccttatcagctcactgttctccacgtagacggggagctgtgtgcgagggatattaggtctttgatatttttaagcaaggacactatagggtctcgcagcacaccacagacattcttacactgggtgtactgtatggaaaacttagacctactgggtcccactgacgtggatgccctaatgtcaatgcttagatctttgtcaagagtagacctacagcgccaagtgcaaaccctaatgggccttcacctttccggcccatcacactcccaacactatcgccatacaccactcgagaccgatttctacgactacaaggacgacgatgacaagactagtggctccggcgagggcagaggaagtctactaacctgcggagatgtggaagaaaatcctggcccacatatgaccgagtacaagcccacggtgcgcctcgccacccgcgacgacgtccccagggccgtacgcaccctcgccgccgcgttcgccgactaccccgccacgcgccacaccgtcgatccggaccgccacatcgagcgggtcaccgagctgcaagaactcttcctcacgcgcgtcgggctcgacatcggcaaggtgtgggtcgcggacgacggcgccgcggtggcggtctggaccacgccggagagcgtcgaagcgggggcggtgttcgccgagatcggcccgcgcatggccgagttgagcggttcccggctggccgcgcagcaacagatggaaggcctcctggcgccgcaccggcccaaggagcccgcgtggttcctggccaccgtcggcgtctcgcccgaccaccagggcaagggtctgggcagcgccgtcgtgctccccggagtggaggcggccgagcgcgccggggtgcccgccttcctggagacctccgcgccccgcaacctccccttctacgagcggctcggcttcaccgtcaccgccgacgtcgaggtgcccgaaggaccgcgcacctggtgcatgacccgcaagcccggtgcctga

SEQ ID NO: 1221 - DNA, 2868 bp, Artificial Sequence
  Synthetic Polynucleotides
atggccttaccagtgaccgccttgctcctgccgctggccttgctgctccacgccgccaggccggacatccagatgacccagagccctagctcactgagcgccagcgtgggcgacagggtgaccattacctgctccgccagccaggacatcagcaactacctgaactggtaccagcagaagcccggcaaggcccccaagctgctgatctactacacctccaacctgcactccggcgtgcccagcaggttcagcggaagcggcagcggcaccgatttcaccctgaccatctccagcctgcagcccgaggacttcgccacctactactgccagcagtacaggaagctcccctggactttcggccagggcaccaaactggagatcaagcgtggcggaggcggaagtggaggcggaggatctggcggcggaggctctcaggtgcagctggtccagagcggcgccgaagtgaagaagcccggcagctccgtgaaagtgagctgcaaggccagcggcggcaccttcagcaactactggatgcactgggtgaggcaggcccccggacagggcctggagtggatgggcgccacctacaggggccacagcgacacctactacaaccagaagttcaagggccgggtgaccatcaccgccgacaagagcaccagcaccgcctacatggaactgagcagcctcaggagcgaggacaccgctgtgtattactgcgccaggggcgccatctacgacggctacgacgtgctggacaactggggccagggcacactggtgaccgtgtccagcacgcgtgagcagaaactgatctcggaagaggatctggcgaagcccaccacgacgccagcgccgcgaccaccaacaccggcgcccaccatcgcgtcgcagcccctgtccctgcgcccagaggcgtgccggccagcggcggggggcgcagtgcacacgagggggctggacttcgcctgtgacatctacatctgggcgcccttggccgggacttgtggggtccttctcctgtcactggttatcaccctttactgcaaacggggcagaaagaaactcctgtatatattcaaacaaccatttatgagaccagtacaaactactcaagaggaagatggctgtagctgccgatttccagaagaagaagaaggaggatgtgaactgagagtgaagttcagcaggagcgcagacgcccccgcgtaccagcagggccagaaccagctctataacgagctgaatctaggacgaagagaggagtacgatgttttggacaagagacgtggccgggaccctgagatggggggaaagccgagaaggaagaaccctcaggaaggcctgtacaatgaactgcagaaagataagatggcggaggcctacagtgagattgggatgaaaggcgagcgccggaggggcaaggggcacgatggcctttaccagggtctcagtacagccaccaaggacacctacgacgcccttcacatgcaggccctgccccctcgctctagaggatctggagcaacaaacttctcactactcaaacaagcaggtgacgtggaggagaatcccgggcctgggatccacatggccacttacgaggttctctgtgaggtggcgcggaaactgggcacggatgacagggaagtggtattgttcctcctaaacgtgttcatacctcaacccacactggcccaattaattggagctcttagagctttaaaggaggagggcaggttaacgtttcccctgttagcggaatgtctgtttcgtgcaggtcgcagagacctcttgcgcgacctgcttcacttagacccgcgttttttagagcgccacctagcgggcacaatgagttatttcagcccttatcagctcactgttctccacgtagacggggagctgtgtgcgagggatattaggtctttgatatttttaagcaaggacactatagggtctcgcagcacaccacagacattcttacactgggtgtactgtatggaaaacttagacctactgggtcccactgacgtggatgccctaatgtcaatgcttagatctttgtcaagagtagacctacagcgccaagtgcaaaccctaatgggccttcacctttccggcccatcacactcccaacactatcgccatacaccactcgagaccgatttctacgactacaaggacgacgatgacaagactagtggctccggcgagggcagaggaagtctactaacctgcggagatgtggaagaaaatcctggcccacatatgaccgagtacaagcccacggtgcgcctcgccacccgcgacgacgtccccagggccgtacgcaccctcgccgccgcgttcgccgactaccccgccacgcgccacaccgtcgatccggaccgccacatcgagcgggtcaccgagctgcaagaactcttcctcacgcgcgtcgggctcgacatcggcaaggtgtgggtcgcggacgacggcgccgcggtggcggtctggaccacgccggagagcgtcgaagcgggggcggtgttcgccgagatcggcccgcgcatggccgagttgagcggttcccggctggccgcgcagcaacagatggaaggcctcctggcgccgcaccggcccaaggagcccgcgtggttcctggccaccgtcggcgtctcgcccgaccaccagggcaagggtctgggcagcgccgtcgtgctccccggagtggaggcggccgagcgcgccggggtgcccgccttcctggagacctccgcgccccgcaacctccccttctacgagcggctcggcttcaccgtcaccgccgacgtcgaggtgcccgaaggaccgcgcacctggtgcatgacccgcaagcccggtgcctga

SEQ ID NO: 1222 - DNA, 2868 bp, Artificial Sequence
  Synthetic Polynucleotides
atggccttaccagtgaccgccttgctcctgccgctggccttgctgctccacgccgccaggccggacatcgtgctgacacagagccctgccaccctgtctctgagccctggcgatagagccaccatcagctgtagagccagcgagagcgtgaccatcctgggcagccacctgatctactggtatcagcagaagcccggccagccccccagactgctgattcagctggcctccaatgtgcagaccggcgtgccagccagattttccggcagcggcagcagaaccgacttcaccctgaccatcagcagcgtggaacccgaggacttcgccgtgtactactgcctccagagccggaccatccccagaacattcggccagggcaccaagctggaaatcaagagaggcggaggcggaagtggaggcggaggatctggcggcggaggctctcaggtgcagctggtgcagtctggccccgaagtgaagaaacccggcgagtccgtgaagatcagctgcaaggccagcggctacaccttccggcactacagcatgaactgggtcaagcaggccccaggccagggcctgaagtggatgggcagaatcaacaccgagagcggcgtgcccatctacgccgacgacttcaagggccggttcagcttcaccgtggacaccagcgccagcaccgcctacctggaaatctccagcctgaccagcgaggataccgccgtgtatttctgctccaacgactacctgtacagcctggatttctggggccagggaaccaccctgacagtgtcctctacgcgtgagcagaaactgatctcggaagaggatctggcgaagcccaccacgacgccagcgccgcgaccaccaacaccggcgcccaccatcgcgtcgcagcccctgtccctgcgcccagaggcgtgccggccagcggcggggggcgcagtgcacacgagggggctggacttcgcctgtgacatctacatctgggcgcccttggccgggacttgtggggtccttctcctgtcactggttatcaccctttactgcaaacggggcagaaagaaactcctgtatatattcaaacaaccatttatgagaccagtacaaactactcaagaggaagatggctgtagctgccgatttccagaagaagaagaaggaggatgtgaactgagagtgaagttcagcaggagcgcagacgcccccgcgtaccagcagggccagaaccagctctataacgagctgaatctaggacgaagagaggagtacgatgttttggacaagagacgtggccgggaccctgagatggggggaaagccgagaaggaagaaccctcaggaaggcctgtacaatgaactgcagaaagataagatggcggaggcctacagtgagattgggatgaaaggcgagcgccggaggggcaaggggcacgatggcctttaccagggtctcagtacagccaccaaggacacctacgacgcccttcacatgcaggccctgccccctcgctctagaggatctggagcaacaaacttctcactactcaaacaagcaggtgacgtggaggagaatcccgggcctgggatccacatggccacttacgaggttctctgtgaggtggcgcggaaactgggcacggatgacagggaagtggtattgttcctcctaaacgtgttcatacctcaacccacactggcccaattaattggagctcttagagctttaaaggaggagggcaggttaacgtttcccctgttagcggaatgtctgtttcgtgcaggtcgcagagacctcttgcgcgacctgcttcacttagacccgcgttttttagagcgccacctagcgggcacaatgagttatttcagcccttatcagctcactgttctccacgtagacggggagctgtgtgcgagggatattaggtctttgatatttttaagcaaggacactatagggtctcgcagcacaccacagacattcttacactgggtgtactgtatggaaaacttagacctactgggtcccactgacgtggatgccctaatgtcaatgcttagatctttgtcaagagtagacctacagcgccaagtgcaaaccctaatgggccttcacctttccggcccatcacactcccaacactatcgccatacaccactcgagaccgatttctacgactacaaggacgacgatgacaagactagtggctccggcgagggcagaggaagtctactaacctgcggagatgtggaagaaaatcctggcccacatatgaccgagtacaagcccacggtgcgcctcgccacccgcgacgacgtccccagggccgtacgcaccctcgccgccgcgttcgccgactaccccgccacgcgccacaccgtcgatccggaccgccacatcgagcgggtcaccgagctgcaagaactcttcctcacgcgcgtcgggctcgacatcggcaaggtgtgggtcgcggacgacggcgccgcggtggcggtctggaccacgccggagagcgtcgaagcgggggcggtgttcgccgagatcggcccgcgcatggccgagttgagcggttcccggctggccgcgcagcaacagatggaaggcctcctggcgccgcaccggcccaaggagcccgcgtggttcctggccaccgtcggcgtctcgcccgaccaccagggcaagggtctgggcagcgccgtcgtgctccccggagtggaggcggccgagcgcgccggggtgcccgccttcctggagacctccgcgccccgcaacctccccttctacgagcggctcggcttcaccgtcaccgccgacgtcgaggtgcccgaaggaccgcgcacctggtgcatgacccgcaagcccggtgcctga

SEQ ID NO: 1223 - DNA, 2871 bp, Artificial Sequence
  Synthetic Polynucleotides
atggccttaccagtgaccgccttgctcctgccgctggccttgctgctccacgccgccaggccgcagtctgtgctgacacagcctcctagtgtgtctggcgctcctggacagagagtgaccatcagctgtacaggcagcagcagcaatatcggagccggctttgacgtgcactggtatcagcagctgcctggcacagcccctaaactgctgatctacggcaacagcaacagacccagcggcgtgcccgatagattttccggctctaagagcggcacaagcgccagcctggctattactggactccaggccgaggacgaggccgactactactgtcagagctacgacagcagcctgagcggctacgttttcggcaccggcaccaaagtgacagtgcttggtggcggaggcggaagtggaggcggaggatctggcggcggaggctctcaagttcagctggttcagagcggagccgaagtgaagaaacctggggcctctgtgaaggtgtcctgcaaggcttccggctacacctttaccgattactacatgcactgggtccgacaggctcccggccaaagacttgaatggatgggctggatcaaccccaacagcggcggcacaaattacgcccagaagttccaggaccggatcaccgtgaccagagacaccagctccaacaccggctacatggaactgacccggctgagatccgatgacaccgccgtgtactactgcgctagaagcccttactccggcgtgctggataagtggggacagggcacactggtcaccgtgtcatctacgcgtgagcagaaactgatctcggaagaggatctggcgaagcccaccacgacgccagcgccgcgaccaccaacaccggcgcccaccatcgcgtcgcagcccctgtccctgcgcccagaggcgtgccggccagcggcggggggcgcagtgcacacgagggggctggacttcgcctgtgacatctacatctgggcgcccttggccgggacttgtggggtccttctcctgtcactggttatcaccctttactgcaaacggggcagaaagaaactcctgtatatattcaaacaaccatttatgagaccagtacaaactactcaagaggaagatggctgtagctgccgatttccagaagaagaagaaggaggatgtgaactgagagtgaagttcagcaggagcgcagacgcccccgcgtaccagcagggccagaaccagctctataacgagctgaatctaggacgaagagaggagtacgatgttttggacaagagacgtggccgggaccctgagatggggggaaagccgagaaggaagaaccctcaggaaggcctgtacaatgaactgcagaaagataagatggcggaggcctacagtgagattgggatgaaaggcgagcgccggaggggcaaggggcacgatggcctttaccagggtctcagtacagccaccaaggacacctacgacgcccttcacatgcaggccctgccccctcgctctagaggatctggagcaacaaacttctcactactcaaacaagcaggtgacgtggaggagaatcccgggcctgggatccacatggccacttacgaggttctctgtgaggtggcgcggaaactgggcacggatgacagggaagtggtattgttcctcctaaacgtgttcatacctcaacccacactggcccaattaattggagctcttagagctttaaaggaggagggcaggttaacgtttcccctgttagcggaatgtctgtttcgtgcaggtcgcagagacctcttgcgcgacctgcttcacttagacccgcgttttttagagcgccacctagcgggcacaatgagttatttcagcccttatcagctcactgttctccacgtagacggggagctgtgtgcgagggatattaggtctttgatatttttaagcaaggacactatagggtctcgcagcacaccacagacattcttacactgggtgtactgtatggaaaacttagacctactgggtcccactgacgtggatgccctaatgtcaatgcttagatctttgtcaagagtagacctacagcgccaagtgcaaaccctaatgggccttcacctttccggcccatcacactcccaacactatcgccatacaccactcgagaccgatttctacgactacaaggacgacgatgacaagactagtggctccggcgagggcagaggaagtctactaacctgcggagatgtggaagaaaatcctggcccacatatgaccgagtacaagcccacggtgcgcctcgccacccgcgacgacgtccccagggccgtacgcaccctcgccgccgcgttcgccgactaccccgccacgcgccacaccgtcgatccggaccgccacatcgagcgggtcaccgagctgcaagaactcttcctcacgcgcgtcgggctcgacatcggcaaggtgtgggtcgcggacgacggcgccgcggtggcggtctggaccacgccggagagcgtcgaagcgggggcggtgttcgccgagatcggcccgcgcatggccgagttgagcggttcccggctggccgcgcagcaacagatggaaggcctcctggcgccgcaccggcccaaggagcccgcgtggttcctggccaccgtcggcgtctcgcccgaccaccagggcaagggtctgggcagcgccgtcgtgctccccggagtggaggcggccgagcgcgccggggtgcccgccttcctggagacctccgcgccccgcaacctccccttctacgagcggctcggcttcaccgtcaccgccgacgtcgaggtgcccgaaggaccgcgcacctggtgcatgacccgcaagcccggtgcctga

SEQ ID NO: 1224 - DNA, 2865 bp, Artificial Sequence
  Synthetic Polynucleotides
atggccttaccagtgaccgccttgctcctgccgctggccttgctgctccacgccgccaggccgcaggctgttctgacacagcctccatctgcctctggcacacctggacagagagtgaccatctcctgtagcggcagcagcagcaacatcggcagctacaccgtgtcctggtatcagcagctccctggaacagcccctaagttcctgatctacagcaacaaccagcggcctagcggcgtgcccgatagattttctggcagcaagagcggcacaagcgccagcctggctatttctggactccagtctgaggacgaggccgactactattgtgccgcctgggacgatagcctgaacggctatgtgtttggcaccggcaccaaagtgacagtgcttggtggcggaggcggaagtggaggcggaggatctggcggcggaggctctgaagttcaactggttcagagcggagccgaagtgaagaagcctggcgagagcctgaagattagctgcaaaggcagcggctacgacttcaccacctactggatcggctgggtccgacagatgcctggcaaaggactggaatggatgggcatcatctaccccggcgacagcgacaccagatacagccctagcgttagaggccgcgtgaccatcagcgccgacaagtctatcaacaccgcctacctccagtggtccagcctggaagcctctgacaccgccatgtactactgcgccagaatgtggaccttcagccaggatggatggggccagggaacactggtcacagtgtcatctacgcgtgagcagaaactgatctcggaagaggatctggcgaagcccaccacgacgccagcgccgcgaccaccaacaccggcgcccaccatcgcgtcgcagcccctgtccctgcgcccagaggcgtgccggccagcggcggggggcgcagtgcacacgagggggctggacttcgcctgtgacatctacatctgggcgcccttggccgggacttgtggggtccttctcctgtcactggttatcaccctttactgcaaacggggcagaaagaaactcctgtatatattcaaacaaccatttatgagaccagtacaaactactcaagaggaagatggctgtagctgccgatttccagaagaagaagaaggaggatgtgaactgagagtgaagttcagcaggagcgcagacgcccccgcgtaccagcagggccagaaccagctctataacgagctgaatctaggacgaagagaggagtacgatgttttggacaagagacgtggccgggaccctgagatggggggaaagccgagaaggaagaaccctcaggaaggcctgtacaatgaactgcagaaagataagatggcggaggcctacagtgagattgggatgaaaggcgagcgccggaggggcaaggggcacgatggcctttaccagggtctcagtacagccaccaaggacacctacgacgcccttcacatgcaggccctgccccctcgctctagaggatctggagcaacaaacttctcactactcaaacaagcaggtgacgtggaggagaatcccgggcctgggatccacatggccacttacgaggttctctgtgaggtggcgcggaaactgggcacggatgacagggaagtggtattgttcctcctaaacgtgttcatacctcaacccacactggcccaattaattggagctcttagagctttaaaggaggagggcaggttaacgtttcccctgttagcggaatgtctgtttcgtgcaggtcgcagagacctcttgcgcgacctgcttcacttagacccgcgttttttagagcgccacctagcgggcacaatgagttatttcagcccttatcagctcactgttctccacgtagacggggagctgtgtgcgagggatattaggtctttgatatttttaagcaaggacactatagggtctcgcagcacaccacagacattcttacactgggtgtactgtatggaaaacttagacctactgggtcccactgacgtggatgccctaatgtcaatgcttagatctttgtcaagagtagacctacagcgccaagtgcaaaccctaatgggccttcacctttccggcccatcacactcccaacactatcgccatacaccactcgagaccgatttctacgactacaaggacgacgatgacaagactagtggctccggcgagggcagaggaagtctactaacctgcggagatgtggaagaaaatcctggcccacatatgaccgagtacaagcccacggtgcgcctcgccacccgcgacgacgtccccagggccgtacgcaccctcgccgccgcgttcgccgactaccccgccacgcgccacaccgtcgatccggaccgccacatcgagcgggtcaccgagctgcaagaactcttcctcacgcgcgtcgggctcgacatcggcaaggtgtgggtcgcggacgacggcgccgcggtggcggtctggaccacgccggagagcgtcgaagcgggggcggtgttcgccgagatcggcccgcgcatggccgagttgagcggttcccggctggccgcgcagcaacagatggaaggcctcctggcgccgcaccggcccaaggagcccgcgtggttcctggccaccgtcggcgtctcgcccgaccaccagggcaagggtctgggcagcgccgtcgtgctccccggagtggaggcggccgagcgcgccggggtgcccgccttcctggagacctccgcgccccgcaacctccccttctacgagcggctcggcttcaccgtcaccgccgacgtcgaggtgcccgaaggaccgcgcacctggtgcatgacccgcaagcccggtgcctga

SEQ ID NO: 1225 - DNA, 2898 bp, Artificial Sequence
  Synthetic Polynucleotides
atggccttaccagtgaccgccttgctcctgccgctggccttgctgctccacgccgccaggccgctgcctgttctgacacagcctccatctgcctctggcacacctggacagagagtgaccatcagctgtagcggcagaagcagcaacatcggcagcaacagcgtgaactggtacagacagcttcctggcgctgcccctaagctgctgatctacagcaacaaccagcggcctcctggcgtgccagtcagattttctggcagcaagagcggcacaagcgccagcctggctatttctggactccagtctgaggacgaggccacctactactgtgccacctgggacgacaacctgaacgtgcactacgtgttcggcaccggcaccaaagtgacagtgcttggaagtagaggcggaggcggaagtggaggcggaggatctggcggcggaggctctcttgaaatggctcaggtgcagctggtgcagagcggagccgaagtgaagaaacctggcagcagcgtgaaggtgtcctgcaaagcttctggcggcaccttcagcagctacgccatctcttgggttcgacaggcccctggacaaggactggaatggatgggcagaatcatccccatcctgggaatcgccaactacgcccagaaattccagggcagagtgacaatcaccgccgacaagagcaccagcaccgcctacatggaactgagcagcctgagaagcgaggacaccgccgtgtactattgtgcaagaggcggctactacagccacgacatgtggagcgaagattggggccagggcacactggtcacagtgtcatctacgcgtgagcagaaactgatctcggaagaggatctggcgaagcccaccacgacgccagcgccgcgaccaccaacaccggcgcccaccatcgcgtcgcagcccctgtccctgcgcccagaggcgtgccggccagcggcggggggcgcagtgcacacgagggggctggacttcgcctgtgacatctacatctgggcgcccttggccgggacttgtggggtccttctcctgtcactggttatcaccctttactgcaaacggggcagaaagaaactcctgtatatattcaaacaaccatttatgagaccagtacaaactactcaagaggaagatggctgtagctgccgatttccagaagaagaagaaggaggatgtgaactgagagtgaagttcagcaggagcgcagacgcccccgcgtaccagcagggccagaaccagctctataacgagctgaatctaggacgaagagaggagtacgatgttttggacaagagacgtggccgggaccctgagatggggggaaagccgagaaggaagaaccctcaggaaggcctgtacaatgaactgcagaaagataagatggcggaggcctacagtgagattgggatgaaaggcgagcgccggaggggcaaggggcacgatggcctttaccagggtctcagtacagccaccaaggacacctacgacgcccttcacatgcaggccctgccccctcgctctagaggatctggagcaacaaacttctcactactcaaacaagcaggtgacgtggaggagaatcccgggcctgggatccacatggccacttacgaggttctctgtgaggtggcgcggaaactgggcacggatgacagggaagtggtattgttcctcctaaacgtgttcatacctcaacccacactggcccaattaattggagctcttagagctttaaaggaggagggcaggttaacgtttcccctgttagcggaatgtctgtttcgtgcaggtcgcagagacctcttgcgcgacctgcttcacttagacccgcgttttttagagcgccacctagcgggcacaatgagttatttcagcccttatcagctcactgttctccacgtagacggggagctgtgtgcgagggatattaggtctttgatatttttaagcaaggacactatagggtctcgcagcacaccacagacattcttacactgggtgtactgtatggaaaacttagacctactgggtcccactgacgtggatgccctaatgtcaatgcttagatctttgtcaagagtagacctacagcgccaagtgcaaaccctaatgggccttcacctttccggcccatcacactcccaacactatcgccatacaccactcgagaccgatttctacgactacaaggacgacgatgacaagactagtggctccggcgagggcagaggaagtctactaacctgcggagatgtggaagaaaatcctggcccacatatgaccgagtacaagcccacggtgcgcctcgccacccgcgacgacgtccccagggccgtacgcaccctcgccgccgcgttcgccgactaccccgccacgcgccacaccgtcgatccggaccgccacatcgagcgggtcaccgagctgcaagaactcttcctcacgcgcgtcgggctcgacatcggcaaggtgtgggtcgcggacgacggcgccgcggtggcggtctggaccacgccggagagcgtcgaagcgggggcggtgttcgccgagatcggcccgcgcatggccgagttgagcggttcccggctggccgcgcagcaacagatggaaggcctcctggcgccgcaccggcccaaggagcccgcgtggttcctggccaccgtcggcgtctcgcccgaccaccagggcaagggtctgggcagcgccgtcgtgctccccggagtggaggcggccgagcgcgccggggtgcccgccttcctggagacctccgcgccccgcaacctccccttctacgagcggctcggcttcaccgtcaccgccgacgtcgaggtgcccgaaggaccgcgcacctggtgcatgacccgcaagcccggtgcctga

SEQ ID NO: 1226 - DNA, 2865 bp, Artificial Sequence
  Synthetic Polynucleotides
atggccttaccagtgaccgccttgctcctgccgctggccttgctgctccacgccgccaggccggacatcgtgctgacacagagccctgcttctctggccgtgtctctgggagagagagccaccatcaactgtagagccagcgagagcgtgtccgtgattggagcccacctgatccactggtatcagcagaagcctggacagcctcctaagctgctgatctacctggcctccaacctggaaacaggcgtgccagccagattttctggcagcggctctggcaccgatttcaccctgacaatcagcagcctccaggccgaagatgccgccatctactactgcctccagagccggatcttccccagaacctttggacagggcaccaagctggaaatcaaaggcggaggcggaagtggaggcggaggatctggcggcggaggctctcaagttcagctggtgcagtctggctccgagctgaagaaacctggcgagtccgtgaagatcagctgcaaggccagcggctacaccttcaccgactacagcatcaactgggtcaagcaggcccctggacagggactgaaatggatgggctggatcaacaccgagacaagagagcccgcctacgcctacgacttcagaggcagattcgtgttctccctggacaccagcgccagcacagcctatctccagatcagctctctgaaggccgaggataccgccgtgtacttctgcgccctggactacagctacgctatggactattggggccagggcaccctggtcacagtctcttctacgcgtgagcagaaactgatctcggaagaggatctggcgaagcccaccacgacgccagcgccgcgaccaccaacaccggcgcccaccatcgcgtcgcagcccctgtccctgcgcccagaggcgtgccggccagcggcggggggcgcagtgcacacgagggggctggacttcgcctgtgacatctacatctgggcgcccttggccgggacttgtggggtccttctcctgtcactggttatcaccctttactgcaaacggggcagaaagaaactcctgtatatattcaaacaaccatttatgagaccagtacaaactactcaagaggaagatggctgtagctgccgatttccagaagaagaagaaggaggatgtgaactgagagtgaagttcagcaggagcgcagacgcccccgcgtaccagcagggccagaaccagctctataacgagctgaatctaggacgaagagaggagtacgatgttttggacaagagacgtggccgggaccctgagatggggggaaagccgagaaggaagaaccctcaggaaggcctgtacaatgaactgcagaaagataagatggcggaggcctacagtgagattgggatgaaaggcgagcgccggaggggcaaggggcacgatggcctttaccagggtctcagtacagccaccaaggacacctacgacgcccttcacatgcaggccctgccccctcgctctagaggatctggagcaacaaacttctcactactcaaacaagcaggtgacgtggaggagaatcccgggcctgggatccacatggccacttacgaggttctctgtgaggtggcgcggaaactgggcacggatgacagggaagtggtattgttcctcctaaacgtgttcatacctcaacccacactggcccaattaattggagctcttagagctttaaaggaggagggcaggttaacgtttcccctgttagcggaatgtctgtttcgtgcaggtcgcagagacctcttgcgcgacctgcttcacttagacccgcgttttttagagcgccacctagcgggcacaatgagttatttcagcccttatcagctcactgttctccacgtagacggggagctgtgtgcgagggatattaggtctttgatatttttaagcaaggacactatagggtctcgcagcacaccacagacattcttacactgggtgtactgtatggaaaacttagacctactgggtcccactgacgtggatgccctaatgtcaatgcttagatctttgtcaagagtagacctacagcgccaagtgcaaaccctaatgggccttcacctttccggcccatcacactcccaacactatcgccatacaccactcgagaccgatttctacgactacaaggacgacgatgacaagactagtggctccggcgagggcagaggaagtctactaacctgcggagatgtggaagaaaatcctggcccacatatgaccgagtacaagcccacggtgcgcctcgccacccgcgacgacgtccccagggccgtacgcaccctcgccgccgcgttcgccgactaccccgccacgcgccacaccgtcgatccggaccgccacatcgagcgggtcaccgagctgcaagaactcttcctcacgcgcgtcgggctcgacatcggcaaggtgtgggtcgcggacgacggcgccgcggtggcggtctggaccacgccggagagcgtcgaagcgggggcggtgttcgccgagatcggcccgcgcatggccgagttgagcggttcccggctggccgcgcagcaacagatggaaggcctcctggcgccgcaccggcccaaggagcccgcgtggttcctggccaccgtcggcgtctcgcccgaccaccagggcaagggtctgggcagcgccgtcgtgctccccggagtggaggcggccgagcgcgccggggtgcccgccttcctggagacctccgcgccccgcaacctccccttctacgagcggctcggcttcaccgtcaccgccgacgtcgaggtgcccgaaggaccgcgcacctggtgcatgacccgcaagcccggtgcctga

SEQ ID NO: 1227 - DNA, 2868 bp, Artificial Sequence
  Synthetic Polynucleotides
atggccttaccagtgaccgccttgctcctgccgctggccttgctgctccacgccgccaggccggacatcgtgctgacacagtctcccgccacactgtcactgagccctggcgatagagccacactgagctgtagagccagcgagagcgtgacaatcctgggcagccacctgatctactggtatcagcagaagcccggacaggcccctagactgctgattcagctcgccagcaatgtgcagacaggcatccctgccagattttccggcagcggcagcagaaccgatttcaccctgaccataagcagcctggaacctgaggacttcgccgtgtactactgcctccagagccggacaatccccagaacctttggacagggcaccaagctggaaatcaagagaggcggaggcggaagtggaggcggaggatctggcggcggaggctctcaagttcaactggtgcagagcggctccgagctgaagaaacctggcgagtccgtgaagattagctgcaaggccagcggctacaccttcacacactacagcatgaactgggtccgacaggctccaggccaaggactggaatggatgggcagaatcaacaccgagacaggcgagcccctgtacgccgacgatttcaagggcagattcgtgttcagcctggacaccagcgccagcacagcctatctccagatcagctctctgaaggccgaggacaccgccgtgtattattgcagcaacgactacctgtactccctggactattggggccagggcacactggtcacagtgtctagtacgcgtgagcagaaactgatctcggaagaggatctggcgaagcccaccacgacgccagcgccgcgaccaccaacaccggcgcccaccatcgcgtcgcagcccctgtccctgcgcccagaggcgtgccggccagcggcggggggcgcagtgcacacgagggggctggacttcgcctgtgacatctacatctgggcgcccttggccgggacttgtggggtccttctcctgtcactggttatcaccctttactgcaaacggggcagaaagaaactcctgtatatattcaaacaaccatttatgagaccagtacaaactactcaagaggaagatggctgtagctgccgatttccagaagaagaagaaggaggatgtgaactgagagtgaagttcagcaggagcgcagacgcccccgcgtaccagcagggccagaaccagctctataacgagctgaatctaggacgaagagaggagtacgatgttttggacaagagacgtggccgggaccctgagatggggggaaagccgagaaggaagaaccctcaggaaggcctgtacaatgaactgcagaaagataagatggcggaggcctacagtgagattgggatgaaaggcgagcgccggaggggcaaggggcacgatggcctttaccagggtctcagtacagccaccaaggacacctacgacgcccttcacatgcaggccctgccccctcgctctagaggatctggagcaacaaacttctcactactcaaacaagcaggtgacgtggaggagaatcccgggcctgggatccacatggccacttacgaggttctctgtgaggtggcgcggaaactgggcacggatgacagggaagtggtattgttcctcctaaacgtgttcatacctcaacccacactggcccaattaattggagctcttagagctttaaaggaggagggcaggttaacgtttcccctgttagcggaatgtctgtttcgtgcaggtcgcagagacctcttgcgcgacctgcttcacttagacccgcgttttttagagcgccacctagcgggcacaatgagttatttcagcccttatcagctcactgttctccacgtagacggggagctgtgtgcgagggatattaggtctttgatatttttaagcaaggacactatagggtctcgcagcacaccacagacattcttacactgggtgtactgtatggaaaacttagacctactgggtcccactgacgtggatgccctaatgtcaatgcttagatctttgtcaagagtagacctacagcgccaagtgcaaaccctaatgggccttcacctttccggcccatcacactcccaacactatcgccatacaccactcgagaccgatttctacgactacaaggacgacgatgacaagactagtggctccggcgagggcagaggaagtctactaacctgcggagatgtggaagaaaatcctggcccacatatgaccgagtacaagcccacggtgcgcctcgccacccgcgacgacgtccccagggccgtacgcaccctcgccgccgcgttcgccgactaccccgccacgcgccacaccgtcgatccggaccgccacatcgagcgggtcaccgagctgcaagaactcttcctcacgcgcgtcgggctcgacatcggcaaggtgtgggtcgcggacgacggcgccgcggtggcggtctggaccacgccggagagcgtcgaagcgggggcggtgttcgccgagatcggcccgcgcatggccgagttgagcggttcccggctggccgcgcagcaacagatggaaggcctcctggcgccgcaccggcccaaggagcccgcgtggttcctggccaccgtcggcgtctcgcccgaccaccagggcaagggtctgggcagcgccgtcgtgctccccggagtggaggcggccgagcgcgccggggtgcccgccttcctggagacctccgcgccccgcaacctccccttctacgagcggctcggcttcaccgtcaccgccgacgtcgaggtgcccgaaggaccgcgcacctggtgcatgacccgcaagcccggtgcctga

SEQ ID NO: 1228 - DNA, 2871 bp, Artificial Sequence
  Synthetic Polynucleotides
atggccttaccagtgaccgccttgctcctgccgctggccttgctgctccacgccgccaggccggacatcgtgatgacccagagccccgatagcctggccgtgtctctgggagagagagccaccatcaactgcaagagcagccagagcatcctgtacagcagcaaccagaagaactacctggcctggtatcagcagaagcccggccagagccctaagctgctgatctactgggccagcaccagagaaagcggcgtgcccgatagattcagcggcagcggctctggcaccgacttcaccctgaccatcagttctcttcaggccgaggacgtggccgtgtactactgccaccagtacatcagctcctacaccttcggccagggcaccaagctggaaatcaagggcggaggcggaagtggaggcggaggatctggcggcggaggctctcaggtgcagctggtgcagtctggcgctgaagtgaagaaacctggggccagcgtgaaggtgtcctgcaaggccagcggctacacctttgccagccagtggatgcactggatgagacaggcccctggacagggcctggaatggatcggctggatcaaccccggcaacgtgaacaccaagtacaacgagaagttcaagggcagagccaccctgacagtggacaccagcaccaacaccgcctacatggaactgagcagcctgcggagcgaggacaccgccgtgtattattgcgccagaagcacctggtacagacccctggattattggggccagggaacccttgtgaccgtgtcctctacgcgtgagcagaaactgatctcggaagaggatctggcgaagcccaccacgacgccagcgccgcgaccaccaacaccggcgcccaccatcgcgtcgcagcccctgtccctgcgcccagaggcgtgccggccagcggcggggggcgcagtgcacacgagggggctggacttcgcctgtgacatctacatctgggcgcccttggccgggacttgtggggtccttctcctgtcactggttatcaccctttactgcaaacggggcagaaagaaactcctgtatatattcaaacaaccatttatgagaccagtacaaactactcaagaggaagatggctgtagctgccgatttccagaagaagaagaaggaggatgtgaactgagagtgaagttcagcaggagcgcagacgcccccgcgtaccagcagggccagaaccagctctataacgagctgaatctaggacgaagagaggagtacgatgttttggacaagagacgtggccgggaccctgagatggggggaaagccgagaaggaagaaccctcaggaaggcctgtacaatgaactgcagaaagataagatggcggaggcctacagtgagattgggatgaaaggcgagcgccggaggggcaaggggcacgatggcctttaccagggtctcagtacagccaccaaggacacctacgacgcccttcacatgcaggccctgccccctcgctctagaggatctggagcaacaaacttctcactactcaaacaagcaggtgacgtggaggagaatcccgggcctgggatccacatggccacttacgaggttctctgtgaggtggcgcggaaactgggcacggatgacagggaagtggtattgttcctcctaaacgtgttcatacctcaacccacactggcccaattaattggagctcttagagctttaaaggaggagggcaggttaacgtttcccctgttagcggaatgtctgtttcgtgcaggtcgcagagacctcttgcgcgacctgcttcacttagacccgcgttttttagagcgccacctagcgggcacaatgagttatttcagcccttatcagctcactgttctccacgtagacggggagctgtgtgcgagggatattaggtctttgatatttttaagcaaggacactatagggtctcgcagcacaccacagacattcttacactgggtgtactgtatggaaaacttagacctactgggtcccactgacgtggatgccctaatgtcaatgcttagatctttgtcaagagtagacctacagcgccaagtgcaaaccctaatgggccttcacctttccggcccatcacactcccaacactatcgccatacaccactcgagaccgatttctacgactacaaggacgacgatgacaagactagtggctccggcgagggcagaggaagtctactaacctgcggagatgtggaagaaaatcctggcccacatatgaccgagtacaagcccacggtgcgcctcgccacccgcgacgacgtccccagggccgtacgcaccctcgccgccgcgttcgccgactaccccgccacgcgccacaccgtcgatccggaccgccacatcgagcgggtcaccgagctgcaagaactcttcctcacgcgcgtcgggctcgacatcggcaaggtgtgggtcgcggacgacggcgccgcggtggcggtctggaccacgccggagagcgtcgaagcgggggcggtgttcgccgagatcggcccgcgcatggccgagttgagcggttcccggctggccgcgcagcaacagatggaaggcctcctggcgccgcaccggcccaaggagcccgcgtggttcctggccaccgtcggcgtctcgcccgaccaccagggcaagggtctgggcagcgccgtcgtgctccccggagtggaggcggccgagcgcgccggggtgcccgccttcctggagacctccgcgccccgcaacctccccttctacgagcggctcggcttcaccgtcaccgccgacgtcgaggtgcccgaaggaccgcgcacctggtgcatgacccgcaagcccggtgcctga

SEQ ID NO: 1229 - DNA, 3243 bp, Artificial Sequence
  Synthetic Polynucleotides
atggttaggggcgttccattcagacatctgcttctggtcttgcagcttgcactcttgcccgctgccacccagggcaaaaaagtggtgctgggcaagaaaggcgacaccgtggaactgacctgcaccgccagccagaagaagtccatccagttccactggaagaacagcaaccagatcaagatcctgggcaaccagggcagcttcctgaccaagggacccagcaagctgaacgacagagccgacagcagacggtccctgtgggaccagggcaatttcccactgattatcaagaacctgaagatcgaggacagcgacacctacatctgcgaggtggaagatcagaaagaagaggtgcaactgctggtgttcggcctgaccgccaactccgacacccatctgctccagggccagagcctgaccctgacactggaaagccctccaggcagctcccccagcgtgcagtgtagaagcccacgaggcaagaacatccagggaggcaaaacattgtcagtgtcccaactggaactccaggactccggcacctggacctgtaccgtgctccagaaccagaaaaaggtggagttcaagatcgacatcgtggtgctggccttccagaaagcctctggcggaggcggaagtggaggcggaggatctggcggcggaggctctatctaccaggaactgacacaactgaaggccgccgtggaacggctgtgccacccttgtccttgggagtggaccttctttcagggcaactgctacttcatgagcaacagccagcggaactggcacgacagcatcaccgcctgcaaagaagtgggagcccaactggtcgtgattaagagcgccgaggaacagaacttcctccaactccagagcagcagaagcaacagattcacctggatgggcctgagcgacctgaaccaggaaggcacctggcagtgggtggacggatctcctctgctgcccagcttcaagcagtattggaaccggggcgagcccaacaacgtgggcgaagaggattgcgccgagttcagcggcaacggctggaacgacgacaagtgcaacctggctaagttctggatctgcaagaagtccgccgcctcctgtagccgggatgaggaacagttcctgagccctgcccctgccacccctaatcctccaccagctacgcgtgagcagaaactgatctcggaagaggatctggcgaagcccaccacgacgccagcgccgcgaccaccaacaccggcgcccaccatcgcgtcgcagcccctgtccctgcgcccagaggcgtgccggccagcggcggggggcgcagtgcacacgagggggctggacttcgcctgtgacatctacatctgggcgcccttggccgggacttgtggggtccttctcctgtcactggttatcaccctttactgcaaacggggcagaaagaaactcctgtatatattcaaacaaccatttatgagaccagtacaaactactcaagaggaagatggctgtagctgccgatttccagaagaagaagaaggaggatgtgaactgagagtgaagttcagcaggagcgcagacgcccccgcgtaccagcagggccagaaccagctctataacgagctgaatctaggacgaagagaggagtacgatgttttggacaagagacgtggccgggaccctgagatggggggaaagccgagaaggaagaaccctcaggaaggcctgtacaatgaactgcagaaagataagatggcggaggcctacagtgagattgggatgaaaggcgagcgccggaggggcaaggggcacgatggcctttaccagggtctcagtacagccaccaaggacacctacgacgcccttcacatgcaggccctgccccctcgctctagaggatctggagcaacaaacttctcactactcaaacaagcaggtgacgtggaggagaatcccgggcctgggatccacatggccacttacgaggttctctgtgaggtggcgcggaaactgggcacggatgacagggaagtggtattgttcctcctaaacgtgttcatacctcaacccacactggcccaattaattggagctcttagagctttaaaggaggagggcaggttaacgtttcccctgttagcggaatgtctgtttcgtgcaggtcgcagagacctcttgcgcgacctgcttcacttagacccgcgttttttagagcgccacctagcgggcacaatgagttatttcagcccttatcagctcactgttctccacgtagacggggagctgtgtgcgagggatattaggtctttgatatttttaagcaaggacactatagggtctcgcagcacaccacagacattcttacactgggtgtactgtatggaaaacttagacctactgggtcccactgacgtggatgccctaatgtcaatgcttagatctttgtcaagagtagacctacagcgccaagtgcaaaccctaatgggccttcacctttccggcccatcacactcccaacactatcgccatacaccactcgagaccgatttctacgactacaaggacgacgatgacaagactagtggctccggcgagggcagaggaagtctactaacctgcggagatgtggaagaaaatcctggcccacatatgaccgagtacaagcccacggtgcgcctcgccacccgcgacgacgtccccagggccgtacgcaccctcgccgccgcgttcgccgactaccccgccacgcgccacaccgtcgatccggaccgccacatcgagcgggtcaccgagctgcaagaactcttcctcacgcgcgtcgggctcgacatcggcaaggtgtgggtcgcggacgacggcgccgcggtggcggtctggaccacgccggagagcgtcgaagcgggggcggtgttcgccgagatcggcccgcgcatggccgagttgagcggttcccggctggccgcgcagcaacagatggaaggcctcctggcgccgcaccggcccaaggagcccgcgtggttcctggccaccgtcggcgtctcgcccgaccaccagggcaagggtctgggcagcgccgtcgtgctccccggagtggaggcggccgagcgcgccggggtgcccgccttcctggagacctccgcgccccgcaacctccccttctacgagcggctcggcttcaccgtcaccgccgacgtcgaggtgcccgaaggaccgcgcacctggtgcatgacccgcaagcccggtgcctga

SEQ ID NO: 1230 - DNA, 2871 bp, Artificial Sequence
  Synthetic Polynucleotides
atggccttaccagtgaccgccttgctcctgccgctggccttgctgctccacgccgccaggccggaccacatcgtgctgacccagagccctagcagcctgtctgccagcctgggcgacagagtgaccatcagctgtagagccagccaggacatcagcacctacctgaactggtatcagcagaaacccgacggcaccgtgaagctgctgatcttctacaccagcagactgcacgccggggtgcccagcagattttctggcagcggctctggcacccaccacagcctgaccatctccaacctggaacaggaagatattgctacctacttctgtcagcaaggcaacagcctgcccttcaccttcggcagcggcaccaagctggaaatcaagagaggcggaggcggaagtggaggcggaggatctggcggcggaggctctcaggtgcagctgaaagagagcggccctgagctggaaaagcctggggccagcgtgaagattagctgcaaggccagcggctacagcttcaccgcctacagcatgaactgggtcaagcagaacaacggcatgagcctggaatggatcggcagcatcgacccctactacggcgacaccaaatacgcccagaagttcaagggcaaggccaccctgaccgtggataaggccagcagcaccgcctacctccagctgaagtctctgaccagcgaggacagcgccgtgtactactgcgccagacggatgattaccaccggcgactggtacttcgacgtgtggggagccggaaccaccgtgacagtgtctagcacgcgtgagcagaaactgatctcggaagaggatctggcgaagcccaccacgacgccagcgccgcgaccaccaacaccggcgcccaccatcgcgtcgcagcccctgtccctgcgcccagaggcgtgccggccagcggcggggggcgcagtgcacacgagggggctggacttcgcctgtgacatctacatctgggcgcccttggccgggacttgtggggtccttctcctgtcactggttatcaccctttactgcaaacggggcagaaagaaactcctgtatatattcaaacaaccatttatgagaccagtacaaactactcaagaggaagatggctgtagctgccgatttccagaagaagaagaaggaggatgtgaactgagagtgaagttcagcaggagcgcagacgcccccgcgtaccagcagggccagaaccagctctataacgagctgaatctaggacgaagagaggagtacgatgttttggacaagagacgtggccgggaccctgagatggggggaaagccgagaaggaagaaccctcaggaaggcctgtacaatgaactgcagaaagataagatggcggaggcctacagtgagattgggatgaaaggcgagcgccggaggggcaaggggcacgatggcctttaccagggtctcagtacagccaccaaggacacctacgacgcccttcacatgcaggccctgccccctcgctctagaggatctggagcaacaaacttctcactactcaaacaagcaggtgacgtggaggagaatcccgggcctgggatccacatggccacttacgaggttctctgtgaggtggcgcggaaactgggcacggatgacagggaagtggtattgttcctcctaaacgtgttcatacctcaacccacactggcccaattaattggagctcttagagctttaaaggaggagggcaggttaacgtttcccctgttagcggaatgtctgtttcgtgcaggtcgcagagacctcttgcgcgacctgcttcacttagacccgcgttttttagagcgccacctagcgggcacaatgagttatttcagcccttatcagctcactgttctccacgtagacggggagctgtgtgcgagggatattaggtctttgatatttttaagcaaggacactatagggtctcgcagcacaccacagacattcttacactgggtgtactgtatggaaaacttagacctactgggtcccactgacgtggatgccctaatgtcaatgcttagatctttgtcaagagtagacctacagcgccaagtgcaaaccctaatgggccttcacctttccggcccatcacactcccaacactatcgccatacaccactcgagaccgatttctacgactacaaggacgacgatgacaagactagtggctccggcgagggcagaggaagtctactaacctgcggagatgtggaagaaaatcctggcccacatatgaccgagtacaagcccacggtgcgcctcgccacccgcgacgacgtccccagggccgtacgcaccctcgccgccgcgttcgccgactaccccgccacgcgccacaccgtcgatccggaccgccacatcgagcgggtcaccgagctgcaagaactcttcctcacgcgcgtcgggctcgacatcggcaaggtgtgggtcgcggacgacggcgccgcggtggcggtctggaccacgccggagagcgtcgaagcgggggcggtgttcgccgagatcggcccgcgcatggccgagttgagcggttcccggctggccgcgcagcaacagatggaaggcctcctggcgccgcaccggcccaaggagcccgcgtggttcctggccaccgtcggcgtctcgcccgaccaccagggcaagggtctgggcagcgccgtcgtgctccccggagtggaggcggccgagcgcgccggggtgcccgccttcctggagacctccgcgccccgcaacctccccttctacgagcggctcggcttcaccgtcaccgccgacgtcgaggtgcccgaaggaccgcgcacctggtgcatgacccgcaagcccggtgcctga

SEQ ID NO: 1231 - DNA, 2871 bp, Artificial Sequence; identical to SEQ ID NO: 1230
  Synthetic Polynucleotides

SEQ ID NO: 1232 - DNA, 2712 bp, Artificial Sequence
  Synthetic Polynucleotides
atggcccttccagtcactgccttgctgttgcctctggcgctcctgctccacgccgctagaccgggcatgagaaccgaggacctgcctaaggccgtggtgttcctggaaccccagtggtacagagtgctggaaaaggacagcgtgaccctgaagtgccagggcgcctacagccccgaggacaatagcacccagtggttccacaacgagagcctgatctccagccaggccagcagctacttcatcgacgccgccaccgtggacgacagcggcgagtatagatgccagaccaacctgagcaccctgagcgaccccgtgcagctggaagtgcacatcggatggctgctgctgcaggcccccagatgggtgttcaaagaagaggaccccatccacctgagatgccactcttggaagaacaccgccctgcacaaagtgacctacctgcagaacggcaagggcagaaagtacttccaccacaacagcgacttctacatccccaaggccaccctgaaggactccggctcctacttctgcagaggcctcgtgggcagcaagaacgtgtccagcgagacagtgaacatcaccatcacccagggcctggccgtgtctaccatcagcagctttttcccacccggctaccagacgcgtgagcagaaactgatctcggaagaggatctggcgaagcccaccacgacgccagcgccgcgaccaccaacaccggcgcccaccatcgcgtcgcagcccctgtccctgcgcccagaggcgtgccggccagcggcggggggcgcagtgcacacgagggggctggacttcgcctgtgacatctacatctgggcgcccttggccgggacttgtggggtccttctcctgtcactggttatcaccctttactgcaaacggggcagaaagaaactcctgtatatattcaaacaaccatttatgagaccagtacaaactactcaagaggaagatggctgtagctgccgatttccagaagaagaagaaggaggatgtgaactgagagtgaagttcagcaggagcgcagacgcccccgcgtaccagcagggccagaaccagctctataacgagctgaatctaggacgaagagaggagtacgatgttttggacaagagacgtggccgggaccctgagatggggggaaagccgagaaggaagaaccctcaggaaggcctgtacaatgaactgcagaaagataagatggcggaggcctacagtgagattgggatgaaaggcgagcgccggaggggcaaggggcacgatggcctttaccagggtctcagtacagccaccaaggacacctacgacgcccttcacatgcaggccctgccccctcgctctagaggatctggagcaacaaacttctcactactcaaacaagcaggtgacgtggaggagaatcccgggcctgggatccacatggccacttacgaggttctctgtgaggtggcgcggaaactgggcacggatgacagggaagtggtattgttcctcctaaacgtgttcatacctcaacccacactggcccaattaattggagctcttagagctttaaaggaggagggcaggttaacgtttcccctgttagcggaatgtctgtttcgtgcaggtcgcagagacctcttgcgcgacctgcttcacttagacccgcgttttttagagcgccacctagcgggcacaatgagttatttcagcccttatcagctcactgttctccacgtagacggggagctgtgtgcgagggatattaggtctttgatatttttaagcaaggacactatagggtctcgcagcacaccacagacattcttacactgggtgtactgtatggaaaacttagacctactgggtcccactgacgtggatgccctaatgtcaatgcttagatctttgtcaagagtagacctacagcgccaagtgcaaaccctaatgggccttcacctttccggcccatcacactcccaacactatcgccatacaccactcgagaccgatttctacgactacaaggacgacgatgacaagactagtggctccggcgagggcagaggaagtctactaacctgcggagatgtggaagaaaatcctggcccacatatgaccgagtacaagcccacggtgcgcctcgccacccgcgacgacgtccccagggccgtacgcaccctcgccgccgcgttcgccgactaccccgccacgcgccacaccgtcgatccggaccgccacatcgagcgggtcaccgagctgcaagaactcttcctcacgcgcgtcgggctcgacatcggcaaggtgtgggtcgcggacgacggcgccgcggtggcggtctggaccacgccggagagcgtcgaagcgggggcggtgttcgccgagatcggcccgcgcatggccgagttgagcggttcccggctggccgcgcagcaacagatggaaggcctcctggcgccgcaccggcccaaggagcccgcgtggttcctggccaccgtcggcgtctcgcccgaccaccagggcaagggtctgggcagcgccgtcgtgctccccggagtggaggcggccgagcgcgccggggtgcccgccttcctggagacctccgcgccccgcaacctccccttctacgagcggctcggcttcaccgtcaccgccgacgtcgaggtgcccgaaggaccgcgcacctggtgcatgacccgcaagcccggtgcctga

SEQ ID NO: 1233 - DNA, 2712 bp, Artificial Sequence
  Synthetic Polynucleotides
atggccttaccagtgaccgccttgctcctgccgctggccttgctgctccacgccgccaggccgggcatgcggactgaagacctcccaaaggctgtggtgttcctggagcctcaatggtacagggtgctggagaaggacagtgtgactctgaagtgccagggagcctactcccctgaggacaattccacacagtggtttcacaatgagagcctcatctcaagccaggcctccagctacttcattgacgctgccacagtggacgacagtggagagtacaggtgccagacaaacctctccaccctcagtgacccggtgcagctagaagtccatatcggctggctgttgctccaggcccctcggtgggtgttcaaggaggaagaccctattcacctgaggtgtcacagctggaagaacactgctctgcataaggtcacatatttacagaatggcaaaggcaggaagtattttcatcataattctgacttctacattccaaaagccacactcaaagacagcggctcctacttctgcagggggcttgttgggagtaaaaatgtgtcttcagagactgtgaacatcaccatcactcaaggtttggcagtgtcaaccatctcatcattctttccacctggctaccaaacgcgtgagcagaaactgatctcggaagaggatctggcgaagcccaccacgacgccagcgccgcgaccaccaacaccggcgcccaccatcgcgtcgcagcccctgtccctgcgcccagaggcgtgccggccagcggcggggggcgcagtgcacacgagggggctggacttcgcctgtgacatctacatctgggcgcccttggccgggacttgtggggtccttctcctgtcactggttatcaccctttactgcaaacggggcagaaagaaactcctgtatatattcaaacaaccatttatgagaccagtacaaactactcaagaggaagatggctgtagctgccgatttccagaagaagaagaaggaggatgtgaactgagagtgaagttcagcaggagcgcagacgcccccgcgtaccagcagggccagaaccagctctataacgagctgaatctaggacgaagagaggagtacgatgttttggacaagagacgtggccgggaccctgagatggggggaaagccgagaaggaagaaccctcaggaaggcctgtacaatgaactgcagaaagataagatggcggaggcctacagtgagattgggatgaaaggcgagcgccggaggggcaaggggcacgatggcctttaccagggtctcagtacagccaccaaggacacctacgacgcccttcacatgcaggccctgccccctcgctctagaggatctggagcaacaaacttctcactactcaaacaagcaggtgacgtggaggagaatcccgggcctgggatccacatggccacttacgaggttctctgtgaggtggcgcggaaactgggcacggatgacagggaagtggtattgttcctcctaaacgtgttcatacctcaacccacactggcccaattaattggagctcttagagctttaaaggaggagggcaggttaacgtttcccctgttagcggaatgtctgtttcgtgcaggtcgcagagacctcttgcgcgacctgcttcacttagacccgcgttttttagagcgccacctagcgggcacaatgagttatttcagcccttatcagctcactgttctccacgtagacggggagctgtgtgcgagggatattaggtctttgatatttttaagcaaggacactatagggtctcgcagcacaccacagacattcttacactgggtgtactgtatggaaaacttagacctactgggtcccactgacgtggatgccctaatgtcaatgcttagatctttgtcaagagtagacctacagcgccaagtgcaaaccctaatgggccttcacctttccggcccatcacactcccaacactatcgccatacaccactcgagaccgatttctacgactacaaggacgacgatgacaagactagtggctccggcgagggcagaggaagtctactaacctgcggagatgtggaagaaaatcctggcccacatatgaccgagtacaagcccacggtgcgcctcgccacccgcgacgacgtccccagggccgtacgcaccctcgccgccgcgttcgccgactaccccgccacgcgccacaccgtcgatccggaccgccacatcgagcgggtcaccgagctgcaagaactcttcctcacgcgcgtcgggctcgacatcggcaaggtgtgggtcgcggacgacggcgccgcggtggcggtctggaccacgccggagagcgtcgaagcgggggcggtgttcgccgagatcggcccgcgcatggccgagttgagcggttcccggctggccgcgcagcaacagatggaaggcctcctggcgccgcaccggcccaaggagcccgcgtggttcctggccaccgtcggcgtctcgcccgaccaccagggcaagggtctgggcagcgccgtcgtgctccccggagtggaggcggccgagcgcgccggggtgcccgccttcctggagacctccgcgccccgcaacctccccttctacgagcggctcggcttcaccgtcaccgccgacgtcgaggtgcccgaaggaccgcgcacctggtgcatgacccgcaagcccggtgcctga

SEQ ID NO: 1234 - DNA, 2871 bp, Artificial Sequence
  Synthetic Polynucleotides
atggccttaccagtgaccgccttgctcctgccgctggccttgctgctccacgccgccaggccggacgagatcgtgctgacacagagccctgccaccctgtctctgagccctggcgaaagagccaccctgagctgtagagccagccagagcgtgtccagctacctggcctggtatcagcagaagcccggccaggctccccggctgctgatctacgatgccagcaatagagccaccggcatccccgccagattttccggctctggcagcggcaccgacttcaccctgaccatcagctccctggaacccgaggacttcgccgtgtactactgccagcagcggagcaactggcccatcacattcggccagggcacccggctggaaatcaaaggcggaggcggaagtggaggcggaggatctggcggcggaggctctgaagtgcagctggtggaatcaggcggcggactggtgcagcctggcagaagcctgagactgagctgtgccgccagcggcttcaccttcaacgactacgccatgcactgggtgcgccaggcccctggaaaaggactggaatgggtgtccacaatcagctggaacagcggcagcatcggctacgccgatagcgtgaagggccggttcaccatcagccgggacaacgccaagaagtccctgtacctccagatgaacagcctgcgggccgaggacacagccctgtactattgcgccaaggacatccagtacggcaactactactacggcatggacgtgtggggccagggaaccaccgtgaccgtgtcatctacgcgtgagcagaaactgatctcggaagaggatctggcgaagcccaccacgacgccagcgccgcgaccaccaacaccggcgcccaccatcgcgtcgcagcccctgtccctgcgcccagaggcgtgccggccagcggcggggggcgcagtgcacacgagggggctggacttcgcctgtgacatctacatctgggcgcccttggccgggacttgtggggtccttctcctgtcactggttatcaccctttactgcaaacggggcagaaagaaactcctgtatatattcaaacaaccatttatgagaccagtacaaactactcaagaggaagatggctgtagctgccgatttccagaagaagaagaaggaggatgtgaactgagagtgaagttcagcaggagcgcagacgcccccgcgtaccagcagggccagaaccagctctataacgagctgaatctaggacgaagagaggagtacgatgttttggacaagagacgtggccgggaccctgagatggggggaaagccgagaaggaagaaccctcaggaaggcctgtacaatgaactgcagaaagataagatggcggaggcctacagtgagattgggatgaaaggcgagcgccggaggggcaaggggcacgatggcctttaccagggtctcagtacagccaccaaggacacctacgacgcccttcacatgcaggccctgccccctcgctctagaggatctggagcaacaaacttctcactactcaaacaagcaggtgacgtggaggagaatcccgggcctgggatccacatggccacttacgaggttctctgtgaggtggcgcggaaactgggcacggatgacagggaagtggtattgttcctcctaaacgtgttcatacctcaacccacactggcccaattaattggagctcttagagctttaaaggaggagggcaggttaacgtttcccctgttagcggaatgtctgtttcgtgcaggtcgcagagacctcttgcgcgacctgcttcacttagacccgcgttttttagagcgccacctagcgggcacaatgagttatttcagcccttatcagctcactgttctccacgtagacggggagctgtgtgcgagggatattaggtctttgatatttttaagcaaggacactatagggtctcgcagcacaccacagacattcttacactgggtgtactgtatggaaaacttagacctactgggtcccactgacgtggatgccctaatgtcaatgcttagatctttgtcaagagtagacctacagcgccaagtgcaaaccctaatgggccttcacctttccggcccatcacactcccaacactatcgccatacaccactcgagaccgatttctacgactacaaggacgacgatgacaagactagtggctccggcgagggcagaggaagtctactaacctgcggagatgtggaagaaaatcctggcccacatatgaccgagtacaagcccacggtgcgcctcgccacccgcgacgacgtccccagggccgtacgcaccctcgccgccgcgttcgccgactaccccgccacgcgccacaccgtcgatccggaccgccacatcgagcgggtcaccgagctgcaagaactcttcctcacgcgcgtcgggctcgacatcggcaaggtgtgggtcgcggacgacggcgccgcggtggcggtctggaccacgccggagagcgtcgaagcgggggcggtgttcgccgagatcggcccgcgcatggccgagttgagcggttcccggctggccgcgcagcaacagatggaaggcctcctggcgccgcaccggcccaaggagcccgcgtggttcctggccaccgtcggcgtctcgcccgaccaccagggcaagggtctgggcagcgccgtcgtgctccccggagtggaggcggccgagcgcgccggggtgcccgccttcctggagacctccgcgccccgcaacctccccttctacgagcggctcggcttcaccgtcaccgccgacgtcgaggtgcccgaaggaccgcgcacctggtgcatgacccgcaagcccggtgcctga

SEQ ID NO: 1235 - DNA, 2877 bp, Artificial Sequence
  Synthetic Polynucleotides
atggccttaccagtgaccgccttgctcctgccgctggccttgctgctccacgccgccaggccggacatcgtgatgacccagacccccctgagcctgcctgtgacacctggcgagcctgccagcatctcctgcagaagcagcaagagcctgctgcacagcaacggcatcacctacctgtactggtatctgcagaaacccggccagagcccccaactgctgatctaccagatgagcaacctggtgtccggcgtgcccgacagattttctggcagcggctccggcaccgacttcaccctgaagatcagccgggtggaagccgaggacgtgggcgtgtactactgcgcccagaacctggaactgccctacacctttggcggcggaacaaaggtggaaatcaagcggggcggaggcggaagtggaggcggaggatctggcggcggaggctctcaggtgcaactggtgcagagcggagccgaagtgaaaaagcccggcagcagcgtgaaggtgtcctgcaaggccagcggctacgccttcagctactcctggatcaactgggtgcgccaggcccctggacagggcctggaatggatgggcagaatcttccccggcgacggcgacaccgactacaacggcaagttcaagggcagagtgaccatcaccgccgacaagagcaccagcaccgcctacatggaactgagcagcctgcggagcgaggataccgccgtgtactattgtgccagaaacgtgttcgacggctactggctggtgtactggggccagggaacacttgtgaccgtgtccagcacgcgtgagcagaaactgatctcggaagaggatctggcgaagcccaccacgacgccagcgccgcgaccaccaacaccggcgcccaccatcgcgtcgcagcccctgtccctgcgcccagaggcgtgccggccagcggcggggggcgcagtgcacacgagggggctggacttcgcctgtgacatctacatctgggcgcccttggccgggacttgtggggtccttctcctgtcactggttatcaccctttactgcaaacggggcagaaagaaactcctgtatatattcaaacaaccatttatgagaccagtacaaactactcaagaggaagatggctgtagctgccgatttccagaagaagaagaaggaggatgtgaactgagagtgaagttcagcaggagcgcagacgcccccgcgtaccagcagggccagaaccagctctataacgagctgaatctaggacgaagagaggagtacgatgttttggacaagagacgtggccgggaccctgagatggggggaaagccgagaaggaagaaccctcaggaaggcctgtacaatgaactgcagaaagataagatggcggaggcctacagtgagattgggatgaaaggcgagcgccggaggggcaaggggcacgatggcctttaccagggtctcagtacagccaccaaggacacctacgacgcccttcacatgcaggccctgccccctcgctctagaggatctggagcaacaaacttctcactactcaaacaagcaggtgacgtggaggagaatcccgggcctgggatccacatggccacttacgaggttctctgtgaggtggcgcggaaactgggcacggatgacagggaagtggtattgttcctcctaaacgtgttcatacctcaacccacactggcccaattaattggagctcttagagctttaaaggaggagggcaggttaacgtttcccctgttagcggaatgtctgtttcgtgcaggtcgcagagacctcttgcgcgacctgcttcacttagacccgcgttttttagagcgccacctagcgggcacaatgagttatttcagcccttatcagctcactgttctccacgtagacggggagctgtgtgcgagggatattaggtctttgatatttttaagcaaggacactatagggtctcgcagcacaccacagacattcttacactgggtgtactgtatggaaaacttagacctactgggtcccactgacgtggatgccctaatgtcaatgcttagatctttgtcaagagtagacctacagcgccaagtgcaaaccctaatgggccttcacctttccggcccatcacactcccaacactatcgccatacaccactcgagaccgatttctacgactacaaggacgacgatgacaagactagtggctccggcgagggcagaggaagtctactaacctgcggagatgtggaagaaaatcctggcccacatatgaccgagtacaagcccacggtgcgcctcgccacccgcgacgacgtccccagggccgtacgcaccctcgccgccgcgttcgccgactaccccgccacgcgccacaccgtcgatccggaccgccacatcgagcgggtcaccgagctgcaagaactcttcctcacgcgcgtcgggctcgacatcggcaaggtgtgggtcgcggacgacggcgccgcggtggcggtctggaccacgccggagagcgtcgaagcgggggcggtgttcgccgagatcggcccgcgcatggccgagttgagcggttcccggctggccgcgcagcaacagatggaaggcctcctggcgccgcaccggcccaaggagcccgcgtggttcctggccaccgtcggcgtctcgcccgaccaccagggcaagggtctgggcagcgccgtcgtgctccccggagtggaggcggccgagcgcgccggggtgcccgccttcctggagacctccgcgccccgcaacctccccttctacgagcggctcggcttcaccgtcaccgccgacgtcgaggtgcccgaaggaccgcgcacctggtgcatgacccgcaagcccggtgcctga

SEQ ID NO: 1236 - DNA, 2868 bp, Artificial Sequence
  Synthetic Polynucleotides
atggccttaccagtgaccgccttgctcctgccgctggccttgctgctccacgccgccaggccggacatcgtgctgacacagagccctgccatcatcacagcctctccaggcgagaaagtgaccatgacctgtagagccagcagcagcgtgaactacatggactggtatcagaagaagcccggcagcagccccaagccttggatctacgccacaagcaatctggcctctggcgtgcccagcagattttctggctctggcagcggcaccacctacagcatgacaatctctagcctggaagccgaggacgccgccacctactattgtcagcagtggtccttcaatcctcctaccttcggcggaggcaccaagctggaaatcaaaagaggcggaggcggaagtggaggcggaggatctggcggcggaggctctgaagttcagcttcagcagagcggagccgagctgaagaaacctggcgcttctgtgaaggtgtcctgcaaggccagcggctacacctttaccagctacaacatgcactgggtcaagcagaccccaggccagggactcgaatggatcggagccatctatcccggcaacggcgacacctcctacaaccagaagttcaagggcaagaccacactgaccgccgacaagagcagctccaccgcctacatggaactgagcagcctgagatccgaggataccgccgtgtactactgcgccagaagcaactactacggcagctcctactggttcttcgacgtgtggggcaccggcacaaccgtgacagtttcttctacgcgtgagcagaaactgatctcggaagaggatctggcgaagcccaccacgacgccagcgccgcgaccaccaacaccggcgcccaccatcgcgtcgcagcccctgtccctgcgcccagaggcgtgccggccagcggcggggggcgcagtgcacacgagggggctggacttcgcctgtgacatctacatctgggcgcccttggccgggacttgtggggtccttctcctgtcactggttatcaccctttactgcaaacggggcagaaagaaactcctgtatatattcaaacaaccatttatgagaccagtacaaactactcaagaggaagatggctgtagctgccgatttccagaagaagaagaaggaggatgtgaactgagagtgaagttcagcaggagcgcagacgcccccgcgtaccagcagggccagaaccagctctataacgagctgaatctaggacgaagagaggagtacgatgttttggacaagagacgtggccgggaccctgagatggggggaaagccgagaaggaagaaccctcaggaaggcctgtacaatgaactgcagaaagataagatggcggaggcctacagtgagattgggatgaaaggcgagcgccggaggggcaaggggcacgatggcctttaccagggtctcagtacagccaccaaggacacctacgacgcccttcacatgcaggccctgccccctcgctctagaggatctggagcaacaaacttctcactactcaaacaagcaggtgacgtggaggagaatcccgggcctgggatccacatggccacttacgaggttctctgtgaggtggcgcggaaactgggcacggatgacagggaagtggtattgttcctcctaaacgtgttcatacctcaacccacactggcccaattaattggagctcttagagctttaaaggaggagggcaggttaacgtttcccctgttagcggaatgtctgtttcgtgcaggtcgcagagacctcttgcgcgacctgcttcacttagacccgcgttttttagagcgccacctagcgggcacaatgagttatttcagcccttatcagctcactgttctccacgtagacggggagctgtgtgcgagggatattaggtctttgatatttttaagcaaggacactatagggtctcgcagcacaccacagacattcttacactgggtgtactgtatggaaaacttagacctactgggtcccactgacgtggatgccctaatgtcaatgcttagatctttgtcaagagtagacctacagcgccaagtgcaaaccctaatgggccttcacctttccggcccatcacactcccaacactatcgccatacaccactcgagaccgatttctacgactacaaggacgacgatgacaagactagtggctccggcgagggcagaggaagtctactaacctgcggagatgtggaagaaaatcctggcccacatatgaccgagtacaagcccacggtgcgcctcgccacccgcgacgacgtccccagggccgtacgcaccctcgccgccgcgttcgccgactaccccgccacgcgccacaccgtcgatccggaccgccacatcgagcgggtcaccgagctgcaagaactcttcctcacgcgcgtcgggctcgacatcggcaaggtgtgggtcgcggacgacggcgccgcggtggcggtctggaccacgccggagagcgtcgaagcgggggcggtgttcgccgagatcggcccgcgcatggccgagttgagcggttcccggctggccgcgcagcaacagatggaaggcctcctggcgccgcaccggcccaaggagcccgcgtggttcctggccaccgtcggcgtctcgcccgaccaccagggcaagggtctgggcagcgccgtcgtgctccccggagtggaggcggccgagcgcgccggggtgcccgccttcctggagacctccgcgccccgcaacctccccttctacgagcggctcggcttcaccgtcaccgccgacgtcgaggtgcccgaaggaccgcgcacctggtgcatgacccgcaagcccggtgcctga

SEQ ID NO: 1237 - DNA, 2877 bp, Artificial Sequence
  Synthetic Polynucleotides
atggccttaccagtgaccgccttgctcctgccgctggccttgctgctccacgccgccaggccggagatcgtgctgacacagtctcccgccacactgtcactgtctccaggcgaaagagccacactgagctgtagagccagccagagcgtgtcctcttacctggcctggtatcagcagaagcctggacaggctccccggctgctgatctacgatgccagcaatagagccacaggcatccccgccagattttctggctctggcagcggcaccgatttcaccctgaccataagcagcctggaacctgaggacttcgccgtgtactactgccagcagagaagcgactggcccctgacatttggcggcggaacaaaggtggaaatcaaaggcggaggcggaagtggaggcggaggatctggcggcggaggctctgaagtgcaactggttcaatcaggtggcggcctggttcaccctggcggatctctgagactgtcttgtaccggcagcggcttcaccttcagctaccacgccatgcactgggtccgacaggcacctggaaaaggactggaatgggtgtccatcatcggcacaggcggcgtgacctactacgccgattctgtgaagggcagattcaccatcagccgggacaacgtgaagaacagcctgtacctccagatgaactccctgagagccgaggatatggccgtgtattattgcgccagagactactacggcgctggcagcttttacgacggcctgtacggaatggatgtgtggggccagggaaccaccgtgactgtctcttctacgcgtgagcagaaactgatctcggaagaggatctggcgaagcccaccacgacgccagcgccgcgaccaccaacaccggcgcccaccatcgcgtcgcagcccctgtccctgcgcccagaggcgtgccggccagcggcggggggcgcagtgcacacgagggggctggacttcgcctgtgacatctacatctgggcgcccttggccgggacttgtggggtccttctcctgtcactggttatcaccctttactgcaaacggggcagaaagaaactcctgtatatattcaaacaaccatttatgagaccagtacaaactactcaagaggaagatggctgtagctgccgatttccagaagaagaagaaggaggatgtgaactgagagtgaagttcagcaggagcgcagacgcccccgcgtaccagcagggccagaaccagctctataacgagctgaatctaggacgaagagaggagtacgatgttttggacaagagacgtggccgggaccctgagatggggggaaagccgagaaggaagaaccctcaggaaggcctgtacaatgaactgcagaaagataagatggcggaggcctacagtgagattgggatgaaaggcgagcgccggaggggcaaggggcacgatggcctttaccagggtctcagtacagccaccaaggacacctacgacgcccttcacatgcaggccctgccccctcgctctagaggatctggagcaacaaacttctcactactcaaacaagcaggtgacgtggaggagaatcccgggcctgggatccacatggccacttacgaggttctctgtgaggtggcgcggaaactgggcacggatgacagggaagtggtattgttcctcctaaacgtgttcatacctcaacccacactggcccaattaattggagctcttagagctttaaaggaggagggcaggttaacgtttcccctgttagcggaatgtctgtttcgtgcaggtcgcagagacctcttgcgcgacctgcttcacttagacccgcgttttttagagcgccacctagcgggcacaatgagttatttcagcccttatcagctcactgttctccacgtagacggggagctgtgtgcgagggatattaggtctttgatatttttaagcaaggacactatagggtctcgcagcacaccacagacattcttacactgggtgtactgtatggaaaacttagacctactgggtcccactgacgtggatgccctaatgtcaatgcttagatctttgtcaagagtagacctacagcgccaagtgcaaaccctaatgggccttcacctttccggcccatcacactcccaacactatcgccatacaccactcgagaccgatttctacgactacaaggacgacgatgacaagactagtggctccggcgagggcagaggaagtctactaacctgcggagatgtggaagaaaatcctggcccacatatgaccgagtacaagcccacggtgcgcctcgccacccgcgacgacgtccccagggccgtacgcaccctcgccgccgcgttcgccgactaccccgccacgcgccacaccgtcgatccggaccgccacatcgagcgggtcaccgagctgcaagaactcttcctcacgcgcgtcgggctcgacatcggcaaggtgtgggtcgcggacgacggcgccgcggtggcggtctggaccacgccggagagcgtcgaagcgggggcggtgttcgccgagatcggcccgcgcatggccgagttgagcggttcccggctggccgcgcagcaacagatggaaggcctcctggcgccgcaccggcccaaggagcccgcgtggttcctggccaccgtcggcgtctcgcccgaccaccagggcaagggtctgggcagcgccgtcgtgctccccggagtggaggcggccgagcgcgccggggtgcccgccttcctggagacctccgcgccccgcaacctccccttctacgagcggctcggcttcaccgtcaccgccgacgtcgaggtgcccgaaggaccgcgcacctggtgcatgacccgcaagcccggtgcctga

SEQ ID NO: 1238 - DNA, 2871 bp, Artificial Sequence
  Synthetic Polynucleotides
atggccttaccagtgaccgccttgctcctgccgctggccttgctgctccacgccgccaggccggagatcgtgctgacacagtctcccgccacactgtcactgtctccaggcgaaagagccacactgagctgtagagccagccagagcgtgtcctcttacctggcctggtatcagcagaagcctggacaggctccccggctgctgatctacgatgccagcaatagagccacaggcatccccgccagattttctggctctggcagcggcaccgatttcaccctgaccataagcagcctggaacctgaggacttcgccgtgtactactgccagcagagaagcaactggcccctgacatttggcggaggcaccaaggtggaaatcaaaggcggaggcggaagtggaggcggaggatctggcggcggaggctctgctgtgcagctcgttgagtctggcggaggacttgttcagcctggcagatccctgagactgtcttgtgccgccagcggcttcaccttcggcgattacacaatgcactgggtccgacaggcccctggcaaaggacttgaatgggtgtccggcatctcctggaacagcggctctatcggctacgccgattccgtgaagggcagattcaccatcagccgggacaacgccaagaacagcctgtacctccagatgaactccctgagagccgaggacacagccctgtactattgcaccaaggacaaccagtacggctccggcagcacatacggacttggagtttggggccagggcaccctggttacagtctcttctacgcgtgagcagaaactgatctcggaagaggatctggcgaagcccaccacgacgccagcgccgcgaccaccaacaccggcgcccaccatcgcgtcgcagcccctgtccctgcgcccagaggcgtgccggccagcggcggggggcgcagtgcacacgagggggctggacttcgcctgtgacatctacatctgggcgcccttggccgggacttgtggggtccttctcctgtcactggttatcaccctttactgcaaacggggcagaaagaaactcctgtatatattcaaacaaccatttatgagaccagtacaaactactcaagaggaagatggctgtagctgccgatttccagaagaagaagaaggaggatgtgaactgagagtgaagttcagcaggagcgcagacgcccccgcgtaccagcagggccagaaccagctctataacgagctgaatctaggacgaagagaggagtacgatgttttggacaagagacgtggccgggaccctgagatggggggaaagccgagaaggaagaaccctcaggaaggcctgtacaatgaactgcagaaagataagatggcggaggcctacagtgagattgggatgaaaggcgagcgccggaggggcaaggggcacgatggcctttaccagggtctcagtacagccaccaaggacacctacgacgcccttcacatgcaggccctgccccctcgctctagaggatctggagcaacaaacttctcactactcaaacaagcaggtgacgtggaggagaatcccgggcctgggatccacatggccacttacgaggttctctgtgaggtggcgcggaaactgggcacggatgacagggaagtggtattgttcctcctaaacgtgttcatacctcaacccacactggcccaattaattggagctcttagagctttaaaggaggagggcaggttaacgtttcccctgttagcggaatgtctgtttcgtgcaggtcgcagagacctcttgcgcgacctgcttcacttagacccgcgttttttagagcgccacctagcgggcacaatgagttatttcagcccttatcagctcactgttctccacgtagacggggagctgtgtgcgagggatattaggtctttgatatttttaagcaaggacactatagggtctcgcagcacaccacagacattcttacactgggtgtactgtatggaaaacttagacctactgggtcccactgacgtggatgccctaatgtcaatgcttagatctttgtcaagagtagacctacagcgccaagtgcaaaccctaatgggccttcacctttccggcccatcacactcccaacactatcgccatacaccactcgagaccgatttctacgactacaaggacgacgatgacaagactagtggctccggcgagggcagaggaagtctactaacctgcggagatgtggaagaaaatcctggcccacatatgaccgagtacaagcccacggtgcgcctcgccacccgcgacgacgtccccagggccgtacgcaccctcgccgccgcgttcgccgactaccccgccacgcgccacaccgtcgatccggaccgccacatcgagcgggtcaccgagctgcaagaactcttcctcacgcgcgtcgggctcgacatcggcaaggtgtgggtcgcggacgacggcgccgcggtggcggtctggaccacgccggagagcgtcgaagcgggggcggtgttcgccgagatcggcccgcgcatggccgagttgagcggttcccggctggccgcgcagcaacagatggaaggcctcctggcgccgcaccggcccaaggagcccgcgtggttcctggccaccgtcggcgtctcgcccgaccaccagggcaagggtctgggcagcgccgtcgtgctccccggagtggaggcggccgagcgcgccggggtgcccgccttcctggagacctccgcgccccgcaacctccccttctacgagcggctcggcttcaccgtcaccgccgacgtcgaggtgcccgaaggaccgcgcacctggtgcatgacccgcaagcccggtgcctga

SEQ ID NO: 1239 - DNA, 2868 bp, Artificial Sequence
  Synthetic Polynucleotides
atggccttaccagtgaccgccttgctcctgccgctggccttgctgctccacgccgccaggccggacatccagatgacacagagccctagcagcctgtctgccagcgtgggagacagagtgaccatcacctgtagagccagcagcagcgtgtcctacatgcactggtatcagcagaagcccggcaaggcccctaagcctctgatctacgcccctagcaatctggcctctggcgtgccaagcagattttctggcagcggctctggcaccgacttcaccctgacaatatccagcctccagcctgaggacttcgccacctactactgccagcagtggtccttcaatcctcctaccttcggccagggcaccaaggtggaaatcaaaagaggcggaggcggaagtggaggcggaggatctggcggcggaggctctgaagtgcagcttgttgaatctggcggcggactggttcagcctggcggatctctgagactgtcttgtgccgccagcggctacaccttcaccagctacaatatgcactgggtccgacaggcccctggcaaaggacttgaatgggtcggagccatctatcccggcaacggcgacacctcctacaaccagaagttcaagggcagattcaccatcagcgtggacaagagcaagaacaccctgtacctccagatgaactccctgagagccgaggacaccgccgtgtactattgtgccagagtggtgtactacagcaacagctactggtacttcgacgtgtggggccagggaaccctggtcacagtttcttctacgcgtgagcagaaactgatctcggaagaggatctggcgaagcccaccacgacgccagcgccgcgaccaccaacaccggcgcccaccatcgcgtcgcagcccctgtccctgcgcccagaggcgtgccggccagcggcggggggcgcagtgcacacgagggggctggacttcgcctgtgacatctacatctgggcgcccttggccgggacttgtggggtccttctcctgtcactggttatcaccctttactgcaaacggggcagaaagaaactcctgtatatattcaaacaaccatttatgagaccagtacaaactactcaagaggaagatggctgtagctgccgatttccagaagaagaagaaggaggatgtgaactgagagtgaagttcagcaggagcgcagacgcccccgcgtaccagcagggccagaaccagctctataacgagctgaatctaggacgaagagaggagtacgatgttttggacaagagacgtggccgggaccctgagatggggggaaagccgagaaggaagaaccctcaggaaggcctgtacaatgaactgcagaaagataagatggcggaggcctacagtgagattgggatgaaaggcgagcgccggaggggcaaggggcacgatggcctttaccagggtctcagtacagccaccaaggacacctacgacgcccttcacatgcaggccctgccccctcgctctagaggatctggagcaacaaacttctcactactcaaacaagcaggtgacgtggaggagaatcccgggcctgggatccacatggccacttacgaggttctctgtgaggtggcgcggaaactgggcacggatgacagggaagtggtattgttcctcctaaacgtgttcatacctcaacccacactggcccaattaattggagctcttagagctttaaaggaggagggcaggttaacgtttcccctgttagcggaatgtctgtttcgtgcaggtcgcagagacctcttgcgcgacctgcttcacttagacccgcgttttttagagcgccacctagcgggcacaatgagttatttcagcccttatcagctcactgttctccacgtagacggggagctgtgtgcgagggatattaggtctttgatatttttaagcaaggacactatagggtctcgcagcacaccacagacattcttacactgggtgtactgtatggaaaacttagacctactgggtcccactgacgtggatgccctaatgtcaatgcttagatctttgtcaagagtagacctacagcgccaagtgcaaaccctaatgggccttcacctttccggcccatcacactcccaacactatcgccatacaccactcgagaccgatttctacgactacaaggacgacgatgacaagactagtggctccggcgagggcagaggaagtctactaacctgcggagatgtggaagaaaatcctggcccacatatgaccgagtacaagcccacggtgcgcctcgccacccgcgacgacgtccccagggccgtacgcaccctcgccgccgcgttcgccgactaccccgccacgcgccacaccgtcgatccggaccgccacatcgagcgggtcaccgagctgcaagaactcttcctcacgcgcgtcgggctcgacatcggcaaggtgtgggtcgcggacgacggcgccgcggtggcggtctggaccacgccggagagcgtcgaagcgggggcggtgttcgccgagatcggcccgcgcatggccgagttgagcggttcccggctggccgcgcagcaacagatggaaggcctcctggcgccgcaccggcccaaggagcccgcgtggttcctggccaccgtcggcgtctcgcccgaccaccagggcaagggtctgggcagcgccgtcgtgctccccggagtggaggcggccgagcgcgccggggtgcccgccttcctggagacctccgcgccccgcaacctccccttctacgagcggctcggcttcaccgtcaccgccgacgtcgaggtgcccgaaggaccgcgcacctggtgcatgacccgcaagcccggtgcctga

SEQ ID NO: 1240 - DNA, 2862 bp, Artificial Sequence
  Synthetic Polynucleotides
atggccttaccagtgaccgccttgctcctgccgctggccttgctgctccacgccgccaggccggacatccagctcacacagagcccttctagcctgtctgccagcgtgggcgatagagtgaccatgacctgtagagccagcagcagcgtgtcctacatccactggttccagcagaagcctggcaaggcccctaagccttggatctacgccaccagcaatctggcctctggcgtgccagtcagattttctggcagcggctctggcaccgactacaccttcacaatatccagcctccagcctgaggacattgccacctactactgccagcagtggacctccaatcctcctacctttggcggaggcaccaagctggaaatcaaaggcggaggcggaagtggaggcggaggatctggcggcggaggctctcaggttcagctccagcagtctggggccgaagtgaagaaacctggcagctccgtgaaagtgtcctgcaaggccagcggctacacctttaccagctacaacatgcactgggtcaagcaggcccctggacagggactcgaatggatcggagccatctatcccggcaacggcgacacctcctacaaccagaagttcaagggcaaagccacactgaccgccgacgagagcacaaacaccgcctacatggaactgagcagcctgagaagcgaggacaccgccttctactactgtgcccggtctacctactacggcggcgactggtactttgacgtgtggggccagggaaccaccgtgacagtttcttctacgcgtgagcagaaactgatctcggaagaggatctggcgaagcccaccacgacgccagcgccgcgaccaccaacaccggcgcccaccatcgcgtcgcagcccctgtccctgcgcccagaggcgtgccggccagcggcggggggcgcagtgcacacgagggggctggacttcgcctgtgacatctacatctgggcgcccttggccgggacttgtggggtccttctcctgtcactggttatcaccctttactgcaaacggggcagaaagaaactcctgtatatattcaaacaaccatttatgagaccagtacaaactactcaagaggaagatggctgtagctgccgatttccagaagaagaagaaggaggatgtgaactgagagtgaagttcagcaggagcgcagacgcccccgcgtaccagcagggccagaaccagctctataacgagctgaatctaggacgaagagaggagtacgatgttttggacaagagacgtggccgggaccctgagatggggggaaagccgagaaggaagaaccctcaggaaggcctgtacaatgaactgcagaaagataagatggcggaggcctacagtgagattgggatgaaaggcgagcgccggaggggcaaggggcacgatggcctttaccagggtctcagtacagccaccaaggacacctacgacgcccttcacatgcaggccctgccccctcgctctagaggatctggagcaacaaacttctcactactcaaacaagcaggtgacgtggaggagaatcccgggcctgggatccacatggccacttacgaggttctctgtgaggtggcgcggaaactgggcacggatgacagggaagtggtattgttcctcctaaacgtgttcatacctcaacccacactggcccaattaattggagctcttagagctttaaaggaggagggcaggttaacgtttcccctgttagcggaatgtctgtttcgtgcaggtcgcagagacctcttgcgcgacctgcttcacttagacccgcgttttttagagcgccacctagcgggcacaatgagttatttcagcccttatcagctcactgttctccacgtagacggggagctgtgtgcgagggatattaggtctttgatatttttaagcaaggacactatagggtctcgcagcacaccacagacattcttacactgggtgtactgtatggaaaacttagacctactgggtcccactgacgtggatgccctaatgtcaatgcttagatctttgtcaagagtagacctacagcgccaagtgcaaaccctaatgggccttcacctttccggcccatcacactcccaacactatcgccatacaccactcgagaccgatttctacgactacaaggacgacgatgacaagactagtggctccggcgagggcagaggaagtctactaacctgcggagatgtggaagaaaatcctggcccacatatgaccgagtacaagcccacggtgcgcctcgccacccgcgacgacgtccccagggccgtacgcaccctcgccgccgcgttcgccgactaccccgccacgcgccacaccgtcgatccggaccgccacatcgagcgggtcaccgagctgcaagaactcttcctcacgcgcgtcgggctcgacatcggcaaggtgtgggtcgcggacgacggcgccgcggtggcggtctggaccacgccggagagcgtcgaagcgggggcggtgttcgccgagatcggcccgcgcatggccgagttgagcggttcccggctggccgcgcagcaacagatggaaggcctcctggcgccgcaccggcccaaggagcccgcgtggttcctggccaccgtcggcgtctcgcccgaccaccagggcaagggtctgggcagcgccgtcgtgctccccggagtggaggcggccgagcgcgccggggtgcccgccttcctggagacctccgcgccccgcaacctccccttctacgagcggctcggcttcaccgtcaccgccgacgtcgaggtgcccgaaggaccgcgcacctggtgcatgacccgcaagcccggtgcctga

SEQ ID NO: 1241 - DNA, 2898 bp, Artificial Sequence
  Synthetic Polynucleotides
atggccttaccagtgaccgccttgctcctgccgctggccttgctgctccacgccgccaggccgagcaccgtgatgacacagagccctgatagcctggccgtgtctctgggagagagagccaccatcaactgcaagagcagccagagcaacagcaacgacgtggcctggtatcagcagaagccaggacagagccccaaggtgctgatctacttcgccagcaacagatacagcggcgtgcccgatagattttccggcagcggctacggcaccgacttcacccttacaatcagcagcctccaggccgaggatgtggccgtgtacttctgtcagcaagactacagcagccctctgacctttggagccggcaccaagctggaactgaaaagagctgacgctggcggaggcggaagtggaggcggaggatctggcggcggaggctctcagattcagctggtgcagtctggcagcgagctgaagaaacctggggcctctgtgaaggtgtcctgcaaggcttccggctacacctttaccaacttcggcgtgaactgggtccgacaggcccctggaaaaggactggaatggatgggctggatcaacacctacaccggcgagcctagctacgcccagggctttacaggcagattcgtgttcagcctggacgcctctgtgtctaccgcctacctccagatcagctccctgaaagccgaggacaccgccacctatttctgcaccagacggaccaactactacgggacctcctactactacgctatggactactggggccagggcaccaccgtgacagtgtctagcgccaagacaaccacgcgtgagcagaaactgatctcggaagaggatctggcgaagcccaccacgacgccagcgccgcgaccaccaacaccggcgcccaccatcgcgtcgcagcccctgtccctgcgcccagaggcgtgccggccagcggcggggggcgcagtgcacacgagggggctggacttcgcctgtgacatctacatctgggcgcccttggccgggacttgtggggtccttctcctgtcactggttatcaccctttactgcaaacggggcagaaagaaactcctgtatatattcaaacaaccatttatgagaccagtacaaactactcaagaggaagatggctgtagctgccgatttccagaagaagaagaaggaggatgtgaactgagagtgaagttcagcaggagcgcagacgcccccgcgtaccagcagggccagaaccagctctataacgagctgaatctaggacgaagagaggagtacgatgttttggacaagagacgtggccgggaccctgagatggggggaaagccgagaaggaagaaccctcaggaaggcctgtacaatgaactgcagaaagataagatggcggaggcctacagtgagattgggatgaaaggcgagcgccggaggggcaaggggcacgatggcctttaccagggtctcagtacagccaccaaggacacctacgacgcccttcacatgcaggccctgccccctcgctctagaggatctggagcaacaaacttctcactactcaaacaagcaggtgacgtggaggagaatcccgggcctgggatccacatggccacttacgaggttctctgtgaggtggcgcggaaactgggcacggatgacagggaagtggtattgttcctcctaaacgtgttcatacctcaacccacactggcccaattaattggagctcttagagctttaaaggaggagggcaggttaacgtttcccctgttagcggaatgtctgtttcgtgcaggtcgcagagacctcttgcgcgacctgcttcacttagacccgcgttttttagagcgccacctagcgggcacaatgagttatttcagcccttatcagctcactgttctccacgtagacggggagctgtgtgcgagggatattaggtctttgatatttttaagcaaggacactatagggtctcgcagcacaccacagacattcttacactgggtgtactgtatggaaaacttagacctactgggtcccactgacgtggatgccctaatgtcaatgcttagatctttgtcaagagtagacctacagcgccaagtgcaaaccctaatgggccttcacctttccggcccatcacactcccaacactatcgccatacaccactcgagaccgatttctacgactacaaggacgacgatgacaagactagtggctccggcgagggcagaggaagtctactaacctgcggagatgtggaagaaaatcctggcccacatatgaccgagtacaagcccacggtgcgcctcgccacccgcgacgacgtccccagggccgtacgcaccctcgccgccgcgttcgccgactaccccgccacgcgccacaccgtcgatccggaccgccacatcgagcgggtcaccgagctgcaagaactcttcctcacgcgcgtcgggctcgacatcggcaaggtgtgggtcgcggacgacggcgccgcggtggcggtctggaccacgccggagagcgtcgaagcgggggcggtgttcgccgagatcggcccgcgcatggccgagttgagcggttcccggctggccgcgcagcaacagatggaaggcctcctggcgccgcaccggcccaaggagcccgcgtggttcctggccaccgtcggcgtctcgcccgaccaccagggcaagggtctgggcagcgccgtcgtgctccccggagtggaggcggccgagcgcgccggggtgcccgccttcctggagacctccgcgccccgcaacctccccttctacgagcggctcggcttcaccgtcaccgccgacgtcgaggtgcccgaaggaccgcgcacctggtgcatgacccgcaagcccggtgcctga

SEQ ID NO: 1242 - DNA, 2874 bp, Artificial Sequence
  Synthetic Polynucleotides
atggccttaccagtgaccgccttgctcctgccgctggccttgctgctccacgccgccaggccgcagatcgtgctgtctcagtctcctgccatcctgagcgcttccccaggcgagaaagtgaccatgacctgtagagccagcagcagcgtgtcctacatgcactggtatcagcagaagcccggcagcagccctaagccttggatctacgccaccagcaatctggcctctggcgtgccagccagattttctggctctggcagcggcaccagctacagcttcacaatcagcagagtggaagccgaggacgccgccacctactattgtcagcagtggaccttcaatcctcctaccttcggcggaggcacccggctggaaatcaaaagaacagtggctgctggcggaggcggaagtggaggcggaggatctggcggcggaggctctcaggcttatctgcaacagagcggagccgaactcgtcagacctggcgcttctgtgaagatgagctgcaaggccagcggctacaccttcaccagctataatatgcactgggtcaagcagacccctcggcagggactcgaatggatcggcggaatctatcccggcaacggcgacacctcctacaaccagaagttcaagggcaaagccacactgaccgtgggcaagagcagcagcaccgcctatatgcagctcagcagcctgaccagcgaggacagcgccgtgtacttctgcgccagatacgactacaactacgctatggactactggggccagggcaccagcgtgacagttagctctgccagcacgcgtgagcagaaactgatctcggaagaggatctggcgaagcccaccacgacgccagcgccgcgaccaccaacaccggcgcccaccatcgcgtcgcagcccctgtccctgcgcccagaggcgtgccggccagcggcggggggcgcagtgcacacgagggggctggacttcgcctgtgacatctacatctgggcgcccttggccgggacttgtggggtccttctcctgtcactggttatcaccctttactgcaaacggggcagaaagaaactcctgtatatattcaaacaaccatttatgagaccagtacaaactactcaagaggaagatggctgtagctgccgatttccagaagaagaagaaggaggatgtgaactgagagtgaagttcagcaggagcgcagacgcccccgcgtaccagcagggccagaaccagctctataacgagctgaatctaggacgaagagaggagtacgatgttttggacaagagacgtggccgggaccctgagatggggggaaagccgagaaggaagaaccctcaggaaggcctgtacaatgaactgcagaaagataagatggcggaggcctacagtgagattgggatgaaaggcgagcgccggaggggcaaggggcacgatggcctttaccagggtctcagtacagccaccaaggacacctacgacgcccttcacatgcaggccctgccccctcgctctagaggatctggagcaacaaacttctcactactcaaacaagcaggtgacgtggaggagaatcccgggcctgggatccacatggccacttacgaggttctctgtgaggtggcgcggaaactgggcacggatgacagggaagtggtattgttcctcctaaacgtgttcatacctcaacccacactggcccaattaattggagctcttagagctttaaaggaggagggcaggttaacgtttcccctgttagcggaatgtctgtttcgtgcaggtcgcagagacctcttgcgcgacctgcttcacttagacccgcgttttttagagcgccacctagcgggcacaatgagttatttcagcccttatcagctcactgttctccacgtagacggggagctgtgtgcgagggatattaggtctttgatatttttaagcaaggacactatagggtctcgcagcacaccacagacattcttacactgggtgtactgtatggaaaacttagacctactgggtcccactgacgtggatgccctaatgtcaatgcttagatctttgtcaagagtagacctacagcgccaagtgcaaaccctaatgggccttcacctttccggcccatcacactcccaacactatcgccatacaccactcgagaccgatttctacgactacaaggacgacgatgacaagactagtggctccggcgagggcagaggaagtctactaacctgcggagatgtggaagaaaatcctggcccacatatgaccgagtacaagcccacggtgcgcctcgccacccgcgacgacgtccccagggccgtacgcaccctcgccgccgcgttcgccgactaccccgccacgcgccacaccgtcgatccggaccgccacatcgagcgggtcaccgagctgcaagaactcttcctcacgcgcgtcgggctcgacatcggcaaggtgtgggtcgcggacgacggcgccgcggtggcggtctggaccacgccggagagcgtcgaagcgggggcggtgttcgccgagatcggcccgcgcatggccgagttgagcggttcccggctggccgcgcagcaacagatggaaggcctcctggcgccgcaccggcccaaggagcccgcgtggttcctggccaccgtcggcgtctcgcccgaccaccagggcaagggtctgggcagcgccgtcgtgctccccggagtggaggcggccgagcgcgccggggtgcccgccttcctggagacctccgcgccccgcaacctccccttctacgagcggctcggcttcaccgtcaccgccgacgtcgaggtgcccgaaggaccgcgcacctggtgcatgacccgcaagcccggtgcctga

SEQ ID NO: 1243 - DNA, 2868 bp, Artificial Sequence; identical to SEQ ID NO: 1239
  Synthetic Polynucleotides

SEQ ID NO: 1244 - DNA, 2865 bp, Artificial Sequence
  Synthetic Polynucleotides
atggccttaccagtgaccgccttgctcctgccgctggccttgctgctccacgccgccaggccggagatcgtgctgacacagagcccttctagcctgtctgccagcgtgggcgacagagtgaccatcacatgtagagccagcagcagcctgagcttcatgcactggtatcagcagaagcccggcaaggcccctaagccttggatctacgccaccagcaatctggcctctggcgtgccaagcagattttctggcagcggctctggcaccgactacaccctgacaatatccagcctccagcctgaggacttcgccacctacttttgccaccagtggtccagcaatcctctgacctttggcggaggcaccaaggtggaaatcaaaggcggaggcggaagtggaggcggaggatctggcggcggaggctctcaggtgcaactggtgcagtctggggccgaagtgaagaaacctggggcctctgtgaaggtgtcctgcaaggcttccggctacacctttaccagctacaatatgcactgggtccgacaggctcccggccagagacttgaatggatcggagccatctatcccggcaacggcgacacctcctacaaccagaaattcaagggccgcgtgaccgtgaccagagacacatctgccaacaccgcctacatggaactgtctagcctgaagtccgaggacaccgccgtgtactactgtgccagaagccactacggcagcaactacgtggactacttcgactactggggccagggcacactggtcacagtctcttctacgcgtgagcagaaactgatctcggaagaggatctggcgaagcccaccacgacgccagcgccgcgaccaccaacaccggcgcccaccatcgcgtcgcagcccctgtccctgcgcccagaggcgtgccggccagcggcggggggcgcagtgcacacgagggggctggacttcgcctgtgacatctacatctgggcgcccttggccgggacttgtggggtccttctcctgtcactggttatcaccctttactgcaaacggggcagaaagaaactcctgtatatattcaaacaaccatttatgagaccagtacaaactactcaagaggaagatggctgtagctgccgatttccagaagaagaagaaggaggatgtgaactgagagtgaagttcagcaggagcgcagacgcccccgcgtaccagcagggccagaaccagctctataacgagctgaatctaggacgaagagaggagtacgatgttttggacaagagacgtggccgggaccctgagatggggggaaagccgagaaggaagaaccctcaggaaggcctgtacaatgaactgcagaaagataagatggcggaggcctacagtgagattgggatgaaaggcgagcgccggaggggcaaggggcacgatggcctttaccagggtctcagtacagccaccaaggacacctacgacgcccttcacatgcaggccctgccccctcgctctagaggatctggagcaacaaacttctcactactcaaacaagcaggtgacgtggaggagaatcccgggcctgggatccacatggccacttacgaggttctctgtgaggtggcgcggaaactgggcacggatgacagggaagtggtattgttcctcctaaacgtgttcatacctcaacccacactggcccaattaattggagctcttagagctttaaaggaggagggcaggttaacgtttcccctgttagcggaatgtctgtttcgtgcaggtcgcagagacctcttgcgcgacctgcttcacttagacccgcgttttttagagcgccacctagcgggcacaatgagttatttcagcccttatcagctcactgttctccacgtagacggggagctgtgtgcgagggatattaggtctttgatatttttaagcaaggacactatagggtctcgcagcacaccacagacattcttacactgggtgtactgtatggaaaacttagacctactgggtcccactgacgtggatgccctaatgtcaatgcttagatctttgtcaagagtagacctacagcgccaagtgcaaaccctaatgggccttcacctttccggcccatcacactcccaacactatcgccatacaccactcgagaccgatttctacgactacaaggacgacgatgacaagactagtggctccggcgagggcagaggaagtctactaacctgcggagatgtggaagaaaatcctggcccacatatgaccgagtacaagcccacggtgcgcctcgccacccgcgacgacgtccccagggccgtacgcaccctcgccgccgcgttcgccgactaccccgccacgcgccacaccgtcgatccggaccgccacatcgagcgggtcaccgagctgcaagaactcttcctcacgcgcgtcgggctcgacatcggcaaggtgtgggtcgcggacgacggcgccgcggtggcggtctggaccacgccggagagcgtcgaagcgggggcggtgttcgccgagatcggcccgcgcatggccgagttgagcggttcccggctggccgcgcagcaacagatggaaggcctcctggcgccgcaccggcccaaggagcccgcgtggttcctggccaccgtcggcgtctcgcccgaccaccagggcaagggtctgggcagcgccgtcgtgctccccggagtggaggcggccgagcgcgccggggtgcccgccttcctggagacctccgcgccccgcaacctccccttctacgagcggctcggcttcaccgtcaccgccgacgtcgaggtgcccgaaggaccgcgcacctggtgcatgacccgcaagcccggtgcctga

SEQ ID NO: 1245 - DNA, 2871 bp, Artificial Sequence
  Synthetic Polynucleotides
atggccttaccagtgaccgccttgctcctgccgctggccttgctgctccacgccgccaggccggacgagatcgtgctgacacagagccctgccaccctgtctctgagccctggcgaaagagccaccctgagctgtagagccagccagagcgtgtccagctacctggcctggtatcagcagaagcccggccaggctccccggctgctgatctacgatgccagcaatagagccaccggcatccccgccagattttccggctctggcagcggcaccgacttcaccctgaccatcagctccctggaacccgaggacttcgccgtgtactactgccagcagcggagcaactggcccatcacattcggccagggcacccggctggaaatcaaaggcggaggcggaagtggaggcggaggatctggcggcggaggctctgaggtgcagcttgttgagtctggcggaggactggtgcagcccgatagaagcctgagactgtcttgtgccgccagcggcttcaccttccacgattatgccatgcactgggtccgacaggcccctggcaaaggacttgaatgggtgtccaccatctcttggaacagcggcacaatcggctacgccgactctgtgaagggcagattcaccatcagccgggacaacgccaagaacagcctgtacctccagatgaactccctgagagccgaggacacagccctgtactactgcgccaaggacatccagtacggcaactactactacggcatggacgtgtggggccagggcacaacagtgacagtctcttctacgcgtgagcagaaactgatctcggaagaggatctggcgaagcccaccacgacgccagcgccgcgaccaccaacaccggcgcccaccatcgcgtcgcagcccctgtccctgcgcccagaggcgtgccggccagcggcggggggcgcagtgcacacgagggggctggacttcgcctgtgacatctacatctgggcgcccttggccgggacttgtggggtccttctcctgtcactggttatcaccctttactgcaaacggggcagaaagaaactcctgtatatattcaaacaaccatttatgagaccagtacaaactactcaagaggaagatggctgtagctgccgatttccagaagaagaagaaggaggatgtgaactgagagtgaagttcagcaggagcgcagacgcccccgcgtaccagcagggccagaaccagctctataacgagctgaatctaggacgaagagaggagtacgatgttttggacaagagacgtggccgggaccctgagatggggggaaagccgagaaggaagaaccctcaggaaggcctgtacaatgaactgcagaaagataagatggcggaggcctacagtgagattgggatgaaaggcgagcgccggaggggcaaggggcacgatggcctttaccagggtctcagtacagccaccaaggacacctacgacgcccttcacatgcaggccctgccccctcgctctagaggatctggagcaacaaacttctcactactcaaacaagcaggtgacgtggaggagaatcccgggcctgggatccacatggccacttacgaggttctctgtgaggtggcgcggaaactgggcacggatgacagggaagtggtattgttcctcctaaacgtgttcatacctcaacccacactggcccaattaattggagctcttagagctttaaaggaggagggcaggttaacgtttcccctgttagcggaatgtctgtttcgtgcaggtcgcagagacctcttgcgcgacctgcttcacttagacccgcgttttttagagcgccacctagcgggcacaatgagttatttcagcccttatcagctcactgttctccacgtagacggggagctgtgtgcgagggatattaggtctttgatatttttaagcaaggacactatagggtctcgcagcacaccacagacattcttacactgggtgtactgtatggaaaacttagacctactgggtcccactgacgtggatgccctaatgtcaatgcttagatctttgtcaagagtagacctacagcgccaagtgcaaaccctaatgggccttcacctttccggcccatcacactcccaacactatcgccatacaccactcgagaccgatttctacgactacaaggacgacgatgacaagactagtggctccggcgagggcagaggaagtctactaacctgcggagatgtggaagaaaatcctggcccacatatgaccgagtacaagcccacggtgcgcctcgccacccgcgacgacgtccccagggccgtacgcaccctcgccgccgcgttcgccgactaccccgccacgcgccacaccgtcgatccggaccgccacatcgagcgggtcaccgagctgcaagaactcttcctcacgcgcgtcgggctcgacatcggcaaggtgtgggtcgcggacgacggcgccgcggtggcggtctggaccacgccggagagcgtcgaagcgggggcggtgttcgccgagatcggcccgcgcatggccgagttgagcggttcccggctggccgcgcagcaacagatggaaggcctcctggcgccgcaccggcccaaggagcccgcgtggttcctggccaccgtcggcgtctcgcccgaccaccagggcaagggtctgggcagcgccgtcgtgctccccggagtggaggcggccgagcgcgccggggtgcccgccttcctggagacctccgcgccccgcaacctccccttctacgagcggctcggcttcaccgtcaccgccgacgtcgaggtgcccgaaggaccgcgcacctggtgcatgacccgcaagcccggtgcctga

SEQ ID NO: 1246 - DNA, 2865 bp, Artificial Sequence
  Synthetic Polynucleotides
atggccttaccagtgaccgccttgctcctgccgctggccttgctgctccacgccgccaggccggagatcgtgctgacacagagccctggcacactgtcactgtctccaggcgaaagagccacactgagctgtagagccagcagcagcgtgccctacatccactggtatcagcagaagcctggacaggcccctcggctgctgatctatgccacatctgctctggcctctggcatccccgatagattttctggcagcggctccggcaccgacttcaccctgacaatcagcagactggaacccgaggacttcgccgtgtactactgtcagcagtggctgagcaaccctcctacattcggccagggcaccaagctggaactgaaaagaggcggaggcggaagtggaggcggaggatctggcggcggaggctctgaagttcagctggttcagagcggagccgaagtgaagaagccaggcgagagcctgaagctgagctgcaaaggcagcggcagaaccttcaccagctacaacatgcactgggtccgacagatgcccggcaaaggactggaatggatgggcgctatctaccctctgaccggcgacacctcctacaaccagaaaagcaagctgcaagtgaccatcagcgccgacaagagcatcagcacagcctacctccagtggtcctctctgaaggccagcgacaccgccatgtactattgtgccagaagcacctacgtcggcggcgactggcagtttgatgtgtggggcaagggcaccaccgtgaccgtttcttctacgcgtgagcagaaactgatctcggaagaggatctggcgaagcccaccacgacgccagcgccgcgaccaccaacaccggcgcccaccatcgcgtcgcagcccctgtccctgcgcccagaggcgtgccggccagcggcggggggcgcagtgcacacgagggggctggacttcgcctgtgacatctacatctgggcgcccttggccgggacttgtggggtccttctcctgtcactggttatcaccctttactgcaaacggggcagaaagaaactcctgtatatattcaaacaaccatttatgagaccagtacaaactactcaagaggaagatggctgtagctgccgatttccagaagaagaagaaggaggatgtgaactgagagtgaagttcagcaggagcgcagacgcccccgcgtaccagcagggccagaaccagctctataacgagctgaatctaggacgaagagaggagtacgatgttttggacaagagacgtggccgggaccctgagatggggggaaagccgagaaggaagaaccctcaggaaggcctgtacaatgaactgcagaaagataagatggcggaggcctacagtgagattgggatgaaaggcgagcgccggaggggcaaggggcacgatggcctttaccagggtctcagtacagccaccaaggacacctacgacgcccttcacatgcaggccctgccccctcgctctagaggatctggagcaacaaacttctcactactcaaacaagcaggtgacgtggaggagaatcccgggcctgggatccacatggccacttacgaggttctctgtgaggtggcgcggaaactgggcacggatgacagggaagtggtattgttcctcctaaacgtgttcatacctcaacccacactggcccaattaattggagctcttagagctttaaaggaggagggcaggttaacgtttcccctgttagcggaatgtctgtttcgtgcaggtcgcagagacctcttgcgcgacctgcttcacttagacccgcgttttttagagcgccacctagcgggcacaatgagttatttcagcccttatcagctcactgttctccacgtagacggggagctgtgtgcgagggatattaggtctttgatatttttaagcaaggacactatagggtctcgcagcacaccacagacattcttacactgggtgtactgtatggaaaacttagacctactgggtcccactgacgtggatgccctaatgtcaatgcttagatctttgtcaagagtagacctacagcgccaagtgcaaaccctaatgggccttcacctttccggcccatcacactcccaacactatcgccatacaccactcgagaccgatttctacgactacaaggacgacgatgacaagactagtggctccggcgagggcagaggaagtctactaacctgcggagatgtggaagaaaatcctggcccacatatgaccgagtacaagcccacggtgcgcctcgccacccgcgacgacgtccccagggccgtacgcaccctcgccgccgcgttcgccgactaccccgccacgcgccacaccgtcgatccggaccgccacatcgagcgggtcaccgagctgcaagaactcttcctcacgcgcgtcgggctcgacatcggcaaggtgtgggtcgcggacgacggcgccgcggtggcggtctggaccacgccggagagcgtcgaagcgggggcggtgttcgccgagatcggcccgcgcatggccgagttgagcggttcccggctggccgcgcagcaacagatggaaggcctcctggcgccgcaccggcccaaggagcccgcgtggttcctggccaccgtcggcgtctcgcccgaccaccagggcaagggtctgggcagcgccgtcgtgctccccggagtggaggcggccgagcgcgccggggtgcccgccttcctggagacctccgcgccccgcaacctccccttctacgagcggctcggcttcaccgtcaccgccgacgtcgaggtgcccgaaggaccgcgcacctggtgcatgacccgcaagcccggtgcctga

SEQ ID NO: 1247 - DNA, 2880 bp, Artificial Sequence
  Synthetic Polynucleotides
atggccttaccagtgaccgccttgctcctgccgctggccttgctgctccacgccgccaggccggacatccagatgacccagagccccagcagcctgtctgccagcgtgggcgacagagtgaccatcacctgtcggagcagccagagcatcgtgcactccgtgggcaacaccttcctggaatggtatcagcagaagcccggcaaggcccccaagctgctgatctacaaggtgtccaacagattcagcggcgtgcccagcaggtttagcggctctggcagcggcaccgacttcaccctgaccatctctagcctccagcccgaggacttcgccacctactactgttttcaaggcagccagttcccctacaccttcggccagggaacaaaggtggaaatcaagcggggcggaggcggaagtggaggcggaggatctggcggcggaggctctgaagtgcaactggtggaaagcggaggcggcctggtgcagcctggcggatctctgagactgagctgtgccgccagcggctacgagttcagccggtcctggatgaactgggtgcgccaggcccctggcaagggactggaatgggtgggaagaatctaccccggcgacggcgacaccaactacagcggcaagttcaagggccggttcaccatcagcgccgacaccagcaagaacaccgcctacctccagatgaacagcctgcgggccgaggataccgccgtgtactactgtgccagagatggcagctcctgggactggtacttcgacgtgtggggacagggaacccttgtgaccgtgtccagcacgcgtgagcagaaactgatctcggaagaggatctggcgaagcccaccacgacgccagcgccgcgaccaccaacaccggcgcccaccatcgcgtcgcagcccctgtccctgcgcccagaggcgtgccggccagcggcggggggcgcagtgcacacgagggggctggacttcgcctgtgacatctacatctgggcgcccttggccgggacttgtggggtccttctcctgtcactggttatcaccctttactgcaaacggggcagaaagaaactcctgtatatattcaaacaaccatttatgagaccagtacaaactactcaagaggaagatggctgtagctgccgatttccagaagaagaagaaggaggatgtgaactgagagtgaagttcagcaggagcgcagacgcccccgcgtaccagcagggccagaaccagctctataacgagctgaatctaggacgaagagaggagtacgatgttttggacaagagacgtggccgggaccctgagatggggggaaagccgagaaggaagaaccctcaggaaggcctgtacaatgaactgcagaaagataagatggcggaggcctacagtgagattgggatgaaaggcgagcgccggaggggcaaggggcacgatggcctttaccagggtctcagtacagccaccaaggacacctacgacgcccttcacatgcaggccctgccccctcgctctagaggatctggagcaacaaacttctcactactcaaacaagcaggtgacgtggaggagaatcccgggcctgggatccacatggccacttacgaggttctctgtgaggtggcgcggaaactgggcacggatgacagggaagtggtattgttcctcctaaacgtgttcatacctcaacccacactggcccaattaattggagctcttagagctttaaaggaggagggcaggttaacgtttcccctgttagcggaatgtctgtttcgtgcaggtcgcagagacctcttgcgcgacctgcttcacttagacccgcgttttttagagcgccacctagcgggcacaatgagttatttcagcccttatcagctcactgttctccacgtagacggggagctgtgtgcgagggatattaggtctttgatatttttaagcaaggacactatagggtctcgcagcacaccacagacattcttacactgggtgtactgtatggaaaacttagacctactgggtcccactgacgtggatgccctaatgtcaatgcttagatctttgtcaagagtagacctacagcgccaagtgcaaaccctaatgggccttcacctttccggcccatcacactcccaacactatcgccatacaccactcgagaccgatttctacgactacaaggacgacgatgacaagactagtggctccggcgagggcagaggaagtctactaacctgcggagatgtggaagaaaatcctggcccacatatgaccgagtacaagcccacggtgcgcctcgccacccgcgacgacgtccccagggccgtacgcaccctcgccgccgcgttcgccgactaccccgccacgcgccacaccgtcgatccggaccgccacatcgagcgggtcaccgagctgcaagaactcttcctcacgcgcgtcgggctcgacatcggcaaggtgtgggtcgcggacgacggcgccgcggtggcggtctggaccacgccggagagcgtcgaagcgggggcggtgttcgccgagatcggcccgcgcatggccgagttgagcggttcccggctggccgcgcagcaacagatggaaggcctcctggcgccgcaccggcccaaggagcccgcgtggttcctggccaccgtcggcgtctcgcccgaccaccagggcaagggtctgggcagcgccgtcgtgctccccggagtggaggcggccgagcgcgccggggtgcccgccttcctggagacctccgcgccccgcaacctccccttctacgagcggctcggcttcaccgtcaccgccgacgtcgaggtgcccgaaggaccgcgcacctggtgcatgacccgcaagcccggtgcctga

SEQ ID NO: 1248 - DNA, 2856 bp, Artificial Sequence
  Synthetic Polynucleotides
atggccttaccagtgaccgccttgctcctgccgctggccttgctgctccacgccgccaggccggacatcgtgatgacccagagccccagcagcctgtctgccagcgtgggcgacagagtgaccatcacatgcaaggccagccagagcgtgaccaacgacgtggcctggtatcagcagaagcccggcaaggcccccaagctgctgatctactacgccagcaacagatacaccggcgtgcccagcagattcagcggctctggcagcggcaccgacttcaccctgaccatctctagcctccagcccgaggacttcgccacctactactgtcagcaggactacagaagcccctggaccttcggcggaggcaccaaggtggaaatcaagcggggcggaggcggaagtggaggcggaggatctggcggcggaggctctcaggtgcaactggaagaaagcgggggaggcgtcgtgcggcctggaagaagtctgagactgagctgtgccgccagcggcttcaccttcagcgactacggcgtgaactggatcagacaggcccctggcaagggcctggaatgggtcacaatcatctggggcgacggcagaaccgactacaacagcgccctgaagtcccggttcaccgtgtcccggaacaacagcaacaacaccctgagcctccagatgaacagcctgaccaccgaggacaccgccgtgtactactgtgtgcgggctcccggcaaccgggctatggaatattggggacagggcgtactcgtgaccgtgtcctctacgcgtgagcagaaactgatctcggaagaggatctggcgaagcccaccacgacgccagcgccgcgaccaccaacaccggcgcccaccatcgcgtcgcagcccctgtccctgcgcccagaggcgtgccggccagcggcggggggcgcagtgcacacgagggggctggacttcgcctgtgacatctacatctgggcgcccttggccgggacttgtggggtccttctcctgtcactggttatcaccctttactgcaaacggggcagaaagaaactcctgtatatattcaaacaaccatttatgagaccagtacaaactactcaagaggaagatggctgtagctgccgatttccagaagaagaagaaggaggatgtgaactgagagtgaagttcagcaggagcgcagacgcccccgcgtaccagcagggccagaaccagctctataacgagctgaatctaggacgaagagaggagtacgatgttttggacaagagacgtggccgggaccctgagatggggggaaagccgagaaggaagaaccctcaggaaggcctgtacaatgaactgcagaaagataagatggcggaggcctacagtgagattgggatgaaaggcgagcgccggaggggcaaggggcacgatggcctttaccagggtctcagtacagccaccaaggacacctacgacgcccttcacatgcaggccctgccccctcgctctagaggatctggagcaacaaacttctcactactcaaacaagcaggtgacgtggaggagaatcccgggcctgggatccacatggccacttacgaggttctctgtgaggtggcgcggaaactgggcacggatgacagggaagtggtattgttcctcctaaacgtgttcatacctcaacccacactggcccaattaattggagctcttagagctttaaaggaggagggcaggttaacgtttcccctgttagcggaatgtctgtttcgtgcaggtcgcagagacctcttgcgcgacctgcttcacttagacccgcgttttttagagcgccacctagcgggcacaatgagttatttcagcccttatcagctcactgttctccacgtagacggggagctgtgtgcgagggatattaggtctttgatatttttaagcaaggacactatagggtctcgcagcacaccacagacattcttacactgggtgtactgtatggaaaacttagacctactgggtcccactgacgtggatgccctaatgtcaatgcttagatctttgtcaagagtagacctacagcgccaagtgcaaaccctaatgggccttcacctttccggcccatcacactcccaacactatcgccatacaccactcgagaccgatttctacgactacaaggacgacgatgacaagactagtggctccggcgagggcagaggaagtctactaacctgcggagatgtggaagaaaatcctggcccacatatgaccgagtacaagcccacggtgcgcctcgccacccgcgacgacgtccccagggccgtacgcaccctcgccgccgcgttcgccgactaccccgccacgcgccacaccgtcgatccggaccgccacatcgagcgggtcaccgagctgcaagaactcttcctcacgcgcgtcgggctcgacatcggcaaggtgtgggtcgcggacgacggcgccgcggtggcggtctggaccacgccggagagcgtcgaagcgggggcggtgttcgccgagatcggcccgcgcatggccgagttgagcggttcccggctggccgcgcagcaacagatggaaggcctcctggcgccgcaccggcccaaggagcccgcgtggttcctggccaccgtcggcgtctcgcccgaccaccagggcaagggtctgggcagcgccgtcgtgctccccggagtggaggcggccgagcgcgccggggtgcccgccttcctggagacctccgcgccccgcaacctccccttctacgagcggctcggcttcaccgtcaccgccgacgtcgaggtgcccgaaggaccgcgcacctggtgcatgacccgcaagcccggtgcctga

SEQ ID NO: 1249 - DNA, 2874 bp, Artificial Sequence
  Synthetic Polynucleotides
atggccttaccagtgaccgccttgctcctgccgctggccttgctgctccacgccgccaggccggacatccagatgacccagagccccagcagcctgtctgccagcgtgggcgacagagtgaccatcacctgtagagccagccagaccatctggtcctacctgaactggtatcagcagaggcccggcaaggcccccaacctgctgatctatgccgccagctctctccagagcggcgtgcccagcagattttccggcagaggcagcggcaccgacttcaccctgaccatcagttccttgcaggccgaggacttcgccacctactactgccagcagagctacagcatcccccagattttcggccagggcaccaagctggaaatcaagggcggaggcggaagtggaggcggaggatctggcggcggaggctctcaggtgcagctccagcagtctggacccggcctcgtgaagcctagccagacactgagcctgacctgcgccatcagcggcgatagcgtgtccagcaatagcgccgcctggaactggatcagacagtccccctctcggggcctggaatggctgggccggacctactaccgcagcaagtggtacaacgactacgccgtgtccgtgaagtcccggatcaccatcaaccccgacaccagcaagaaccagttctccttgcaactgaacagcgtgacccccgaggacaccgccgtgtactactgcgccagagaagtgaccggcgacctggaagatgccttcgacatctggggccagggaacaatggtcacagtgtccagcacgcgtgagcagaaactgatctcggaagaggatctggcgaagcccaccacgacgccagcgccgcgaccaccaacaccggcgcccaccatcgcgtcgcagcccctgtccctgcgcccagaggcgtgccggccagcggcggggggcgcagtgcacacgagggggctggacttcgcctgtgacatctacatctgggcgcccttggccgggacttgtggggtccttctcctgtcactggttatcaccctttactgcaaacggggcagaaagaaactcctgtatatattcaaacaaccatttatgagaccagtacaaactactcaagaggaagatggctgtagctgccgatttccagaagaagaagaaggaggatgtgaactgagagtgaagttcagcaggagcgcagacgcccccgcgtaccagcagggccagaaccagctctataacgagctgaatctaggacgaagagaggagtacgatgttttggacaagagacgtggccgggaccctgagatggggggaaagccgagaaggaagaaccctcaggaaggcctgtacaatgaactgcagaaagataagatggcggaggcctacagtgagattgggatgaaaggcgagcgccggaggggcaaggggcacgatggcctttaccagggtctcagtacagccaccaaggacacctacgacgcccttcacatgcaggccctgccccctcgctctagaggatctggagcaacaaacttctcactactcaaacaagcaggtgacgtggaggagaatcccgggcctgggatccacatggccacttacgaggttctctgtgaggtggcgcggaaactgggcacggatgacagggaagtggtattgttcctcctaaacgtgttcatacctcaacccacactggcccaattaattggagctcttagagctttaaaggaggagggcaggttaacgtttcccctgttagcggaatgtctgtttcgtgcaggtcgcagagacctcttgcgcgacctgcttcacttagacccgcgttttttagagcgccacctagcgggcacaatgagttatttcagcccttatcagctcactgttctccacgtagacggggagctgtgtgcgagggatattaggtctttgatatttttaagcaaggacactatagggtctcgcagcacaccacagacattcttacactgggtgtactgtatggaaaacttagacctactgggtcccactgacgtggatgccctaatgtcaatgcttagatctttgtcaagagtagacctacagcgccaagtgcaaaccctaatgggccttcacctttccggcccatcacactcccaacactatcgccatacaccactcgagaccgatttctacgactacaaggacgacgatgacaagactagtggctccggcgagggcagaggaagtctactaacctgcggagatgtggaagaaaatcctggcccacatatgaccgagtacaagcccacggtgcgcctcgccacccgcgacgacgtccccagggccgtacgcaccctcgccgccgcgttcgccgactaccccgccacgcgccacaccgtcgatccggaccgccacatcgagcgggtcaccgagctgcaagaactcttcctcacgcgcgtcgggctcgacatcggcaaggtgtgggtcgcggacgacggcgccgcggtggcggtctggaccacgccggagagcgtcgaagcgggggcggtgttcgccgagatcggcccgcgcatggccgagttgagcggttcccggctggccgcgcagcaacagatggaaggcctcctggcgccgcaccggcccaaggagcccgcgtggttcctggccaccgtcggcgtctcgcccgaccaccagggcaagggtctgggcagcgccgtcgtgctccccggagtggaggcggccgagcgcgccggggtgcccgccttcctggagacctccgcgccccgcaacctccccttctacgagcggctcggcttcaccgtcaccgccgacgtcgaggtgcccgaaggaccgcgcacctggtgcatgacccgcaagcccggtgcctga

SEQ ID NO: 1250 - DNA, 2874 bp, Artificial Sequence
  Synthetic Polynucleotides
atggccttaccagtgaccgccttgctcctgccgctggccttgctgctccacgccgccaggccgcaggtgcagctccagcagtctggacccggcctcgtgaagcctagccagacactgagcctgacctgcgccatcagcggcgatagcgtgtccagcaatagcgccgcctggaactggatcagacagtccccctctcggggcctggaatggctgggccggacctactaccgcagcaagtggtacaacgactacgccgtgtccgtgaagtcccggatcaccatcaaccccgacaccagcaagaaccagttctccttgcaactgaacagcgtgacccccgaggacaccgccgtgtactactgcgccagagaagtgaccggcgacctggaagatgccttcgacatctggggccagggaacaatggtcacagtgtccagcggcggaggcggaagtggaggcggaggatctggcggcggaggctctgacatccagatgacccagagccccagcagcctgtctgccagcgtgggcgacagagtgaccatcacctgtagagccagccagaccatctggtcctacctgaactggtatcagcagaggcccggcaaggcccccaacctgctgatctatgccgccagctctctccagagcggcgtgcccagcagattttccggcagaggcagcggcaccgacttcaccctgaccatcagttccttgcaggccgaggacttcgccacctactactgccagcagagctacagcatcccccagattttcggccagggcaccaagctggaaatcaagacgcgtgagcagaaactgatctcggaagaggatctggcgaagcccaccacgacgccagcgccgcgaccaccaacaccggcgcccaccatcgcgtcgcagcccctgtccctgcgcccagaggcgtgccggccagcggcggggggcgcagtgcacacgagggggctggacttcgcctgtgacatctacatctgggcgcccttggccgggacttgtggggtccttctcctgtcactggttatcaccctttactgcaaacggggcagaaagaaactcctgtatatattcaaacaaccatttatgagaccagtacaaactactcaagaggaagatggctgtagctgccgatttccagaagaagaagaaggaggatgtgaactgagagtgaagttcagcaggagcgcagacgcccccgcgtaccagcagggccagaaccagctctataacgagctgaatctaggacgaagagaggagtacgatgttttggacaagagacgtggccgggaccctgagatggggggaaagccgagaaggaagaaccctcaggaaggcctgtacaatgaactgcagaaagataagatggcggaggcctacagtgagattgggatgaaaggcgagcgccggaggggcaaggggcacgatggcctttaccagggtctcagtacagccaccaaggacacctacgacgcccttcacatgcaggccctgccccctcgctctagaggatctggagcaacaaacttctcactactcaaacaagcaggtgacgtggaggagaatcccgggcctgggatccacatggccacttacgaggttctctgtgaggtggcgcggaaactgggcacggatgacagggaagtggtattgttcctcctaaacgtgttcatacctcaacccacactggcccaattaattggagctcttagagctttaaaggaggagggcaggttaacgtttcccctgttagcggaatgtctgtttcgtgcaggtcgcagagacctcttgcgcgacctgcttcacttagacccgcgttttttagagcgccacctagcgggcacaatgagttatttcagcccttatcagctcactgttctccacgtagacggggagctgtgtgcgagggatattaggtctttgatatttttaagcaaggacactatagggtctcgcagcacaccacagacattcttacactgggtgtactgtatggaaaacttagacctactgggtcccactgacgtggatgccctaatgtcaatgcttagatctttgtcaagagtagacctacagcgccaagtgcaaaccctaatgggccttcacctttccggcccatcacactcccaacactatcgccatacaccactcgagaccgatttctacgactacaaggacgacgatgacaagactagtggctccggcgagggcagaggaagtctactaacctgcggagatgtggaagaaaatcctggcccacatatgaccgagtacaagcccacggtgcgcctcgccacccgcgacgacgtccccagggccgtacgcaccctcgccgccgcgttcgccgactaccccgccacgcgccacaccgtcgatccggaccgccacatcgagcgggtcaccgagctgcaagaactcttcctcacgcgcgtcgggctcgacatcggcaaggtgtgggtcgcggacgacggcgccgcggtggcggtctggaccacgccggagagcgtcgaagcgggggcggtgttcgccgagatcggcccgcgcatggccgagttgagcggttcccggctggccgcgcagcaacagatggaaggcctcctggcgccgcaccggcccaaggagcccgcgtggttcctggccaccgtcggcgtctcgcccgaccaccagggcaagggtctgggcagcgccgtcgtgctccccggagtggaggcggccgagcgcgccggggtgcccgccttcctggagacctccgcgccccgcaacctccccttctacgagcggctcggcttcaccgtcaccgccgacgtcgaggtgcccgaaggaccgcgcacctggtgcatgacccgcaagcccggtgcctga

SEQ ID NO: 1251 - DNA, 2853 bp, Artificial Sequence
  Synthetic Polynucleotides
atggccttaccagtgaccgccttgctcctgccgctggccttgctgctccacgccgccaggccggacatccagatgacccagagccccgccaccatcgagaacacaagcctgtctgccagcgtgggcgacagagtgaccatcacctgtagagccagccagggcatcagctcttggctgacctggtatcagcagaagcccgagaaggcccccaagagcctgatctacgccgccagctctctgcagtctggcgtgcccagcagattttccggcagcggctctggcaccgacttcaccctgacaatcagcagcctgcagcccgaggacttcgccacctactactgccagcagtacgacagctaccccatcaccttcggccagggcacccggctggaaatcaagggcggaggcggaagtggaggcggaggatctggcggcggaggctctcaggtgcaactgcagcagtggggagccggactgctgaagcctagcgagacactgagcctgacctgcgccgtgtacggcggcagcttcagcgcctactattggagctggatcagacagccccctggcaagggcctggaatggatcggcgacatcaatcacggcggaggcaccaactacaaccccagcctgaagtcccgcgtgaccatctccgtggacaccagcaagaaccagttctccctgaagctgaacagcgtgacagccgccgacacagccgtgtactactgtgccagcctgaccgcctattggggccagggatctcttgtgaccgtgtccagcacgcgtgagcagaaactgatctcggaagaggatctggcgaagcccaccacgacgccagcgccgcgaccaccaacaccggcgcccaccatcgcgtcgcagcccctgtccctgcgcccagaggcgtgccggccagcggcggggggcgcagtgcacacgagggggctggacttcgcctgtgacatctacatctgggcgcccttggccgggacttgtggggtccttctcctgtcactggttatcaccctttactgcaaacggggcagaaagaaactcctgtatatattcaaacaaccatttatgagaccagtacaaactactcaagaggaagatggctgtagctgccgatttccagaagaagaagaaggaggatgtgaactgagagtgaagttcagcaggagcgcagacgcccccgcgtaccagcagggccagaaccagctctataacgagctgaatctaggacgaagagaggagtacgatgttttggacaagagacgtggccgggaccctgagatggggggaaagccgagaaggaagaaccctcaggaaggcctgtacaatgaactgcagaaagataagatggcggaggcctacagtgagattgggatgaaaggcgagcgccggaggggcaaggggcacgatggcctttaccagggtctcagtacagccaccaaggacacctacgacgcccttcacatgcaggccctgccccctcgctctagaggatctggagcaacaaacttctcactactcaaacaagcaggtgacgtggaggagaatcccgggcctgggatccacatggccacttacgaggttctctgtgaggtggcgcggaaactgggcacggatgacagggaagtggtattgttcctcctaaacgtgttcatacctcaacccacactggcccaattaattggagctcttagagctttaaaggaggagggcaggttaacgtttcccctgttagcggaatgtctgtttcgtgcaggtcgcagagacctcttgcgcgacctgcttcacttagacccgcgttttttagagcgccacctagcgggcacaatgagttatttcagcccttatcagctcactgttctccacgtagacggggagctgtgtgcgagggatattaggtctttgatatttttaagcaaggacactatagggtctcgcagcacaccacagacattcttacactgggtgtactgtatggaaaacttagacctactgggtcccactgacgtggatgccctaatgtcaatgcttagatctttgtcaagagtagacctacagcgccaagtgcaaaccctaatgggccttcacctttccggcccatcacactcccaacactatcgccatacaccactcgagaccgatttctacgactacaaggacgacgatgacaagactagtggctccggcgagggcagaggaagtctactaacctgcggagatgtggaagaaaatcctggcccacatatgaccgagtacaagcccacggtgcgcctcgccacccgcgacgacgtccccagggccgtacgcaccctcgccgccgcgttcgccgactaccccgccacgcgccacaccgtcgatccggaccgccacatcgagcgggtcaccgagctgcaagaactcttcctcacgcgcgtcgggctcgacatcggcaaggtgtgggtcgcggacgacggcgccgcggtggcggtctggaccacgccggagagcgtcgaagcgggggcggtgttcgccgagatcggcccgcgcatggccgagttgagcggttcccggctggccgcgcagcaacagatggaaggcctcctggcgccgcaccggcccaaggagcccgcgtggttcctggccaccgtcggcgtctcgcccgaccaccagggcaagggtctgggcagcgccgtcgtgctccccggagtggaggcggccgagcgcgccggggtgcccgccttcctggagacctccgcgccccgcaacctccccttctacgagcggctcggcttcaccgtcaccgccgacgtcgaggtgcccgaaggaccgcgcacctggtgcatgacccgcaagcccggtgcctga

SEQ ID NO: 1252 - DNA, 2868 bp, Artificial Sequence
  Synthetic Polynucleotides
atggccttaccagtgaccgccttgctcctgccgctggccttgctgctccacgccgccaggccggacgagatcgtgctgacccagagccctgatagcctggccgtgtctctgggcgagagagccaccatcaactgcaaggccagccagagcgtggacttcgacggcgacagctacctgaactggtatcagcagaagcccggccagccccccaaggtgctgatctatgccgccagcacactgcagagcggcgtgcccagcagattttctggcagcggctccggcaccgacttcaccctgaccatcaacagcctggaagccgaggacgccgccacctactactgccagcagagcaacgaggacccctggacctttggcggcggaacaaaggtggaaatcaagggcggaggcggaagtggaggcggaggatctggcggcggaggctctcaggtgcaactggtgcagtccggcgctgaagtgaagaaacctggggccagcgtgaaggtgtcctgcaaggtgtccggctacacctttaccgactactacattacctgggtgcgccaggcccctggacaggccctggaatggatgggctggatctaccccggcagcggcaacaccaagtacagccagaagttccagggcagattcgtgttcagcgtggacaccagcgccagcaccgcctacctgcaactgtctagcctgaaggccgaagataccgccgtgtactactgcgccaactacggcaactattggttcgcctattggggccagggaacccttgtgaccgtgtcctctacgcgtgagcagaaactgatctcggaagaggatctggcgaagcccaccacgacgccagcgccgcgaccaccaacaccggcgcccaccatcgcgtcgcagcccctgtccctgcgcccagaggcgtgccggccagcggcggggggcgcagtgcacacgagggggctggacttcgcctgtgacatctacatctgggcgcccttggccgggacttgtggggtccttctcctgtcactggttatcaccctttactgcaaacggggcagaaagaaactcctgtatatattcaaacaaccatttatgagaccagtacaaactactcaagaggaagatggctgtagctgccgatttccagaagaagaagaaggaggatgtgaactgagagtgaagttcagcaggagcgcagacgcccccgcgtaccagcagggccagaaccagctctataacgagctgaatctaggacgaagagaggagtacgatgttttggacaagagacgtggccgggaccctgagatggggggaaagccgagaaggaagaaccctcaggaaggcctgtacaatgaactgcagaaagataagatggcggaggcctacagtgagattgggatgaaaggcgagcgccggaggggcaaggggcacgatggcctttaccagggtctcagtacagccaccaaggacacctacgacgcccttcacatgcaggccctgccccctcgctctagaggatctggagcaacaaacttctcactactcaaacaagcaggtgacgtggaggagaatcccgggcctgggatccacatggccacttacgaggttctctgtgaggtggcgcggaaactgggcacggatgacagggaagtggtattgttcctcctaaacgtgttcatacctcaacccacactggcccaattaattggagctcttagagctttaaaggaggagggcaggttaacgtttcccctgttagcggaatgtctgtttcgtgcaggtcgcagagacctcttgcgcgacctgcttcacttagacccgcgttttttagagcgccacctagcgggcacaatgagttatttcagcccttatcagctcactgttctccacgtagacggggagctgtgtgcgagggatattaggtctttgatatttttaagcaaggacactatagggtctcgcagcacaccacagacattcttacactgggtgtactgtatggaaaacttagacctactgggtcccactgacgtggatgccctaatgtcaatgcttagatctttgtcaagagtagacctacagcgccaagtgcaaaccctaatgggccttcacctttccggcccatcacactcccaacactatcgccatacaccactcgagaccgatttctacgactacaaggacgacgatgacaagactagtggctccggcgagggcagaggaagtctactaacctgcggagatgtggaagaaaatcctggcccacatatgaccgagtacaagcccacggtgcgcctcgccacccgcgacgacgtccccagggccgtacgcaccctcgccgccgcgttcgccgactaccccgccacgcgccacaccgtcgatccggaccgccacatcgagcgggtcaccgagctgcaagaactcttcctcacgcgcgtcgggctcgacatcggcaaggtgtgggtcgcggacgacggcgccgcggtggcggtctggaccacgccggagagcgtcgaagcgggggcggtgttcgccgagatcggcccgcgcatggccgagttgagcggttcccggctggccgcgcagcaacagatggaaggcctcctggcgccgcaccggcccaaggagcccgcgtggttcctggccaccgtcggcgtctcgcccgaccaccagggcaagggtctgggcagcgccgtcgtgctccccggagtggaggcggccgagcgcgccggggtgcccgccttcctggagacctccgcgccccgcaacctccccttctacgagcggctcggcttcaccgtcaccgccgacgtcgaggtgcccgaaggaccgcgcacctggtgcatgacccgcaagcccggtgcctga

SEQ ID NO: 1253 - DNA, 2859 bp, Artificial Sequence
  Synthetic Polynucleotides
atggccttaccagtgaccgccttgctcctgccgctggccttgctgctccacgccgccaggccggacatccagatgacccagagccccagcagcctgtctgccagcgtgggcgacagagtgaccatcacctgtagagccagccagggcatcagctcttggctggcctggtatcagcagaagcccgagaaggcccccaagagcctgatctacgccgcctctagtctccagagcggcgtgcccagcagattttctggcagcggctccggcaccgacttcaccctgacaatcagctccctccagcccgaggacttcgccacctactactgccagcagtacaacagctaccctcccacctttggcggaggcaccaaggtggaaatcaagggcggaggcggaagtggaggcggaggatctggcggcggaggctctgaagtgcaactggtgcagtctggcggagggctggtgcatcctgggggaagcctgagactgagctgtgccggctctggcttcgccttcagcagcagcaccatgcactggatcagacaggcccctggcaagggcctggaatggatcagcctgatcggaagcggagggggcatctactacggcgacagcgtgaagggccggttcaccatcagccgggacaacgccaagaacagcctgtacctccagatgaactccctgcgggccgaggacatggccgtgtactattgtgtgcggggctacttcgactgggtggactacttcgattactggggccagggcaccctcgtgaccgtgtcatctacgcgtgagcagaaactgatctcggaagaggatctggcgaagcccaccacgacgccagcgccgcgaccaccaacaccggcgcccaccatcgcgtcgcagcccctgtccctgcgcccagaggcgtgccggccagcggcggggggcgcagtgcacacgagggggctggacttcgcctgtgacatctacatctgggcgcccttggccgggacttgtggggtccttctcctgtcactggttatcaccctttactgcaaacggggcagaaagaaactcctgtatatattcaaacaaccatttatgagaccagtacaaactactcaagaggaagatggctgtagctgccgatttccagaagaagaagaaggaggatgtgaactgagagtgaagttcagcaggagcgcagacgcccccgcgtaccagcagggccagaaccagctctataacgagctgaatctaggacgaagagaggagtacgatgttttggacaagagacgtggccgggaccctgagatggggggaaagccgagaaggaagaaccctcaggaaggcctgtacaatgaactgcagaaagataagatggcggaggcctacagtgagattgggatgaaaggcgagcgccggaggggcaaggggcacgatggcctttaccagggtctcagtacagccaccaaggacacctacgacgcccttcacatgcaggccctgccccctcgctctagaggatctggagcaacaaacttctcactactcaaacaagcaggtgacgtggaggagaatcccgggcctgggatccacatggccacttacgaggttctctgtgaggtggcgcggaaactgggcacggatgacagggaagtggtattgttcctcctaaacgtgttcatacctcaacccacactggcccaattaattggagctcttagagctttaaaggaggagggcaggttaacgtttcccctgttagcggaatgtctgtttcgtgcaggtcgcagagacctcttgcgcgacctgcttcacttagacccgcgttttttagagcgccacctagcgggcacaatgagttatttcagcccttatcagctcactgttctccacgtagacggggagctgtgtgcgagggatattaggtctttgatatttttaagcaaggacactatagggtctcgcagcacaccacagacattcttacactgggtgtactgtatggaaaacttagacctactgggtcccactgacgtggatgccctaatgtcaatgcttagatctttgtcaagagtagacctacagcgccaagtgcaaaccctaatgggccttcacctttccggcccatcacactcccaacactatcgccatacaccactcgagaccgatttctacgactacaaggacgacgatgacaagactagtggctccggcgagggcagaggaagtctactaacctgcggagatgtggaagaaaatcctggcccacatatgaccgagtacaagcccacggtgcgcctcgccacccgcgacgacgtccccagggccgtacgcaccctcgccgccgcgttcgccgactaccccgccacgcgccacaccgtcgatccggaccgccacatcgagcgggtcaccgagctgcaagaactcttcctcacgcgcgtcgggctcgacatcggcaaggtgtgggtcgcggacgacggcgccgcggtggcggtctggaccacgccggagagcgtcgaagcgggggcggtgttcgccgagatcggcccgcgcatggccgagttgagcggttcccggctggccgcgcagcaacagatggaaggcctcctggcgccgcaccggcccaaggagcccgcgtggttcctggccaccgtcggcgtctcgcccgaccaccagggcaagggtctgggcagcgccgtcgtgctccccggagtggaggcggccgagcgcgccggggtgcccgccttcctggagacctccgcgccccgcaacctccccttctacgagcggctcggcttcaccgtcaccgccgacgtcgaggtgcccgaaggaccgcgcacctggtgcatgacccgcaagcccggtgcctga

SEQ ID NO: 1254 - DNA, 2889 bp, Artificial Sequence
  Synthetic Polynucleotides
atggccttaccagtgaccgccttgctcctgccgctggccttgctgctccacgccgccaggccggacgacatcgtgatgacacagtcaccagatagcctcaccgtctccctgggggagcggaccaccattaattgtaaatccagccaaagcgtgctggactcaagcaagaacaagaatagcctcgcctggtatcagcagaagcccggtcagcctccaaagctgctgctttcttgggcctccaccagagagtccgggattcctgataggtttagtggttcaggctccggcacagattttactctgaccattgattctctccagccagaggattctgcaacttattactgccagcaaagcgcccactttcctataacttttggccagggaacccgacttgaaatcaagggcggaggcggaagtggaggcggaggatctggcggcggaggctctcaggtgcagctggtgcagagcggtgccgaagtgaagaaaccaggtgcatccgttaaagtttcatgtaaggctagtggatataccttcaccaattacggaatgaactgggtgaaacaggcccctggccagggactgaagtggatggggtggattaacacctacaccggggagccgacttatgcagacgactttaaggggcgggtcacgatgacctccgacacctccaccagtaccgcctacctggagctgcacaaccttaggtcagacgataccgccgtgtattactgtgcccgatggtcttggtccgacggatactatgtctacttcgactattggggccaggggaccacagttaccgtgtcctctacgcgtgagcagaaactgatctcggaagaggatctggcgaagcccaccacgacgccagcgccgcgaccaccaacaccggcgcccaccatcgcgtcgcagcccctgtccctgcgcccagaggcgtgccggccagcggcggggggcgcagtgcacacgagggggctggacttcgcctgtgacatctacatctgggcgcccttggccgggacttgtggggtccttctcctgtcactggttatcaccctttactgcaaacggggcagaaagaaactcctgtatatattcaaacaaccatttatgagaccagtacaaactactcaagaggaagatggctgtagctgccgatttccagaagaagaagaaggaggatgtgaactgagagtgaagttcagcaggagcgcagacgcccccgcgtaccagcagggccagaaccagctctataacgagctgaatctaggacgaagagaggagtacgatgttttggacaagagacgtggccgggaccctgagatggggggaaagccgagaaggaagaaccctcaggaaggcctgtacaatgaactgcagaaagataagatggcggaggcctacagtgagattgggatgaaaggcgagcgccggaggggcaaggggcacgatggcctttaccagggtctcagtacagccaccaaggacacctacgacgcccttcacatgcaggccctgccccctcgctctagaggatctggagcaacaaacttctcactactcaaacaagcaggtgacgtggaggagaatcccgggcctgggatccacatggccacttacgaggttctctgtgaggtggcgcggaaactgggcacggatgacagggaagtggtattgttcctcctaaacgtgttcatacctcaacccacactggcccaattaattggagctcttagagctttaaaggaggagggcaggttaacgtttcccctgttagcggaatgtctgtttcgtgcaggtcgcagagacctcttgcgcgacctgcttcacttagacccgcgttttttagagcgccacctagcgggcacaatgagttatttcagcccttatcagctcactgttctccacgtagacggggagctgtgtgcgagggatattaggtctttgatatttttaagcaaggacactatagggtctcgcagcacaccacagacattcttacactgggtgtactgtatggaaaacttagacctactgggtcccactgacgtggatgccctaatgtcaatgcttagatctttgtcaagagtagacctacagcgccaagtgcaaaccctaatgggccttcacctttccggcccatcacactcccaacactatcgccatacaccactcgagaccgatttctacgactacaaggacgacgatgacaagactagtggctccggcgagggcagaggaagtctactaacctgcggagatgtggaagaaaatcctggcccacatatgaccgagtacaagcccacggtgcgcctcgccacccgcgacgacgtccccagggccgtacgcaccctcgccgccgcgttcgccgactaccccgccacgcgccacaccgtcgatccggaccgccacatcgagcgggtcaccgagctgcaagaactcttcctcacgcgcgtcgggctcgacatcggcaaggtgtgggtcgcggacgacggcgccgcggtggcggtctggaccacgccggagagcgtcgaagcgggggcggtgttcgccgagatcggcccgcgcatggccgagttgagcggttcccggctggccgcgcagcaacagatggaaggcctcctggcgccgcaccggcccaaggagcccgcgtggttcctggccaccgtcggcgtctcgcccgaccaccagggcaagggtctgggcagcgccgtcgtgctccccggagtggaggcggccgagcgcgccggggtgcccgccttcctggagacctccgcgccccgcaacctccccttctacgagcggctcggcttcaccgtcaccgccgacgtcgaggtgcccgaaggaccgcgcacctggtgcatgacccgcaagcccggtgcctga

SEQ ID NO: 1255 - DNA, 2877 bp, Artificial Sequence
  Synthetic Polynucleotides
atggccttaccagtgaccgccttgctcctgccgctggccttgctgctccacgccgccaggccggacgagatcgtgctgacacagagccctggaagcctggccgtgtctcctggcgagcgcgtgacaatgagctgcaagagcagccagagcgtgttcttcagcagctcccagaagaactacctggcctggtatcagcagatccccggccagagccccagactgctgatctactgggccagcaccagagaaagcggcgtgcccgatagattcaccggcagcggctctggcaccgacttcaccctgacaatcagcagcgtgcagcccgaggacctggctatctactactgccaccagtacctgagcagccggaccttcggccagggcaccaagctggaaatcaagagaggcggaggcggaagtggaggcggaggatctggcggcggaggctctcaggtgcaactgcagcagcctggcgctgaggtcgtgaagccaggcgcttccgtgaagatgtcctgcaaggccagcggctacaccttcaccagctactacatccactggatcaagcagacccctggacagggcctggaatgggtgggagtgatctaccccggcaacgacgacatcagctacaaccagaagttccagggcaaggccaccctgaccgccgacaagtctagcaccaccgcctacatgcaactgtccagcctgaccagcgaggacagcgccgtgtactactgcgccagagaagtgcggctgcggtacttcgatgtgtggggccagggaaccaccgtgaccgtgtcatctacgcgtgagcagaaactgatctcggaagaggatctggcgaagcccaccacgacgccagcgccgcgaccaccaacaccggcgcccaccatcgcgtcgcagcccctgtccctgcgcccagaggcgtgccggccagcggcggggggcgcagtgcacacgagggggctggacttcgcctgtgacatctacatctgggcgcccttggccgggacttgtggggtccttctcctgtcactggttatcaccctttactgcaaacggggcagaaagaaactcctgtatatattcaaacaaccatttatgagaccagtacaaactactcaagaggaagatggctgtagctgccgatttccagaagaagaagaaggaggatgtgaactgagagtgaagttcagcaggagcgcagacgcccccgcgtaccagcagggccagaaccagctctataacgagctgaatctaggacgaagagaggagtacgatgttttggacaagagacgtggccgggaccctgagatggggggaaagccgagaaggaagaaccctcaggaaggcctgtacaatgaactgcagaaagataagatggcggaggcctacagtgagattgggatgaaaggcgagcgccggaggggcaaggggcacgatggcctttaccagggtctcagtacagccaccaaggacacctacgacgcccttcacatgcaggccctgccccctcgctctagaggatctggagcaacaaacttctcactactcaaacaagcaggtgacgtggaggagaatcccgggcctgggatccacatggccacttacgaggttctctgtgaggtggcgcggaaactgggcacggatgacagggaagtggtattgttcctcctaaacgtgttcatacctcaacccacactggcccaattaattggagctcttagagctttaaaggaggagggcaggttaacgtttcccctgttagcggaatgtctgtttcgtgcaggtcgcagagacctcttgcgcgacctgcttcacttagacccgcgttttttagagcgccacctagcgggcacaatgagttatttcagcccttatcagctcactgttctccacgtagacggggagctgtgtgcgagggatattaggtctttgatatttttaagcaaggacactatagggtctcgcagcacaccacagacattcttacactgggtgtactgtatggaaaacttagacctactgggtcccactgacgtggatgccctaatgtcaatgcttagatctttgtcaagagtagacctacagcgccaagtgcaaaccctaatgggccttcacctttccggcccatcacactcccaacactatcgccatacaccactcgagaccgatttctacgactacaaggacgacgatgacaagactagtggctccggcgagggcagaggaagtctactaacctgcggagatgtggaagaaaatcctggcccacatatgaccgagtacaagcccacggtgcgcctcgccacccgcgacgacgtccccagggccgtacgcaccctcgccgccgcgttcgccgactaccccgccacgcgccacaccgtcgatccggaccgccacatcgagcgggtcaccgagctgcaagaactcttcctcacgcgcgtcgggctcgacatcggcaaggtgtgggtcgcggacgacggcgccgcggtggcggtctggaccacgccggagagcgtcgaagcgggggcggtgttcgccgagatcggcccgcgcatggccgagttgagcggttcccggctggccgcgcagcaacagatggaaggcctcctggcgccgcaccggcccaaggagcccgcgtggttcctggccaccgtcggcgtctcgcccgaccaccagggcaagggtctgggcagcgccgtcgtgctccccggagtggaggcggccgagcgcgccggggtgcccgccttcctggagacctccgcgccccgcaacctccccttctacgagcggctcggcttcaccgtcaccgccgacgtcgaggtgcccgaaggaccgcgcacctggtgcatgacccgcaagcccggtgcctga

SEQ ID NO: 1256 - DNA, 2955 bp, Artificial Sequence
  Synthetic Polynucleotides
atggccttaccagtgaccgccttgctcctgccgctggccttgctgctccacgccgccaggccgtacatcaacatctacaacgccgagcctgccaatcctagcgagaagaacagccccacacagtacgcctacggcagcggagaattcgacatccagctgacacagagcccttctagcctgtctgccagcgtgggcgacagagtgaccatcacatgtagagccagccagggcatcagctctgtgctggcttggtatcagcagaagcctggcaaggcccctaagctgctgatctacgatgccagcagcctggaaagcggcgtgccaagcagattttctggcagcggctctggcaccgacttcaccctgacaatatccagcctccagcctgaggacttcgccacctactactgccagcagttcaacagcagcatcaccttcggccagggcaccaagctggaaatcaagagaacagtggcagccggcggaggcggaagtggaggcggaggatctggcggcggaggctctcaagttcagctggttcagtctggggccgaagtgaagaaacctggcagcagcgtgaaggtgtcctgcaaagcaagcggcggcaccttcagcgattacgccatctcttgggtccgacaggcccctggacaaggactggaatggatgggcagaatcatccccatcctgggcgtcgccaattacgcccagaaattccagggccgcgtgacaatcaccgccgacaagtctaccagaaccgcctacatggaactgagcagcctgagaagcgaggacaccgccgtgtactactgcgccagaaattgggccgacgccttcgacatttggggccagggaacaatggtcaccgtgtctagcgcctccacgcgtgagcagaaactgatctcggaagaggatctggcgaagcccaccacgacgccagcgccgcgaccaccaacaccggcgcccaccatcgcgtcgcagcccctgtccctgcgcccagaggcgtgccggccagcggcggggggcgcagtgcacacgagggggctggacttcgcctgtgacatctacatctgggcgcccttggccgggacttgtggggtccttctcctgtcactggttatcaccctttactgcaaacggggcagaaagaaactcctgtatatattcaaacaaccatttatgagaccagtacaaactactcaagaggaagatggctgtagctgccgatttccagaagaagaagaaggaggatgtgaactgagagtgaagttcagcaggagcgcagacgcccccgcgtaccagcagggccagaaccagctctataacgagctgaatctaggacgaagagaggagtacgatgttttggacaagagacgtggccgggaccctgagatggggggaaagccgagaaggaagaaccctcaggaaggcctgtacaatgaactgcagaaagataagatggcggaggcctacagtgagattgggatgaaaggcgagcgccggaggggcaaggggcacgatggcctttaccagggtctcagtacagccaccaaggacacctacgacgcccttcacatgcaggccctgccccctcgctctagaggatctggagcaacaaacttctcactactcaaacaagcaggtgacgtggaggagaatcccgggcctgggatccacatggccacttacgaggttctctgtgaggtggcgcggaaactgggcacggatgacagggaagtggtattgttcctcctaaacgtgttcatacctcaacccacactggcccaattaattggagctcttagagctttaaaggaggagggcaggttaacgtttcccctgttagcggaatgtctgtttcgtgcaggtcgcagagacctcttgcgcgacctgcttcacttagacccgcgttttttagagcgccacctagcgggcacaatgagttatttcagcccttatcagctcactgttctccacgtagacggggagctgtgtgcgagggatattaggtctttgatatttttaagcaaggacactatagggtctcgcagcacaccacagacattcttacactgggtgtactgtatggaaaacttagacctactgggtcccactgacgtggatgccctaatgtcaatgcttagatctttgtcaagagtagacctacagcgccaagtgcaaaccctaatgggccttcacctttccggcccatcacactcccaacactatcgccatacaccactcgagaccgatttctacgactacaaggacgacgatgacaagactagtggctccggcgagggcagaggaagtctactaacctgcggagatgtggaagaaaatcctggcccacatatgaccgagtacaagcccacggtgcgcctcgccacccgcgacgacgtccccagggccgtacgcaccctcgccgccgcgttcgccgactaccccgccacgcgccacaccgtcgatccggaccgccacatcgagcgggtcaccgagctgcaagaactcttcctcacgcgcgtcgggctcgacatcggcaaggtgtgggtcgcggacgacggcgccgcggtggcggtctggaccacgccggagagcgtcgaagcgggggcggtgttcgccgagatcggcccgcgcatggccgagttgagcggttcccggctggccgcgcagcaacagatggaaggcctcctggcgccgcaccggcccaaggagcccgcgtggttcctggccaccgtcggcgtctcgcccgaccaccagggcaagggtctgggcagcgccgtcgtgctccccggagtggaggcggccgagcgcgccggggtgcccgccttcctggagacctccgcgccccgcaacctccccttctacgagcggctcggcttcaccgtcaccgccgacgtcgaggtgcccgaaggaccgcgcacctggtgcatgacccgcaagcccggtgcctga

SEQ ID NO: 1257 - DNA, 2952 bp, Artificial Sequence
  Synthetic Polynucleotides
atggccttaccagtgaccgccttgctcctgccgctggccttgctgctccacgccgccaggccgtacatcaacatctacaacgccgagcctgccaatcctagcgagaagaacagccccacacagtacgcctacggcagcggagaattcgacatcgtgatgacacagagccctagcagcctgtctgcctctctcggcggcaaagtgaccatcacatgcaaggccagccaggacatcaacaagtatatcgcctggtatcagcacaagcccggcaagggacctagactgctgatccactacaccagcacactccagcctggcatccccagcagattttctggcagcggctccggcagagactacagcttcagcatcagcaacctggaacctgaggacattgccacctactactgcctccagtacgacaacctgctgacctttggagccggcaccaagctggaactgaaaagaggcggaggcggaagtggaggcggaggatctggcggcggaggctctgaagtgaaactccagcagagcggccctgagctggttaagcctggcaccagcgtgaaggtgtcctgtaaagccagcggctactccttcaccgactacaacatgtactgggtcaagcagagccacggcaagagcctggaatggatcggctacatcgacccctacaaaggcggcaccatctacaaccagaagttcaagggcaaagccacactgaccgtggacaagagcagcagcaccgccttcatgcacctgaacagcctgaccagcgaggacagcgccgtgtactattgcgccagagagatgattaccgcctactacttcgactactggggccagggaagcagcgtgaccgttagctctctggaaagaacgcgtgagcagaaactgatctcggaagaggatctggcgaagcccaccacgacgccagcgccgcgaccaccaacaccggcgcccaccatcgcgtcgcagcccctgtccctgcgcccagaggcgtgccggccagcggcggggggcgcagtgcacacgagggggctggacttcgcctgtgacatctacatctgggcgcccttggccgggacttgtggggtccttctcctgtcactggttatcaccctttactgcaaacggggcagaaagaaactcctgtatatattcaaacaaccatttatgagaccagtacaaactactcaagaggaagatggctgtagctgccgatttccagaagaagaagaaggaggatgtgaactgagagtgaagttcagcaggagcgcagacgcccccgcgtaccagcagggccagaaccagctctataacgagctgaatctaggacgaagagaggagtacgatgttttggacaagagacgtggccgggaccctgagatggggggaaagccgagaaggaagaaccctcaggaaggcctgtacaatgaactgcagaaagataagatggcggaggcctacagtgagattgggatgaaaggcgagcgccggaggggcaaggggcacgatggcctttaccagggtctcagtacagccaccaaggacacctacgacgcccttcacatgcaggccctgccccctcgctctagaggatctggagcaacaaacttctcactactcaaacaagcaggtgacgtggaggagaatcccgggcctgggatccacatggccacttacgaggttctctgtgaggtggcgcggaaactgggcacggatgacagggaagtggtattgttcctcctaaacgtgttcatacctcaacccacactggcccaattaattggagctcttagagctttaaaggaggagggcaggttaacgtttcccctgttagcggaatgtctgtttcgtgcaggtcgcagagacctcttgcgcgacctgcttcacttagacccgcgttttttagagcgccacctagcgggcacaatgagttatttcagcccttatcagctcactgttctccacgtagacggggagctgtgtgcgagggatattaggtctttgatatttttaagcaaggacactatagggtctcgcagcacaccacagacattcttacactgggtgtactgtatggaaaacttagacctactgggtcccactgacgtggatgccctaatgtcaatgcttagatctttgtcaagagtagacctacagcgccaagtgcaaaccctaatgggccttcacctttccggcccatcacactcccaacactatcgccatacaccactcgagaccgatttctacgactacaaggacgacgatgacaagactagtggctccggcgagggcagaggaagtctactaacctgcggagatgtggaagaaaatcctggcccacatatgaccgagtacaagcccacggtgcgcctcgccacccgcgacgacgtccccagggccgtacgcaccctcgccgccgcgttcgccgactaccccgccacgcgccacaccgtcgatccggaccgccacatcgagcgggtcaccgagctgcaagaactcttcctcacgcgcgtcgggctcgacatcggcaaggtgtgggtcgcggacgacggcgccgcggtggcggtctggaccacgccggagagcgtcgaagcgggggcggtgttcgccgagatcggcccgcgcatggccgagttgagcggttcccggctggccgcgcagcaacagatggaaggcctcctggcgccgcaccggcccaaggagcccgcgtggttcctggccaccgtcggcgtctcgcccgaccaccagggcaagggtctgggcagcgccgtcgtgctccccggagtggaggcggccgagcgcgccggggtgcccgccttcctggagacctccgcgccccgcaacctccccttctacgagcggctcggcttcaccgtcaccgccgacgtcgaggtgcccgaaggaccgcgcacctggtgcatgacccgcaagcccggtgcctga

SEQ ID NO: 1258 - DNA, 3000 bp, Artificial Sequence
  Synthetic Polynucleotides
atggccttaccagtgaccgccttgctcctgccgctggccttgctgctccacgccgccaggccggacatccagatgacacagagccctagcagcctgtctgccagcgtgggagatagagtgaccatcaactgcaaggccagccaggacatcaacagctacctgagctggttccagcagaagcctggcaaggcccctaagacactgatctaccgggccaacagactggtggatggcgtgccaagcagattttctggcagcggcagcggccaggattacaccctgacaatatccagcctccagcctgaggacttcgccacctactactgcctccagtacgacgagttccctctgacctttggcggaggcaccaaggtggaaatcaaaggcggaggcggaagtggaggcggaggatctggcggcggaggctctcaggtgcaactggtgcagtctggggccgaagtgaagaaacctggggcctctgtgaaggtgtcctgcaaagccagcggctacacctttaccaactacgacatcaactgggtccgacaggctccaggccaaggactggaatggatcggctggatctatcctggcgacggcagcaccaagtacaacgagaagttcaaggccaaggccacactgaccgccgataccagcacaagcaccgcctacatggaactgcggagcctgagaagcgacgacaccgccgtgtactattgtgcctccggctacgaggacgctatggactattggggccagggcaccaccgtgacagtgtctagtgccaagcctaccaccacaccagctccaagacctccaactcctgctcctacaatcgccagccagcctctgtctctcagacccgaagcctgtagacctgctgctggcggagctgtgcataccagaggactggatttcgcctgcgacatcacgcgtgagcagaaactgatctcggaagaggatctggcgaagcccaccacgacgccagcgccgcgaccaccaacaccggcgcccaccatcgcgtcgcagcccctgtccctgcgcccagaggcgtgccggccagcggcggggggcgcagtgcacacgagggggctggacttcgcctgtgacatctacatctgggcgcccttggccgggacttgtggggtccttctcctgtcactggttatcaccctttactgcaaacggggcagaaagaaactcctgtatatattcaaacaaccatttatgagaccagtacaaactactcaagaggaagatggctgtagctgccgatttccagaagaagaagaaggaggatgtgaactgagagtgaagttcagcaggagcgcagacgcccccgcgtaccagcagggccagaaccagctctataacgagctgaatctaggacgaagagaggagtacgatgttttggacaagagacgtggccgggaccctgagatggggggaaagccgagaaggaagaaccctcaggaaggcctgtacaatgaactgcagaaagataagatggcggaggcctacagtgagattgggatgaaaggcgagcgccggaggggcaaggggcacgatggcctttaccagggtctcagtacagccaccaaggacacctacgacgcccttcacatgcaggccctgccccctcgctctagaggatctggagcaacaaacttctcactactcaaacaagcaggtgacgtggaggagaatcccgggcctgggatccacatggccacttacgaggttctctgtgaggtggcgcggaaactgggcacggatgacagggaagtggtattgttcctcctaaacgtgttcatacctcaacccacactggcccaattaattggagctcttagagctttaaaggaggagggcaggttaacgtttcccctgttagcggaatgtctgtttcgtgcaggtcgcagagacctcttgcgcgacctgcttcacttagacccgcgttttttagagcgccacctagcgggcacaatgagttatttcagcccttatcagctcactgttctccacgtagacggggagctgtgtgcgagggatattaggtctttgatatttttaagcaaggacactatagggtctcgcagcacaccacagacattcttacactgggtgtactgtatggaaaacttagacctactgggtcccactgacgtggatgccctaatgtcaatgcttagatctttgtcaagagtagacctacagcgccaagtgcaaaccctaatgggccttcacctttccggcccatcacactcccaacactatcgccatacaccactcgagaccgatttctacgactacaaggacgacgatgacaagactagtggctccggcgagggcagaggaagtctactaacctgcggagatgtggaagaaaatcctggcccacatatgaccgagtacaagcccacggtgcgcctcgccacccgcgacgacgtccccagggccgtacgcaccctcgccgccgcgttcgccgactaccccgccacgcgccacaccgtcgatccggaccgccacatcgagcgggtcaccgagctgcaagaactcttcctcacgcgcgtcgggctcgacatcggcaaggtgtgggtcgcggacgacggcgccgcggtggcggtctggaccacgccggagagcgtcgaagcgggggcggtgttcgccgagatcggcccgcgcatggccgagttgagcggttcccggctggccgcgcagcaacagatggaaggcctcctggcgccgcaccggcccaaggagcccgcgtggttcctggccaccgtcggcgtctcgcccgaccaccagggcaagggtctgggcagcgccgtcgtgctccccggagtggaggcggccgagcgcgccggggtgcccgccttcctggagacctccgcgccccgcaacctccccttctacgagcggctcggcttcaccgtcaccgccgacgtcgaggtgcccgaaggaccgcgcacctggtgcatgacccgcaagcccggtgcctga

SEQ ID NO: 1259 - DNA, 2868 bp, Artificial Sequence
  Synthetic Polynucleotides
atggccttaccagtgaccgccttgctcctgccgctggccttgctgctccacgccgccaggccggagatcgtgctgacacagagccctctgagcctgcctgttacacctggcgagcctgccagcatctcctgtagaagctctcagagcctgctgcacagcaacggctacaactacctggactggtatctccagaagcctggacagagcccacagctcctgatctacctgggcgtgaactctgtgtccggcgtgcccgatagattttctggcagcggctctggcaccgacttcaccctgaagatcagcagagtggaagccgaggacgtgggcgtgtactactgtatgcaggccctccagacaccttggacattcggccagggcaccaaggtggaaatcaaaggcggcggaggatctggcggaggtggaagtggcggaggcggatctcaagtgcaactggttcagagcggagccgaagtgaagaaacctggcagcagcgtgaaggtgtcctgcaaagcctctggcggcatcttcagcaaccacgccatctcttgggtccgacaggctcctggacaaggactggaatggatgggcggcatcatccccatcttcggcacagccaattacgcccagaaattccagggcagagtgaccatcaccgccgacgagtctaccagcaccgccttcatggaactgagcagcctgagaagcgaggacaccgccgtgtactattgcgccagagaatgggccgacgtgttcgacatttggggccagggaacaatggtcaccgtgtcctctacgcgtgagcagaaactgatctcggaagaggatctggcgaagcccaccacgacgccagcgccgcgaccaccaacaccggcgcccaccatcgcgtcgcagcccctgtccctgcgcccagaggcgtgccggccagcggcggggggcgcagtgcacacgagggggctggacttcgcctgtgacatctacatctgggcgcccttggccgggacttgtggggtccttctcctgtcactggttatcaccctttactgcaaacggggcagaaagaaactcctgtatatattcaaacaaccatttatgagaccagtacaaactactcaagaggaagatggctgtagctgccgatttccagaagaagaagaaggaggatgtgaactgagagtgaagttcagcaggagcgcagacgcccccgcgtaccagcagggccagaaccagctctataacgagctgaatctaggacgaagagaggagtacgatgttttggacaagagacgtggccgggaccctgagatggggggaaagccgagaaggaagaaccctcaggaaggcctgtacaatgaactgcagaaagataagatggcggaggcctacagtgagattgggatgaaaggcgagcgccggaggggcaaggggcacgatggcctttaccagggtctcagtacagccaccaaggacacctacgacgcccttcacatgcaggccctgccccctcgctctagaggatctggagcaacaaacttctcactactcaaacaagcaggtgacgtggaggagaatcccgggcctgggatccacatggccacttacgaggttctctgtgaggtggcgcggaaactgggcacggatgacagggaagtggtattgttcctcctaaacgtgttcatacctcaacccacactggcccaattaattggagctcttagagctttaaaggaggagggcaggttaacgtttcccctgttagcggaatgtctgtttcgtgcaggtcgcagagacctcttgcgcgacctgcttcacttagacccgcgttttttagagcgccacctagcgggcacaatgagttatttcagcccttatcagctcactgttctccacgtagacggggagctgtgtgcgagggatattaggtctttgatatttttaagcaaggacactatagggtctcgcagcacaccacagacattcttacactgggtgtactgtatggaaaacttagacctactgggtcccactgacgtggatgccctaatgtcaatgcttagatctttgtcaagagtagacctacagcgccaagtgcaaaccctaatgggccttcacctttccggcccatcacactcccaacactatcgccatacaccactcgagaccgatttctacgactacaaggacgacgatgacaagactagtggctccggcgagggcagaggaagtctactaacctgcggagatgtggaagaaaatcctggcccacatatgaccgagtacaagcccacggtgcgcctcgccacccgcgacgacgtccccagggccgtacgcaccctcgccgccgcgttcgccgactaccccgccacgcgccacaccgtcgatccggaccgccacatcgagcgggtcaccgagctgcaagaactcttcctcacgcgcgtcgggctcgacatcggcaaggtgtgggtcgcggacgacggcgccgcggtggcggtctggaccacgccggagagcgtcgaagcgggggcggtgttcgccgagatcggcccgcgcatggccgagttgagcggttcccggctggccgcgcagcaacagatggaaggcctcctggcgccgcaccggcccaaggagcccgcgtggttcctggccaccgtcggcgtctcgcccgaccaccagggcaagggtctgggcagcgccgtcgtgctccccggagtggaggcggccgagcgcgccggggtgcccgccttcctggagacctccgcgccccgcaacctccccttctacgagcggctcggcttcaccgtcaccgccgacgtcgaggtgcccgaaggaccgcgcacctggtgcatgacccgcaagcccggtgcctga

SEQ ID NO: 1260 - DNA, 2865 bp, Artificial Sequence
  Synthetic Polynucleotides
atggccttaccagtgaccgccttgctcctgccgctggccttgctgctccacgccgccaggccggacatccagatgacacagtctccagccagcctgaccgtgtcactgggacagagagccaccatctcttgcagagccagcgagagcgtggacagctacggcaatagctacctgcactggtatcagcagaagcccggccagcctcctcagctcctgatctacctggcctccaatctggaaagcggcgtgccagccagattttctggcagcggcagcagaaccgacttcaccctgaccattgatcccgtggaagccgatgatgccgccacctactactgccagcagaacaacgaggacccctggacatttggcggaggcaccaaggtggaaatcaaaggcggcggaggatctggcggaggtggaagtggcggaggcggatctgaagttcagctccagcagagcggagccgagcttgtgaaacctggcgcttccgtgaagatgagctgcaaagccttcggctacaccttcaccacctttccaatcgagtggatgaagcagagccacggcaagagcctggaatggatcggcaactttcacccctacaacgaccagaccaagtacaacgaagagttcaagggcagagccaagctgaccatcgacagatccagcagcaccgtgtacctggaactgggcagactgacctccgatgacagcgccgtgtactactgtgccagaggctactactacgccttcgacttttggggccagggcaccacactgacagtgtctagcacgcgtgagcagaaactgatctcggaagaggatctggcgaagcccaccacgacgccagcgccgcgaccaccaacaccggcgcccaccatcgcgtcgcagcccctgtccctgcgcccagaggcgtgccggccagcggcggggggcgcagtgcacacgagggggctggacttcgcctgtgacatctacatctgggcgcccttggccgggacttgtggggtccttctcctgtcactggttatcaccctttactgcaaacggggcagaaagaaactcctgtatatattcaaacaaccatttatgagaccagtacaaactactcaagaggaagatggctgtagctgccgatttccagaagaagaagaaggaggatgtgaactgagagtgaagttcagcaggagcgcagacgcccccgcgtaccagcagggccagaaccagctctataacgagctgaatctaggacgaagagaggagtacgatgttttggacaagagacgtggccgggaccctgagatggggggaaagccgagaaggaagaaccctcaggaaggcctgtacaatgaactgcagaaagataagatggcggaggcctacagtgagattgggatgaaaggcgagcgccggaggggcaaggggcacgatggcctttaccagggtctcagtacagccaccaaggacacctacgacgcccttcacatgcaggccctgccccctcgctctagaggatctggagcaacaaacttctcactactcaaacaagcaggtgacgtggaggagaatcccgggcctgggatccacatggccacttacgaggttctctgtgaggtggcgcggaaactgggcacggatgacagggaagtggtattgttcctcctaaacgtgttcatacctcaacccacactggcccaattaattggagctcttagagctttaaaggaggagggcaggttaacgtttcccctgttagcggaatgtctgtttcgtgcaggtcgcagagacctcttgcgcgacctgcttcacttagacccgcgttttttagagcgccacctagcgggcacaatgagttatttcagcccttatcagctcactgttctccacgtagacggggagctgtgtgcgagggatattaggtctttgatatttttaagcaaggacactatagggtctcgcagcacaccacagacattcttacactgggtgtactgtatggaaaacttagacctactgggtcccactgacgtggatgccctaatgtcaatgcttagatctttgtcaagagtagacctacagcgccaagtgcaaaccctaatgggccttcacctttccggcccatcacactcccaacactatcgccatacaccactcgagaccgatttctacgactacaaggacgacgatgacaagactagtggctccggcgagggcagaggaagtctactaacctgcggagatgtggaagaaaatcctggcccacatatgaccgagtacaagcccacggtgcgcctcgccacccgcgacgacgtccccagggccgtacgcaccctcgccgccgcgttcgccgactaccccgccacgcgccacaccgtcgatccggaccgccacatcgagcgggtcaccgagctgcaagaactcttcctcacgcgcgtcgggctcgacatcggcaaggtgtgggtcgcggacgacggcgccgcggtggcggtctggaccacgccggagagcgtcgaagcgggggcggtgttcgccgagatcggcccgcgcatggccgagttgagcggttcccggctggccgcgcagcaacagatggaaggcctcctggcgccgcaccggcccaaggagcccgcgtggttcctggccaccgtcggcgtctcgcccgaccaccagggcaagggtctgggcagcgccgtcgtgctccccggagtggaggcggccgagcgcgccggggtgcccgccttcctggagacctccgcgccccgcaacctccccttctacgagcggctcggcttcaccgtcaccgccgacgtcgaggtgcccgaaggaccgcgcacctggtgcatgacccgcaagcccggtgcctga

SEQ ID NO: 1261 - DNA, 2856 bp, Artificial Sequence
  Synthetic Polynucleotides
atggccttaccagtgaccgccttgctcctgccgctggccttgctgctccacgccgccaggccggacatccagatgacacagagccctagcagcctgtctgccagcgtgggagacagagtgaccatcacctgtagagccagccagggcatcagaaacgacctcggctggtatcagcagaagcctggcaaggcccctaagcggctgatctatgccgcttcctctctgcaatctggcgtgcccagcagattttctggcagcggctctggcaccgagttcaccctgacaatatccagcctccagcctgaggacttcgccacctactactgcctccagcacaacagctacccctggacctttggacagggcaccaagctggaaatcaaaggcggaggcggaagtggaggcggaggatctggcggcggaggctctgaagtgcaactggttgaatctggcggcgctctgattcagcctggcggatctctgagactgagctgtgtggcctccggctttaccatcagcggcaactacatgagctgggtccgacaggcccctggcaaaggacttgaatgggtgtccctgatctacagcggcgacagcacctattacgccgacagcgtgaagggcagattcaccatcagccgggacatcagcaagaacaccgtgtacctccagatgaactccctgagagtggaagataccgccgtgtactactgcgtccgcgacggctactacgtgtccgatatggttgtgtggggcaagggcaccaccgtgacagtctcttctacgcgtgagcagaaactgatctcggaagaggatctggcgaagcccaccacgacgccagcgccgcgaccaccaacaccggcgcccaccatcgcgtcgcagcccctgtccctgcgcccagaggcgtgccggccagcggcggggggcgcagtgcacacgagggggctggacttcgcctgtgacatctacatctgggcgcccttggccgggacttgtggggtccttctcctgtcactggttatcaccctttactgcaaacggggcagaaagaaactcctgtatatattcaaacaaccatttatgagaccagtacaaactactcaagaggaagatggctgtagctgccgatttccagaagaagaagaaggaggatgtgaactgagagtgaagttcagcaggagcgcagacgcccccgcgtaccagcagggccagaaccagctctataacgagctgaatctaggacgaagagaggagtacgatgttttggacaagagacgtggccgggaccctgagatggggggaaagccgagaaggaagaaccctcaggaaggcctgtacaatgaactgcagaaagataagatggcggaggcctacagtgagattgggatgaaaggcgagcgccggaggggcaaggggcacgatggcctttaccagggtctcagtacagccaccaaggacacctacgacgcccttcacatgcaggccctgccccctcgctctagaggatctggagcaacaaacttctcactactcaaacaagcaggtgacgtggaggagaatcccgggcctgggatccacatggccacttacgaggttctctgtgaggtggcgcggaaactgggcacggatgacagggaagtggtattgttcctcctaaacgtgttcatacctcaacccacactggcccaattaattggagctcttagagctttaaaggaggagggcaggttaacgtttcccctgttagcggaatgtctgtttcgtgcaggtcgcagagacctcttgcgcgacctgcttcacttagacccgcgttttttagagcgccacctagcgggcacaatgagttatttcagcccttatcagctcactgttctccacgtagacggggagctgtgtgcgagggatattaggtctttgatatttttaagcaaggacactatagggtctcgcagcacaccacagacattcttacactgggtgtactgtatggaaaacttagacctactgggtcccactgacgtggatgccctaatgtcaatgcttagatctttgtcaagagtagacctacagcgccaagtgcaaaccctaatgggccttcacctttccggcccatcacactcccaacactatcgccatacaccactcgagaccgatttctacgactacaaggacgacgatgacaagactagtggctccggcgagggcagaggaagtctactaacctgcggagatgtggaagaaaatcctggcccacatatgaccgagtacaagcccacggtgcgcctcgccacccgcgacgacgtccccagggccgtacgcaccctcgccgccgcgttcgccgactaccccgccacgcgccacaccgtcgatccggaccgccacatcgagcgggtcaccgagctgcaagaactcttcctcacgcgcgtcgggctcgacatcggcaaggtgtgggtcgcggacgacggcgccgcggtggcggtctggaccacgccggagagcgtcgaagcgggggcggtgttcgccgagatcggcccgcgcatggccgagttgagcggttcccggctggccgcgcagcaacagatggaaggcctcctggcgccgcaccggcccaaggagcccgcgtggttcctggccaccgtcggcgtctcgcccgaccaccagggcaagggtctgggcagcgccgtcgtgctccccggagtggaggcggccgagcgcgccggggtgcccgccttcctggagacctccgcgccccgcaacctccccttctacgagcggctcggcttcaccgtcaccgccgacgtcgaggtgcccgaaggaccgcgcacctggtgcatgacccgcaagcccggtgcctga

SEQ ID NO: 1262 - DNA, 2886 bp, Artificial Sequence
  Synthetic Polynucleotides
atggccttaccagtgaccgccttgctcctgccgctggccttgctgctccacgccgccaggccggatgtgctgctgacccagagccctctgagcctgcctgtgacactgggacagcctgccagcatctcctgtcggagcagccagaccatcgtgcacagcaacggcaacacctacctggaatggttccagcagcggccaggccagagccccagactgctgatctaccaggtgtccaacagattcagcggcgtgcccgacagattctccggcagcggctctggcaccgacttcaccctgaagatcagccgggtggaagccgaggacgtgggcgtgtactactgttttcaaggcagccacgtgccccggacctttggcggaggaacaaaggtggaaatcaagagaggcggaggcggaagtggaggcggaggatctggcggcggaggctctcagatccaactggtgcagagcggcagcgagctgaagaaacctggggccagcgtgaaggtgtcctgcaaggccagcggctacacctttaccaactacggcatgaactgggtgcgccaggcccctggacagggcctgaaatggatgggctggatcaacaccaacaccggcgagcctaagtacgccgaagagttcaagggcagattcgccctgagcctggacaccagcgtgtccacagcctacctccagatcaacagcctgaaggccgaggataccgccgtgtacttctgcgccagaggctacggcaactacgccagaggggcttggctggcctattggggccagggaacactcgtgaccgtgtcctctacgcgtgagcagaaactgatctcggaagaggatctggcgaagcccaccacgacgccagcgccgcgaccaccaacaccggcgcccaccatcgcgtcgcagcccctgtccctgcgcccagaggcgtgccggccagcggcggggggcgcagtgcacacgagggggctggacttcgcctgtgacatctacatctgggcgcccttggccgggacttgtggggtccttctcctgtcactggttatcaccctttactgcaaacggggcagaaagaaactcctgtatatattcaaacaaccatttatgagaccagtacaaactactcaagaggaagatggctgtagctgccgatttccagaagaagaagaaggaggatgtgaactgagagtgaagttcagcaggagcgcagacgcccccgcgtaccagcagggccagaaccagctctataacgagctgaatctaggacgaagagaggagtacgatgttttggacaagagacgtggccgggaccctgagatggggggaaagccgagaaggaagaaccctcaggaaggcctgtacaatgaactgcagaaagataagatggcggaggcctacagtgagattgggatgaaaggcgagcgccggaggggcaaggggcacgatggcctttaccagggtctcagtacagccaccaaggacacctacgacgcccttcacatgcaggccctgccccctcgctctagaggatctggagcaacaaacttctcactactcaaacaagcaggtgacgtggaggagaatcccgggcctgggatccacatggccacttacgaggttctctgtgaggtggcgcggaaactgggcacggatgacagggaagtggtattgttcctcctaaacgtgttcatacctcaacccacactggcccaattaattggagctcttagagctttaaaggaggagggcaggttaacgtttcccctgttagcggaatgtctgtttcgtgcaggtcgcagagacctcttgcgcgacctgcttcacttagacccgcgttttttagagcgccacctagcgggcacaatgagttatttcagcccttatcagctcactgttctccacgtagacggggagctgtgtgcgagggatattaggtctttgatatttttaagcaaggacactatagggtctcgcagcacaccacagacattcttacactgggtgtactgtatggaaaacttagacctactgggtcccactgacgtggatgccctaatgtcaatgcttagatctttgtcaagagtagacctacagcgccaagtgcaaaccctaatgggccttcacctttccggcccatcacactcccaacactatcgccatacaccactcgagaccgatttctacgactacaaggacgacgatgacaagactagtggctccggcgagggcagaggaagtctactaacctgcggagatgtggaagaaaatcctggcccacatatgaccgagtacaagcccacggtgcgcctcgccacccgcgacgacgtccccagggccgtacgcaccctcgccgccgcgttcgccgactaccccgccacgcgccacaccgtcgatccggaccgccacatcgagcgggtcaccgagctgcaagaactcttcctcacgcgcgtcgggctcgacatcggcaaggtgtgggtcgcggacgacggcgccgcggtggcggtctggaccacgccggagagcgtcgaagcgggggcggtgttcgccgagatcggcccgcgcatggccgagttgagcggttcccggctggccgcgcagcaacagatggaaggcctcctggcgccgcaccggcccaaggagcccgcgtggttcctggccaccgtcggcgtctcgcccgaccaccagggcaagggtctgggcagcgccgtcgtgctccccggagtggaggcggccgagcgcgccggggtgcccgccttcctggagacctccgcgccccgcaacctccccttctacgagcggctcggcttcaccgtcaccgccgacgtcgaggtgcccgaaggaccgcgcacctggtgcatgacccgcaagcccggtgcctga

SEQ ID NO: 1263 - DNA, 2847 bp, Artificial Sequence
  Synthetic Polynucleotides
atggccttaccagtgaccgccttgctcctgccgctggccttgctgctccacgccgccaggccggacgagatcgtgctgacacagagccctgccacactctctctgagccctggcgaaagagccaccctgagctgtagcgccagcagcagcatcaactacatctactggctccagcagaagcccggccaggcccccagaatcctgatctacctgaccagcaacctggcctccggcgtgccagccagattttctggcagcggctccggcaccgacttcaccctgacaatcagcagcctggaacccgaggacttcgccgtgtactactgcctccagtggtccagcaaccccctgacctttggcggaggcaccaaggtggaaatcaagggcggaggcggaagtggaggcggaggatctggcggcggaggctctttcgaagtgcaactggtggaaagcgggggaggacttgtgaagcctggcggctctctgagactgagctgtgccgcctctggcttcaccttcagcagctacgacatgagctgggtgcgccaggctcctggcaagggactggaatgggtgtccaccatcagcagcggcggcagctacacctactacctggacagcatcaagggccggttcaccatctccagagacaacgccaagaacagcctgtacctccagatgaactccctgcgggccgaggacacagccgtgtattattgcgccagacagggcctggattactggggcagaggcacccttgtgaccgtgtcctctacgcgtgagcagaaactgatctcggaagaggatctggcgaagcccaccacgacgccagcgccgcgaccaccaacaccggcgcccaccatcgcgtcgcagcccctgtccctgcgcccagaggcgtgccggccagcggcggggggcgcagtgcacacgagggggctggacttcgcctgtgacatctacatctgggcgcccttggccgggacttgtggggtccttctcctgtcactggttatcaccctttactgcaaacggggcagaaagaaactcctgtatatattcaaacaaccatttatgagaccagtacaaactactcaagaggaagatggctgtagctgccgatttccagaagaagaagaaggaggatgtgaactgagagtgaagttcagcaggagcgcagacgcccccgcgtaccagcagggccagaaccagctctataacgagctgaatctaggacgaagagaggagtacgatgttttggacaagagacgtggccgggaccctgagatggggggaaagccgagaaggaagaaccctcaggaaggcctgtacaatgaactgcagaaagataagatggcggaggcctacagtgagattgggatgaaaggcgagcgccggaggggcaaggggcacgatggcctttaccagggtctcagtacagccaccaaggacacctacgacgcccttcacatgcaggccctgccccctcgctctagaggatctggagcaacaaacttctcactactcaaacaagcaggtgacgtggaggagaatcccgggcctgggatccacatggccacttacgaggttctctgtgaggtggcgcggaaactgggcacggatgacagggaagtggtattgttcctcctaaacgtgttcatacctcaacccacactggcccaattaattggagctcttagagctttaaaggaggagggcaggttaacgtttcccctgttagcggaatgtctgtttcgtgcaggtcgcagagacctcttgcgcgacctgcttcacttagacccgcgttttttagagcgccacctagcgggcacaatgagttatttcagcccttatcagctcactgttctccacgtagacggggagctgtgtgcgagggatattaggtctttgatatttttaagcaaggacactatagggtctcgcagcacaccacagacattcttacactgggtgtactgtatggaaaacttagacctactgggtcccactgacgtggatgccctaatgtcaatgcttagatctttgtcaagagtagacctacagcgccaagtgcaaaccctaatgggccttcacctttccggcccatcacactcccaacactatcgccatacaccactcgagaccgatttctacgactacaaggacgacgatgacaagactagtggctccggcgagggcagaggaagtctactaacctgcggagatgtggaagaaaatcctggcccacatatgaccgagtacaagcccacggtgcgcctcgccacccgcgacgacgtccccagggccgtacgcaccctcgccgccgcgttcgccgactaccccgccacgcgccacaccgtcgatccggaccgccacatcgagcgggtcaccgagctgcaagaactcttcctcacgcgcgtcgggctcgacatcggcaaggtgtgggtcgcggacgacggcgccgcggtggcggtctggaccacgccggagagcgtcgaagcgggggcggtgttcgccgagatcggcccgcgcatggccgagttgagcggttcccggctggccgcgcagcaacagatggaaggcctcctggcgccgcaccggcccaaggagcccgcgtggttcctggccaccgtcggcgtctcgcccgaccaccagggcaagggtctgggcagcgccgtcgtgctccccggagtggaggcggccgagcgcgccggggtgcccgccttcctggagacctccgcgccccgcaacctccccttctacgagcggctcggcttcaccgtcaccgccgacgtcgaggtgcccgaaggaccgcgcacctggtgcatgacccgcaagcccggtgcctga

SEQ ID NO: 1264 - DNA, 2871 bp, Artificial Sequence
  Synthetic Polynucleotides
atggccttaccagtgaccgccttgctcctgccgctggccttgctgctccacgccgccaggccggacatcgtgatgacccagagccccgatagcctggccgtgtctctgggagagagagccaccatcaactgccgggccagcaagagcgtgtccaccagcggctacagcttcatgcactggtatcagcagaagcccggccagccccccaagctgctgatctacctggcctccaacctggaaagcggcgtgcccgatagattcagcggcagcggctctggcaccgacttcaccctgaccatcagttctcttcaggccgaggacgtggccgtgtactactgccagcacagcagagaggtgccctggacattcggccagggcacaaaggtggaaatcaagcggggcggaggcggaagtggaggcggaggatctggcggcggaggctctcaggtgcagctggtgcagtctggggccgaagtgaagaaacctggggccagcgtgaaggtgtcctgcaaggccagcggatacacctttaccaactacggcatgaactgggtgcgccaggcccctggacagggcctggaatggatgggctggatcaacacctacaccggcgagcccacatacgccgacgccttcaagggcagattcgccttcagcctggacaccagcacctccaccgcctacctccagatcaacagcctgcggagcgacgacaccgccgtgtattattgcgccagagattacggcgactacgggatggactattggggccagggaaccaccgtgaccgtgtcctctacgcgtgagcagaaactgatctcggaagaggatctggcgaagcccaccacgacgccagcgccgcgaccaccaacaccggcgcccaccatcgcgtcgcagcccctgtccctgcgcccagaggcgtgccggccagcggcggggggcgcagtgcacacgagggggctggacttcgcctgtgacatctacatctgggcgcccttggccgggacttgtggggtccttctcctgtcactggttatcaccctttactgcaaacggggcagaaagaaactcctgtatatattcaaacaaccatttatgagaccagtacaaactactcaagaggaagatggctgtagctgccgatttccagaagaagaagaaggaggatgtgaactgagagtgaagttcagcaggagcgcagacgcccccgcgtaccagcagggccagaaccagctctataacgagctgaatctaggacgaagagaggagtacgatgttttggacaagagacgtggccgggaccctgagatggggggaaagccgagaaggaagaaccctcaggaaggcctgtacaatgaactgcagaaagataagatggcggaggcctacagtgagattgggatgaaaggcgagcgccggaggggcaaggggcacgatggcctttaccagggtctcagtacagccaccaaggacacctacgacgcccttcacatgcaggccctgccccctcgctctagaggatctggagcaacaaacttctcactactcaaacaagcaggtgacgtggaggagaatcccgggcctgggatccacatggccacttacgaggttctctgtgaggtggcgcggaaactgggcacggatgacagggaagtggtattgttcctcctaaacgtgttcatacctcaacccacactggcccaattaattggagctcttagagctttaaaggaggagggcaggttaacgtttcccctgttagcggaatgtctgtttcgtgcaggtcgcagagacctcttgcgcgacctgcttcacttagacccgcgttttttagagcgccacctagcgggcacaatgagttatttcagcccttatcagctcactgttctccacgtagacggggagctgtgtgcgagggatattaggtctttgatatttttaagcaaggacactatagggtctcgcagcacaccacagacattcttacactgggtgtactgtatggaaaacttagacctactgggtcccactgacgtggatgccctaatgtcaatgcttagatctttgtcaagagtagacctacagcgccaagtgcaaaccctaatgggccttcacctttccggcccatcacactcccaacactatcgccatacaccactcgagaccgatttctacgactacaaggacgacgatgacaagactagtggctccggcgagggcagaggaagtctactaacctgcggagatgtggaagaaaatcctggcccacatatgaccgagtacaagcccacggtgcgcctcgccacccgcgacgacgtccccagggccgtacgcaccctcgccgccgcgttcgccgactaccccgccacgcgccacaccgtcgatccggaccgccacatcgagcgggtcaccgagctgcaagaactcttcctcacgcgcgtcgggctcgacatcggcaaggtgtgggtcgcggacgacggcgccgcggtggcggtctggaccacgccggagagcgtcgaagcgggggcggtgttcgccgagatcggcccgcgcatggccgagttgagcggttcccggctggccgcgcagcaacagatggaaggcctcctggcgccgcaccggcccaaggagcccgcgtggttcctggccaccgtcggcgtctcgcccgaccaccagggcaagggtctgggcagcgccgtcgtgctccccggagtggaggcggccgagcgcgccggggtgcccgccttcctggagacctccgcgccccgcaacctccccttctacgagcggctcggcttcaccgtcaccgccgacgtcgaggtgcccgaaggaccgcgcacctggtgcatgacccgcaagcccggtgcctga

SEQ ID NO: 1265 - DNA, 2859 bp, Artificial Sequence
  Synthetic Polynucleotides
atggccttaccagtgaccgccttgctcctgccgctggccttgctgctccacgccgccaggccggacatcgtgatgacccagacccccctgaccctgagcgtgacaatcggacagcctgccagcatctcctgcaagagcagccagagcctgctggacagcgacggcaagacctacctgaactggctgctgcagaggccaggccagagccccgagagactgatctacctggtgtccaagctggactccggcgtgcccgatagattcacaggcagcggctccggcaccgacttcaccctgaagatcagccgggtggaagccgaggacctgggcgtgtactgttgttggcagggcacccacttcccttacaccttcggcggagggaccaaggtggaaatcaagggcggcggaggcggaagtggaggcggaggatctggcggcggaggctctcaggtgcaactgcagcagcctggcgctgaacttgtgcggccaggcgcctctgtgaagctgagctgtaaagccagcggctacaccttcaccagctactggatgaactgggtcaagcagcgcccaggccagggcctggaatggatcggaatgatcgaccccagcgacagcgagacacactacaaccacatcttcaaggacaaggccaccctgaccgtggacaagtccagcagcacagcctacctgcaactgtccagcctgaccagcgaggacagcgccgtgtactactgcgcccggaacctgtatctgtggggccagggaacaagcgtgaccgtgtctagcacgcgtgagcagaaactgatctcggaagaggatctggcgaagcccaccacgacgccagcgccgcgaccaccaacaccggcgcccaccatcgcgtcgcagcccctgtccctgcgcccagaggcgtgccggccagcggcggggggcgcagtgcacacgagggggctggacttcgcctgtgacatctacatctgggcgcccttggccgggacttgtggggtccttctcctgtcactggttatcaccctttactgcaaacggggcagaaagaaactcctgtatatattcaaacaaccatttatgagaccagtacaaactactcaagaggaagatggctgtagctgccgatttccagaagaagaagaaggaggatgtgaactgagagtgaagttcagcaggagcgcagacgcccccgcgtaccagcagggccagaaccagctctataacgagctgaatctaggacgaagagaggagtacgatgttttggacaagagacgtggccgggaccctgagatggggggaaagccgagaaggaagaaccctcaggaaggcctgtacaatgaactgcagaaagataagatggcggaggcctacagtgagattgggatgaaaggcgagcgccggaggggcaaggggcacgatggcctttaccagggtctcagtacagccaccaaggacacctacgacgcccttcacatgcaggccctgccccctcgctctagaggatctggagcaacaaacttctcactactcaaacaagcaggtgacgtggaggagaatcccgggcctgggatccacatggccacttacgaggttctctgtgaggtggcgcggaaactgggcacggatgacagggaagtggtattgttcctcctaaacgtgttcatacctcaacccacactggcccaattaattggagctcttagagctttaaaggaggagggcaggttaacgtttcccctgttagcggaatgtctgtttcgtgcaggtcgcagagacctcttgcgcgacctgcttcacttagacccgcgttttttagagcgccacctagcgggcacaatgagttatttcagcccttatcagctcactgttctccacgtagacggggagctgtgtgcgagggatattaggtctttgatatttttaagcaaggacactatagggtctcgcagcacaccacagacattcttacactgggtgtactgtatggaaaacttagacctactgggtcccactgacgtggatgccctaatgtcaatgcttagatctttgtcaagagtagacctacagcgccaagtgcaaaccctaatgggccttcacctttccggcccatcacactcccaacactatcgccatacaccactcgagaccgatttctacgactacaaggacgacgatgacaagactagtggctccggcgagggcagaggaagtctactaacctgcggagatgtggaagaaaatcctggcccacatatgaccgagtacaagcccacggtgcgcctcgccacccgcgacgacgtccccagggccgtacgcaccctcgccgccgcgttcgccgactaccccgccacgcgccacaccgtcgatccggaccgccacatcgagcgggtcaccgagctgcaagaactcttcctcacgcgcgtcgggctcgacatcggcaaggtgtgggtcgcggacgacggcgccgcggtggcggtctggaccacgccggagagcgtcgaagcgggggcggtgttcgccgagatcggcccgcgcatggccgagttgagcggttcccggctggccgcgcagcaacagatggaaggcctcctggcgccgcaccggcccaaggagcccgcgtggttcctggccaccgtcggcgtctcgcccgaccaccagggcaagggtctgggcagcgccgtcgtgctccccggagtggaggcggccgagcgcgccggggtgcccgccttcctggagacctccgcgccccgcaacctccccttctacgagcggctcggcttcaccgtcaccgccgacgtcgaggtgcccgaaggaccgcgcacctggtgcatgacccgcaagcccggtgcctga

SEQ ID NO: 1266 - DNA, 2871 bp, Artificial Sequence
  Synthetic Polynucleotides
atggccttaccagtgaccgccttgctcctgccgctggccttgctgctccacgccgccaggccggacgacatccagttgacccagtcccccagctcactcagcgccagtgtgggggaccgggtgaccattacctgtaaagccagtcagagtgtggactatgagggggatagcttcctgaattggtatcagcagaagcctggcaaagccccaaagctgctgatctacgctgcatctaatctggagtcaggcgtgccttctaggttctccggtagtgggtctgggaccgatttcacattgaccatttcatccctccaacccgaggatttcgctacatattactgtcagcagtccaatgaggaccctctcacctttggccagggcaccaaagttgaaattaagagaggcggaggcggaagtggaggcggaggatctggcggcggaggctctgaagtccaacttgtggagtctggagggggcctggtgcagcccggcggctctctcagactgtcttgtgcggcaagcggctacaccttcagctcttactggatagaatgggtgaggcaggcacctggaaagggactggagtggattggagagattctgccaggagggggagatacaaattacaatgaaatcttcaaggggcgggccaccttttcagcggataccagcaagaatacagcttacctgcagatgaatagcctccgggcagaagataccgctgtttattattgcacgagacgggtgccaataagactggactattgggggcaagggactcttgtcaccgtcagttcaacgcgtgagcagaaactgatctcggaagaggatctggcgaagcccaccacgacgccagcgccgcgaccaccaacaccggcgcccaccatcgcgtcgcagcccctgtccctgcgcccagaggcgtgccggccagcggcggggggcgcagtgcacacgagggggctggacttcgcctgtgacatctacatctgggcgcccttggccgggacttgtggggtccttctcctgtcactggttatcaccctttactgcaaacggggcagaaagaaactcctgtatatattcaaacaaccatttatgagaccagtacaaactactcaagaggaagatggctgtagctgccgatttccagaagaagaagaaggaggatgtgaactgagagtgaagttcagcaggagcgcagacgcccccgcgtaccagcagggccagaaccagctctataacgagctgaatctaggacgaagagaggagtacgatgttttggacaagagacgtggccgggaccctgagatggggggaaagccgagaaggaagaaccctcaggaaggcctgtacaatgaactgcagaaagataagatggcggaggcctacagtgagattgggatgaaaggcgagcgccggaggggcaaggggcacgatggcctttaccagggtctcagtacagccaccaaggacacctacgacgcccttcacatgcaggccctgccccctcgctctagaggatctggagcaacaaacttctcactactcaaacaagcaggtgacgtggaggagaatcccgggcctgggatccacatggccacttacgaggttctctgtgaggtggcgcggaaactgggcacggatgacagggaagtggtattgttcctcctaaacgtgttcatacctcaacccacactggcccaattaattggagctcttagagctttaaaggaggagggcaggttaacgtttcccctgttagcggaatgtctgtttcgtgcaggtcgcagagacctcttgcgcgacctgcttcacttagacccgcgttttttagagcgccacctagcgggcacaatgagttatttcagcccttatcagctcactgttctccacgtagacggggagctgtgtgcgagggatattaggtctttgatatttttaagcaaggacactatagggtctcgcagcacaccacagacattcttacactgggtgtactgtatggaaaacttagacctactgggtcccactgacgtggatgccctaatgtcaatgcttagatctttgtcaagagtagacctacagcgccaagtgcaaaccctaatgggccttcacctttccggcccatcacactcccaacactatcgccatacaccactcgagaccgatttctacgactacaaggacgacgatgacaagactagtggctccggcgagggcagaggaagtctactaacctgcggagatgtggaagaaaatcctggcccacatatgaccgagtacaagcccacggtgcgcctcgccacccgcgacgacgtccccagggccgtacgcaccctcgccgccgcgttcgccgactaccccgccacgcgccacaccgtcgatccggaccgccacatcgagcgggtcaccgagctgcaagaactcttcctcacgcgcgtcgggctcgacatcggcaaggtgtgggtcgcggacgacggcgccgcggtggcggtctggaccacgccggagagcgtcgaagcgggggcggtgttcgccgagatcggcccgcgcatggccgagttgagcggttcccggctggccgcgcagcaacagatggaaggcctcctggcgccgcaccggcccaaggagcccgcgtggttcctggccaccgtcggcgtctcgcccgaccaccagggcaagggtctgggcagcgccgtcgtgctccccggagtggaggcggccgagcgcgccggggtgcccgccttcctggagacctccgcgccccgcaacctccccttctacgagcggctcggcttcaccgtcaccgccgacgtcgaggtgcccgaaggaccgcgcacctggtgcatgacccgcaagcccggtgcctga

SEQ ID NO: 1267 - DNA, 2859 bp, Artificial Sequence
  Synthetic Polynucleotides
atggccttaccagtgaccgccttgctcctgccgctggccttgctgctccacgccgccaggccggacatcgtgatgacccagacacctctgagcctgagcgtgacacctggacagcctgccagcattagctgcaagagcagccagtctctgctggacggcgacggcaagacctacctgaattggctgctccagaagcctggacagagccctcagcggctgatctacctggtgtccaagctggatagcggcgtgcccgatagattttctggcagcggctctggcaccgacttcaccctgaagatcagcagagtggaagccgaggacgtgggcgtgtactactgttggcagggcacacacttccccagaacattcggccagggcacaaagctggaaatcaaaggcggaggcggaagtggaggcggaggatctggcggcggaggctctcaagtgcaactggttcagagcggagccgaagtgaagaaacctggggcctctgtgaaggtgtcctgcaaggccagcggctacaccttcaaggacacctacatccactgggtccgacaggcccctggacaaggacttgagtggatgggcagaatcgaccccgccaacggcaacaccaaatacgaccccaagttccagggcagagtgaccatgaccagagacaccagcatcagcaccgcctacatggaactgagccggctgagatccgatgacaccgccgtgtactattgcgctagaagaggcggagtggattggggccagggaacactggttaccgtgtctagtacgcgtgagcagaaactgatctcggaagaggatctggcgaagcccaccacgacgccagcgccgcgaccaccaacaccggcgcccaccatcgcgtcgcagcccctgtccctgcgcccagaggcgtgccggccagcggcggggggcgcagtgcacacgagggggctggacttcgcctgtgacatctacatctgggcgcccttggccgggacttgtggggtccttctcctgtcactggttatcaccctttactgcaaacggggcagaaagaaactcctgtatatattcaaacaaccatttatgagaccagtacaaactactcaagaggaagatggctgtagctgccgatttccagaagaagaagaaggaggatgtgaactgagagtgaagttcagcaggagcgcagacgcccccgcgtaccagcagggccagaaccagctctataacgagctgaatctaggacgaagagaggagtacgatgttttggacaagagacgtggccgggaccctgagatggggggaaagccgagaaggaagaaccctcaggaaggcctgtacaatgaactgcagaaagataagatggcggaggcctacagtgagattgggatgaaaggcgagcgccggaggggcaaggggcacgatggcctttaccagggtctcagtacagccaccaaggacacctacgacgcccttcacatgcaggccctgccccctcgctctagaggatctggagcaacaaacttctcactactcaaacaagcaggtgacgtggaggagaatcccgggcctgggatccacatggccacttacgaggttctctgtgaggtggcgcggaaactgggcacggatgacagggaagtggtattgttcctcctaaacgtgttcatacctcaacccacactggcccaattaattggagctcttagagctttaaaggaggagggcaggttaacgtttcccctgttagcggaatgtctgtttcgtgcaggtcgcagagacctcttgcgcgacctgcttcacttagacccgcgttttttagagcgccacctagcgggcacaatgagttatttcagcccttatcagctcactgttctccacgtagacggggagctgtgtgcgagggatattaggtctttgatatttttaagcaaggacactatagggtctcgcagcacaccacagacattcttacactgggtgtactgtatggaaaacttagacctactgggtcccactgacgtggatgccctaatgtcaatgcttagatctttgtcaagagtagacctacagcgccaagtgcaaaccctaatgggccttcacctttccggcccatcacactcccaacactatcgccatacaccactcgagaccgatttctacgactacaaggacgacgatgacaagactagtggctccggcgagggcagaggaagtctactaacctgcggagatgtggaagaaaatcctggcccacatatgaccgagtacaagcccacggtgcgcctcgccacccgcgacgacgtccccagggccgtacgcaccctcgccgccgcgttcgccgactaccccgccacgcgccacaccgtcgatccggaccgccacatcgagcgggtcaccgagctgcaagaactcttcctcacgcgcgtcgggctcgacatcggcaaggtgtgggtcgcggacgacggcgccgcggtggcggtctggaccacgccggagagcgtcgaagcgggggcggtgttcgccgagatcggcccgcgcatggccgagttgagcggttcccggctggccgcgcagcaacagatggaaggcctcctggcgccgcaccggcccaaggagcccgcgtggttcctggccaccgtcggcgtctcgcccgaccaccagggcaagggtctgggcagcgccgtcgtgctccccggagtggaggcggccgagcgcgccggggtgcccgccttcctggagacctccgcgccccgcaacctccccttctacgagcggctcggcttcaccgtcaccgccgacgtcgaggtgcccgaaggaccgcgcacctggtgcatgacccgcaagcccggtgcctga

SEQ ID NO: 1268 - DNA, 2883 bp, Artificial Sequence
  Synthetic Polynucleotides
atggccttaccagtgaccgccttgctcctgccgctggccttgctgctccacgccgccaggccggacatcgtgatgacccagagccccgatagcctggccgtgtctctgggagagagagccaccatcaactgcgagagcagccagagcctgctgaacagcggcaaccagaagaactacctgacctggtatcagcagaagcccggccagccccccaagcccctgatctattgggccagcaccagagaaagcggcgtgcccgatagattcagcggcagcggaagcggcaccgacttcaccctgaccatcagttctcttcaggccgaggacgtggccgtgtactactgccagaacgactacagctacccctacaccttcggccagggcaccaagctggaaatcaagagaggcggaggcggaagtggaggcggaggatctggcggcggaggctctgaagtgcagctggtgcagtctggggccgaagtgaagaagcctggcgagagcctgaagatcagctgcaagggcagcggctacagcttcaccgactactacatgaagtgggccagacagatgcccggcaagggcctggaatggatgggcgacatcatccccagcaacggggccaccttctacaaccagaaattcaagggccaagtgaccatctccgccgacaagagcatcagcaccacctacctccagtggtccagcctgaaggccagcgacaccgccatgtactattgcgccagaagccatctgctgcgggccagttggttcgcctattggggccagggaacaatggtcacagtgtccagcacgcgtgagcagaaactgatctcggaagaggatctggcgaagcccaccacgacgccagcgccgcgaccaccaacaccggcgcccaccatcgcgtcgcagcccctgtccctgcgcccagaggcgtgccggccagcggcggggggcgcagtgcacacgagggggctggacttcgcctgtgacatctacatctgggcgcccttggccgggacttgtggggtccttctcctgtcactggttatcaccctttactgcaaacggggcagaaagaaactcctgtatatattcaaacaaccatttatgagaccagtacaaactactcaagaggaagatggctgtagctgccgatttccagaagaagaagaaggaggatgtgaactgagagtgaagttcagcaggagcgcagacgcccccgcgtaccagcagggccagaaccagctctataacgagctgaatctaggacgaagagaggagtacgatgttttggacaagagacgtggccgggaccctgagatggggggaaagccgagaaggaagaaccctcaggaaggcctgtacaatgaactgcagaaagataagatggcggaggcctacagtgagattgggatgaaaggcgagcgccggaggggcaaggggcacgatggcctttaccagggtctcagtacagccaccaaggacacctacgacgcccttcacatgcaggccctgccccctcgctctagaggatctggagcaacaaacttctcactactcaaacaagcaggtgacgtggaggagaatcccgggcctgggatccacatggccacttacgaggttctctgtgaggtggcgcggaaactgggcacggatgacagggaagtggtattgttcctcctaaacgtgttcatacctcaacccacactggcccaattaattggagctcttagagctttaaaggaggagggcaggttaacgtttcccctgttagcggaatgtctgtttcgtgcaggtcgcagagacctcttgcgcgacctgcttcacttagacccgcgttttttagagcgccacctagcgggcacaatgagttatttcagcccttatcagctcactgttctccacgtagacggggagctgtgtgcgagggatattaggtctttgatatttttaagcaaggacactatagggtctcgcagcacaccacagacattcttacactgggtgtactgtatggaaaacttagacctactgggtcccactgacgtggatgccctaatgtcaatgcttagatctttgtcaagagtagacctacagcgccaagtgcaaaccctaatgggccttcacctttccggcccatcacactcccaacactatcgccatacaccactcgagaccgatttctacgactacaaggacgacgatgacaagactagtggctccggcgagggcagaggaagtctactaacctgcggagatgtggaagaaaatcctggcccacatatgaccgagtacaagcccacggtgcgcctcgccacccgcgacgacgtccccagggccgtacgcaccctcgccgccgcgttcgccgactaccccgccacgcgccacaccgtcgatccggaccgccacatcgagcgggtcaccgagctgcaagaactcttcctcacgcgcgtcgggctcgacatcggcaaggtgtgggtcgcggacgacggcgccgcggtggcggtctggaccacgccggagagcgtcgaagcgggggcggtgttcgccgagatcggcccgcgcatggccgagttgagcggttcccggctggccgcgcagcaacagatggaaggcctcctggcgccgcaccggcccaaggagcccgcgtggttcctggccaccgtcggcgtctcgcccgaccaccagggcaagggtctgggcagcgccgtcgtgctccccggagtggaggcggccgagcgcgccggggtgcccgccttcctggagacctccgcgccccgcaacctccccttctacgagcggctcggcttcaccgtcaccgccgacgtcgaggtgcccgaaggaccgcgcacctggtgcatgacccgcaagcccggtgcctga

SEQ ID NO: 1269 - DNA, 2868 bp, Artificial Sequence
  Synthetic Polynucleotides
atggccttaccagtgaccgccttgctcctgccgctggccttgctgctccacgccgccaggccggacatcgtgctgacacagagccctgcttctctggccgtgtctctgggacagagagccaccatcagctgtagagccagcgagagcgtggacaactacggcaacaccttcatgcactggtatcagcagaagcccggccagcctcctaagctgctgatctacagagccagcaacctggaaagcggcatccccgccagattttctggcagcggcagcagaaccgacttcaccctgaccatcaatcccgtggaagccgacgacgtggcaacctactactgccagcagagcaacgaggaccctcctacatttggagccggcaccaagctggaactgaaaggcggaggcggaagtggaggcggaggatctggcggcggaggctctcagattcagctggtgcagtctggccccgagctgaagaaacctggcgagacagtgaagatcagctgcaaggccagcggctacatcttcaccaattacggcatgaactgggtcaagcaggcccctggcaagagcttcaagtggatgggctggatcaacacctacaccggcgagagcacatacagcgccgacttcaagggcagattcgccttcagcctggaaaccagcgccagcacagcctacctgcacatcaacgacctgaagaacgaggacaccgccacctacttttgcgccagaagcggcggctacgaccctatggattattggggccagggcaccagcgtgaccgtttcttctacgcgtgagcagaaactgatctcggaagaggatctggcgaagcccaccacgacgccagcgccgcgaccaccaacaccggcgcccaccatcgcgtcgcagcccctgtccctgcgcccagaggcgtgccggccagcggcggggggcgcagtgcacacgagggggctggacttcgcctgtgacatctacatctgggcgcccttggccgggacttgtggggtccttctcctgtcactggttatcaccctttactgcaaacggggcagaaagaaactcctgtatatattcaaacaaccatttatgagaccagtacaaactactcaagaggaagatggctgtagctgccgatttccagaagaagaagaaggaggatgtgaactgagagtgaagttcagcaggagcgcagacgcccccgcgtaccagcagggccagaaccagctctataacgagctgaatctaggacgaagagaggagtacgatgttttggacaagagacgtggccgggaccctgagatggggggaaagccgagaaggaagaaccctcaggaaggcctgtacaatgaactgcagaaagataagatggcggaggcctacagtgagattgggatgaaaggcgagcgccggaggggcaaggggcacgatggcctttaccagggtctcagtacagccaccaaggacacctacgacgcccttcacatgcaggccctgccccctcgctctagaggatctggagcaacaaacttctcactactcaaacaagcaggtgacgtggaggagaatcccgggcctgggatccacatggccacttacgaggttctctgtgaggtggcgcggaaactgggcacggatgacagggaagtggtattgttcctcctaaacgtgttcatacctcaacccacactggcccaattaattggagctcttagagctttaaaggaggagggcaggttaacgtttcccctgttagcggaatgtctgtttcgtgcaggtcgcagagacctcttgcgcgacctgcttcacttagacccgcgttttttagagcgccacctagcgggcacaatgagttatttcagcccttatcagctcactgttctccacgtagacggggagctgtgtgcgagggatattaggtctttgatatttttaagcaaggacactatagggtctcgcagcacaccacagacattcttacactgggtgtactgtatggaaaacttagacctactgggtcccactgacgtggatgccctaatgtcaatgcttagatctttgtcaagagtagacctacagcgccaagtgcaaaccctaatgggccttcacctttccggcccatcacactcccaacactatcgccatacaccactcgagaccgatttctacgactacaaggacgacgatgacaagactagtggctccggcgagggcagaggaagtctactaacctgcggagatgtggaagaaaatcctggcccacatatgaccgagtacaagcccacggtgcgcctcgccacccgcgacgacgtccccagggccgtacgcaccctcgccgccgcgttcgccgactaccccgccacgcgccacaccgtcgatccggaccgccacatcgagcgggtcaccgagctgcaagaactcttcctcacgcgcgtcgggctcgacatcggcaaggtgtgggtcgcggacgacggcgccgcggtggcggtctggaccacgccggagagcgtcgaagcgggggcggtgttcgccgagatcggcccgcgcatggccgagttgagcggttcccggctggccgcgcagcaacagatggaaggcctcctggcgccgcaccggcccaaggagcccgcgtggttcctggccaccgtcggcgtctcgcccgaccaccagggcaagggtctgggcagcgccgtcgtgctccccggagtggaggcggccgagcgcgccggggtgcccgccttcctggagacctccgcgccccgcaacctccccttctacgagcggctcggcttcaccgtcaccgccgacgtcgaggtgcccgaaggaccgcgcacctggtgcatgacccgcaagcccggtgcctga

SEQ ID NO: 1270 - DNA, 2880 bp, Artificial Sequence
  Synthetic Polynucleotides
atggccttaccagtgaccgccttgctcctgccgctggccttgctgctccacgccgccaggccggacttcgtgatgacacagagccctgatagcctggccgtgtctctcggcgagcgagtgaccatgagctgcaagtctagccagagcctgctgaacagcggcaaccagaagaactacctgacctggtatcagcagaagcccggccagcctcctaagctgctgatctactgggccagcaccagagaaagcggcgtgcccgatagattttctggctctggcagcggcaccgacttcaccctgacaatttctagcctgcaagccgaggacgtggccgtgtactactgccagaacgactacagctacccctacaccttcggccagggcaccaagctggaaatcaaaggcggaggcggaagtggaggcggaggatctggcggcggaggctctgaagtgcaactggttcagagcggagccgagctgaagaaacctggggccagcgtgaaggtgtcctgtaaagccagcggctacacctttaccgactactacatgaaatgggtccgacaggccccaggccagggactcgaatggatcggcgatattatccccagcaacggggccaccttctacaaccagaaattcaagggccgcgtgaccatcaccgtggacaagagcacaagcaccgcctacatggaactgagcagcctgagaagcgaggacaccgccgtgtattattgcgccagaagccatctgctgcgggccagttggttcgcctattggggacagggaaccctggtcaccgttagctctacgcgtgagcagaaactgatctcggaagaggatctggcgaagcccaccacgacgccagcgccgcgaccaccaacaccggcgcccaccatcgcgtcgcagcccctgtccctgcgcccagaggcgtgccggccagcggcggggggcgcagtgcacacgagggggctggacttcgcctgtgacatctacatctgggcgcccttggccgggacttgtggggtccttctcctgtcactggttatcaccctttactgcaaacggggcagaaagaaactcctgtatatattcaaacaaccatttatgagaccagtacaaactactcaagaggaagatggctgtagctgccgatttccagaagaagaagaaggaggatgtgaactgagagtgaagttcagcaggagcgcagacgcccccgcgtaccagcagggccagaaccagctctataacgagctgaatctaggacgaagagaggagtacgatgttttggacaagagacgtggccgggaccctgagatggggggaaagccgagaaggaagaaccctcaggaaggcctgtacaatgaactgcagaaagataagatggcggaggcctacagtgagattgggatgaaaggcgagcgccggaggggcaaggggcacgatggcctttaccagggtctcagtacagccaccaaggacacctacgacgcccttcacatgcaggccctgccccctcgctctagaggatctggagcaacaaacttctcactactcaaacaagcaggtgacgtggaggagaatcccgggcctgggatccacatggccacttacgaggttctctgtgaggtggcgcggaaactgggcacggatgacagggaagtggtattgttcctcctaaacgtgttcatacctcaacccacactggcccaattaattggagctcttagagctttaaaggaggagggcaggttaacgtttcccctgttagcggaatgtctgtttcgtgcaggtcgcagagacctcttgcgcgacctgcttcacttagacccgcgttttttagagcgccacctagcgggcacaatgagttatttcagcccttatcagctcactgttctccacgtagacggggagctgtgtgcgagggatattaggtctttgatatttttaagcaaggacactatagggtctcgcagcacaccacagacattcttacactgggtgtactgtatggaaaacttagacctactgggtcccactgacgtggatgccctaatgtcaatgcttagatctttgtcaagagtagacctacagcgccaagtgcaaaccctaatgggccttcacctttccggcccatcacactcccaacactatcgccatacaccactcgagaccgatttctacgactacaaggacgacgatgacaagactagtggctccggcgagggcagaggaagtctactaacctgcggagatgtggaagaaaatcctggcccacatatgaccgagtacaagcccacggtgcgcctcgccacccgcgacgacgtccccagggccgtacgcaccctcgccgccgcgttcgccgactaccccgccacgcgccacaccgtcgatccggaccgccacatcgagcgggtcaccgagctgcaagaactcttcctcacgcgcgtcgggctcgacatcggcaaggtgtgggtcgcggacgacggcgccgcggtggcggtctggaccacgccggagagcgtcgaagcgggggcggtgttcgccgagatcggcccgcgcatggccgagttgagcggttcccggctggccgcgcagcaacagatggaaggcctcctggcgccgcaccggcccaaggagcccgcgtggttcctggccaccgtcggcgtctcgcccgaccaccagggcaagggtctgggcagcgccgtcgtgctccccggagtggaggcggccgagcgcgccggggtgcccgccttcctggagacctccgcgccccgcaacctccccttctacgagcggctcggcttcaccgtcaccgccgacgtcgaggtgcccgaaggaccgcgcacctggtgcatgacccgcaagcccggtgcctga

SEQ ID NO: 1271 - DNA, 2880 bp, Artificial Sequence
  Synthetic Polynucleotides
atggccttaccagtgaccgccttgctcctgccgctggccttgctgctccacgccgccaggccggacttcgtgatgacacagagccctgatagcctggccgtgtctctcggcgagcgagtgaccatgagctgcaagtctagccagagcctgctgaacagcggcaaccagaagaactacctgacctggtatcagcagaagcccggccagcctcctaagctgctgatctactgggccagcaccagagaaagcggcgtgcccgatagattttctggctctggcagcggcaccgacttcaccctgacaatttctagcctgcaagccgaggacgtggccgtgtactactgccagaacgactacagctacccctacaccttcggccagggcaccaagctggaaatcaaaggcggaggcggaagtggaggcggaggatctggcggcggaggctctcaagtgcaactggttcagagcggagccgagctgaagaaacctggggccagcgtgaaggtgtcctgtaaagccagcggctacacctttaccgactactacatgaaatgggtccgacaggccccaggccagggactcgaatggatcggcgatattatccccagcaacggggccaccttctacaaccagaaattcaagggccgcgtgaccatcaccgtggacaagagcacaagcaccgcctacatggaactgagcagcctgagaagcgaggacaccgccgtgtattattgcgccagaagccatctgctgcgggccagttggttcgcctattggggacagggaaccctggtcaccgttagctctacgcgtgagcagaaactgatctcggaagaggatctggcgaagcccaccacgacgccagcgccgcgaccaccaacaccggcgcccaccatcgcgtcgcagcccctgtccctgcgcccagaggcgtgccggccagcggcggggggcgcagtgcacacgagggggctggacttcgcctgtgacatctacatctgggcgcccttggccgggacttgtggggtccttctcctgtcactggttatcaccctttactgcaaacggggcagaaagaaactcctgtatatattcaaacaaccatttatgagaccagtacaaactactcaagaggaagatggctgtagctgccgatttccagaagaagaagaaggaggatgtgaactgagagtgaagttcagcaggagcgcagacgcccccgcgtaccagcagggccagaaccagctctataacgagctgaatctaggacgaagagaggagtacgatgttttggacaagagacgtggccgggaccctgagatggggggaaagccgagaaggaagaaccctcaggaaggcctgtacaatgaactgcagaaagataagatggcggaggcctacagtgagattgggatgaaaggcgagcgccggaggggcaaggggcacgatggcctttaccagggtctcagtacagccaccaaggacacctacgacgcccttcacatgcaggccctgccccctcgctctagaggatctggagcaacaaacttctcactactcaaacaagcaggtgacgtggaggagaatcccgggcctgggatccacatggccacttacgaggttctctgtgaggtggcgcggaaactgggcacggatgacagggaagtggtattgttcctcctaaacgtgttcatacctcaacccacactggcccaattaattggagctcttagagctttaaaggaggagggcaggttaacgtttcccctgttagcggaatgtctgtttcgtgcaggtcgcagagacctcttgcgcgacctgcttcacttagacccgcgttttttagagcgccacctagcgggcacaatgagttatttcagcccttatcagctcactgttctccacgtagacggggagctgtgtgcgagggatattaggtctttgatatttttaagcaaggacactatagggtctcgcagcacaccacagacattcttacactgggtgtactgtatggaaaacttagacctactgggtcccactgacgtggatgccctaatgtcaatgcttagatctttgtcaagagtagacctacagcgccaagtgcaaaccctaatgggccttcacctttccggcccatcacactcccaacactatcgccatacaccactcgagaccgatttctacgactacaaggacgacgatgacaagactagtggctccggcgagggcagaggaagtctactaacctgcggagatgtggaagaaaatcctggcccacatatgaccgagtacaagcccacggtgcgcctcgccacccgcgacgacgtccccagggccgtacgcaccctcgccgccgcgttcgccgactaccccgccacgcgccacaccgtcgatccggaccgccacatcgagcgggtcaccgagctgcaagaactcttcctcacgcgcgtcgggctcgacatcggcaaggtgtgggtcgcggacgacggcgccgcggtggcggtctggaccacgccggagagcgtcgaagcgggggcggtgttcgccgagatcggcccgcgcatggccgagttgagcggttcccggctggccgcgcagcaacagatggaaggcctcctggcgccgcaccggcccaaggagcccgcgtggttcctggccaccgtcggcgtctcgcccgaccaccagggcaagggtctgggcagcgccgtcgtgctccccggagtggaggcggccgagcgcgccggggtgcccgccttcctggagacctccgcgccccgcaacctccccttctacgagcggctcggcttcaccgtcaccgccgacgtcgaggtgcccgaaggaccgcgcacctggtgcatgacccgcaagcccggtgcctga

SEQ ID NO: 1272 - DNA, 2862 bp, Artificial Sequence
  Synthetic Polynucleotides
atggccttaccagtgaccgccttgctcctgccgctggccttgctgctccacgccgccaggccggagatcgtgctgacacagagccctggcacactgtcactgtctccaggcgaaagagccacactgagctgtagagccagccagagcgtgtccagctcttacctggcttggtatcagcagaagcccggacaggctcccagactgctgatctacggtgcctctagcagagccacaggcatccccgatagattttctggcagcggctccggcaccgacttcaccctgacaatcagcagactggaacccgaggacttcgccgtgtactactgccagcaggactacggcttcccttggacctttggacagggcaccaaggtggaaatcaagagaggcggaggcggaagtggaggcggaggatctggcggcggaggctctgaagttcaactggttcagagcggagccgaagtgaagaagcctggcgagagcctgaagattagctgcaaaggctccggctactccttcaccagctactggatctcttgggtccgacagatgcccggcaaaggactggaatggatgggcatcatcgaccccagcgacagcgacaccagatacagccctagcttccagggccaagtgaccatcagcgccgacaagagcatcagcacagcctacctccagtggtcctctctgaaggccagcgataccgccatgtactattgcgccagaggcgacggcagcaccgacctggattattggggacagggaaccctggtcaccgtgtctagtacgcgtgagcagaaactgatctcggaagaggatctggcgaagcccaccacgacgccagcgccgcgaccaccaacaccggcgcccaccatcgcgtcgcagcccctgtccctgcgcccagaggcgtgccggccagcggcggggggcgcagtgcacacgagggggctggacttcgcctgtgacatctacatctgggcgcccttggccgggacttgtggggtccttctcctgtcactggttatcaccctttactgcaaacggggcagaaagaaactcctgtatatattcaaacaaccatttatgagaccagtacaaactactcaagaggaagatggctgtagctgccgatttccagaagaagaagaaggaggatgtgaactgagagtgaagttcagcaggagcgcagacgcccccgcgtaccagcagggccagaaccagctctataacgagctgaatctaggacgaagagaggagtacgatgttttggacaagagacgtggccgggaccctgagatggggggaaagccgagaaggaagaaccctcaggaaggcctgtacaatgaactgcagaaagataagatggcggaggcctacagtgagattgggatgaaaggcgagcgccggaggggcaaggggcacgatggcctttaccagggtctcagtacagccaccaaggacacctacgacgcccttcacatgcaggccctgccccctcgctctagaggatctggagcaacaaacttctcactactcaaacaagcaggtgacgtggaggagaatcccgggcctgggatccacatggccacttacgaggttctctgtgaggtggcgcggaaactgggcacggatgacagggaagtggtattgttcctcctaaacgtgttcatacctcaacccacactggcccaattaattggagctcttagagctttaaaggaggagggcaggttaacgtttcccctgttagcggaatgtctgtttcgtgcaggtcgcagagacctcttgcgcgacctgcttcacttagacccgcgttttttagagcgccacctagcgggcacaatgagttatttcagcccttatcagctcactgttctccacgtagacggggagctgtgtgcgagggatattaggtctttgatatttttaagcaaggacactatagggtctcgcagcacaccacagacattcttacactgggtgtactgtatggaaaacttagacctactgggtcccactgacgtggatgccctaatgtcaatgcttagatctttgtcaagagtagacctacagcgccaagtgcaaaccctaatgggccttcacctttccggcccatcacactcccaacactatcgccatacaccactcgagaccgatttctacgactacaaggacgacgatgacaagactagtggctccggcgagggcagaggaagtctactaacctgcggagatgtggaagaaaatcctggcccacatatgaccgagtacaagcccacggtgcgcctcgccacccgcgacgacgtccccagggccgtacgcaccctcgccgccgcgttcgccgactaccccgccacgcgccacaccgtcgatccggaccgccacatcgagcgggtcaccgagctgcaagaactcttcctcacgcgcgtcgggctcgacatcggcaaggtgtgggtcgcggacgacggcgccgcggtggcggtctggaccacgccggagagcgtcgaagcgggggcggtgttcgccgagatcggcccgcgcatggccgagttgagcggttcccggctggccgcgcagcaacagatggaaggcctcctggcgccgcaccggcccaaggagcccgcgtggttcctggccaccgtcggcgtctcgcccgaccaccagggcaagggtctgggcagcgccgtcgtgctccccggagtggaggcggccgagcgcgccggggtgcccgccttcctggagacctccgcgccccgcaacctccccttctacgagcggctcggcttcaccgtcaccgccgacgtcgaggtgcccgaaggaccgcgcacctggtgcatgacccgcaagcccggtgcctga

SEQ ID NO: 1273 - DNA, 2868 bp, Artificial Sequence
  Synthetic Polynucleotides
atggccttaccagtgaccgccttgctcctgccgctggccttgctgctccacgccgccaggccgcagttcgtgctgacacagcctccaagcgtgtccaccaatcctggcagcacagtgaagctgagctgcaagagaaacaccggcaacatcggcagcaactacgtgaactggtatcagcagaagcccggacagagccccaccaccatgatctacagagatgacaagaggcccgacggcgtgcccgatagattttccggctctatcgacagaagcagcaacagcgccctgctgaccatcaacaacgtgcagacagaggacgaggccgactacttctgccagagctacagcagcggcatcaacatcatcttcggcggaggcaccaagctgacagttcttggcggaggcggaagtggaggcggaggatctggcggcggaggctctcaagtgcagctccaagaatctggccctggcctggtcaagcctagcgagacactgagcctgacctgtaccgtgtccggctttagcctgaccacctacgacgtgcactgggtccgacaacctccaggcaaaggactggaatggatgggcagaatccagaacgccggcatcaccgactacaatagcgccctgaagtcccggctgattatctccagagacaccagcaagagccaggtgttcctgaagatgaacagcgtgaccaccgccgacaccgccatgtacttttgtgccaagaccggcagctacttctacgccttcgatcactggggccagggcacactggttaccgtttcttctacgcgtgagcagaaactgatctcggaagaggatctggcgaagcccaccacgacgccagcgccgcgaccaccaacaccggcgcccaccatcgcgtcgcagcccctgtccctgcgcccagaggcgtgccggccagcggcggggggcgcagtgcacacgagggggctggacttcgcctgtgacatctacatctgggcgcccttggccgggacttgtggggtccttctcctgtcactggttatcaccctttactgcaaacggggcagaaagaaactcctgtatatattcaaacaaccatttatgagaccagtacaaactactcaagaggaagatggctgtagctgccgatttccagaagaagaagaaggaggatgtgaactgagagtgaagttcagcaggagcgcagacgcccccgcgtaccagcagggccagaaccagctctataacgagctgaatctaggacgaagagaggagtacgatgttttggacaagagacgtggccgggaccctgagatggggggaaagccgagaaggaagaaccctcaggaaggcctgtacaatgaactgcagaaagataagatggcggaggcctacagtgagattgggatgaaaggcgagcgccggaggggcaaggggcacgatggcctttaccagggtctcagtacagccaccaaggacacctacgacgcccttcacatgcaggccctgccccctcgctctagaggatctggagcaacaaacttctcactactcaaacaagcaggtgacgtggaggagaatcccgggcctgggatccacatggccacttacgaggttctctgtgaggtggcgcggaaactgggcacggatgacagggaagtggtattgttcctcctaaacgtgttcatacctcaacccacactggcccaattaattggagctcttagagctttaaaggaggagggcaggttaacgtttcccctgttagcggaatgtctgtttcgtgcaggtcgcagagacctcttgcgcgacctgcttcacttagacccgcgttttttagagcgccacctagcgggcacaatgagttatttcagcccttatcagctcactgttctccacgtagacggggagctgtgtgcgagggatattaggtctttgatatttttaagcaaggacactatagggtctcgcagcacaccacagacattcttacactgggtgtactgtatggaaaacttagacctactgggtcccactgacgtggatgccctaatgtcaatgcttagatctttgtcaagagtagacctacagcgccaagtgcaaaccctaatgggccttcacctttccggcccatcacactcccaacactatcgccatacaccactcgagaccgatttctacgactacaaggacgacgatgacaagactagtggctccggcgagggcagaggaagtctactaacctgcggagatgtggaagaaaatcctggcccacatatgaccgagtacaagcccacggtgcgcctcgccacccgcgacgacgtccccagggccgtacgcaccctcgccgccgcgttcgccgactaccccgccacgcgccacaccgtcgatccggaccgccacatcgagcgggtcaccgagctgcaagaactcttcctcacgcgcgtcgggctcgacatcggcaaggtgtgggtcgcggacgacggcgccgcggtggcggtctggaccacgccggagagcgtcgaagcgggggcggtgttcgccgagatcggcccgcgcatggccgagttgagcggttcccggctggccgcgcagcaacagatggaaggcctcctggcgccgcaccggcccaaggagcccgcgtggttcctggccaccgtcggcgtctcgcccgaccaccagggcaagggtctgggcagcgccgtcgtgctccccggagtggaggcggccgagcgcgccggggtgcccgccttcctggagacctccgcgccccgcaacctccccttctacgagcggctcggcttcaccgtcaccgccgacgtcgaggtgcccgaaggaccgcgcacctggtgcatgacccgcaagcccggtgcctga

SEQ ID NO: 1274 - DNA, 2859 bp, Artificial Sequence
  Synthetic Polynucleotides
atggccttaccagtgaccgccttgctcctgccgctggccttgctgctccacgccgccaggccggacatccagatgacacagtctccagccagcctgtctgcctctctgggagagacagtgaccatcgagtgcagacccagcgaggacatccacagcaacgtggcctggtatcagcagaagcccggcaattctccccagctgctgatctacgacgccagcaatctggctgatggcgtgcccagcagattttctggcagcggctctggcacacagtacagcctgaagatcaacagcctccagagcgaggacgtggcctcctacttctgccaccagtacaacatctacccctacaccttcggcagcggcaccaagctggaacttaaaggcggaggcggaagtggaggcggaggatctggcggcggaggctctcaagttcagctgcaagagtctggccccacactggtcaagcctggcgatagcgtgaagatgagctgcaaggccagcggctacacctttaccgactacatcatccactgggtcaagcagagccacggcaagagcctggaatggatcggctacatcaacccttacagcgacggcaccaactacaacgagaagttcaagagcaaggccacactgaccgtggacaagagcaccagcacagcctacatggaattttcccggctgacctccgaggacagcgccatctatttctgcgccctgaactacggcagctactacgctatggatgcctggggccagggcacaagcgtgacagtttcttctacgcgtgagcagaaactgatctcggaagaggatctggcgaagcccaccacgacgccagcgccgcgaccaccaacaccggcgcccaccatcgcgtcgcagcccctgtccctgcgcccagaggcgtgccggccagcggcggggggcgcagtgcacacgagggggctggacttcgcctgtgacatctacatctgggcgcccttggccgggacttgtggggtccttctcctgtcactggttatcaccctttactgcaaacggggcagaaagaaactcctgtatatattcaaacaaccatttatgagaccagtacaaactactcaagaggaagatggctgtagctgccgatttccagaagaagaagaaggaggatgtgaactgagagtgaagttcagcaggagcgcagacgcccccgcgtaccagcagggccagaaccagctctataacgagctgaatctaggacgaagagaggagtacgatgttttggacaagagacgtggccgggaccctgagatggggggaaagccgagaaggaagaaccctcaggaaggcctgtacaatgaactgcagaaagataagatggcggaggcctacagtgagattgggatgaaaggcgagcgccggaggggcaaggggcacgatggcctttaccagggtctcagtacagccaccaaggacacctacgacgcccttcacatgcaggccctgccccctcgctctagaggatctggagcaacaaacttctcactactcaaacaagcaggtgacgtggaggagaatcccgggcctgggatccacatggccacttacgaggttctctgtgaggtggcgcggaaactgggcacggatgacagggaagtggtattgttcctcctaaacgtgttcatacctcaacccacactggcccaattaattggagctcttagagctttaaaggaggagggcaggttaacgtttcccctgttagcggaatgtctgtttcgtgcaggtcgcagagacctcttgcgcgacctgcttcacttagacccgcgttttttagagcgccacctagcgggcacaatgagttatttcagcccttatcagctcactgttctccacgtagacggggagctgtgtgcgagggatattaggtctttgatatttttaagcaaggacactatagggtctcgcagcacaccacagacattcttacactgggtgtactgtatggaaaacttagacctactgggtcccactgacgtggatgccctaatgtcaatgcttagatctttgtcaagagtagacctacagcgccaagtgcaaaccctaatgggccttcacctttccggcccatcacactcccaacactatcgccatacaccactcgagaccgatttctacgactacaaggacgacgatgacaagactagtggctccggcgagggcagaggaagtctactaacctgcggagatgtggaagaaaatcctggcccacatatgaccgagtacaagcccacggtgcgcctcgccacccgcgacgacgtccccagggccgtacgcaccctcgccgccgcgttcgccgactaccccgccacgcgccacaccgtcgatccggaccgccacatcgagcgggtcaccgagctgcaagaactcttcctcacgcgcgtcgggctcgacatcggcaaggtgtgggtcgcggacgacggcgccgcggtggcggtctggaccacgccggagagcgtcgaagcgggggcggtgttcgccgagatcggcccgcgcatggccgagttgagcggttcccggctggccgcgcagcaacagatggaaggcctcctggcgccgcaccggcccaaggagcccgcgtggttcctggccaccgtcggcgtctcgcccgaccaccagggcaagggtctgggcagcgccgtcgtgctccccggagtggaggcggccgagcgcgccggggtgcccgccttcctggagacctccgcgccccgcaacctccccttctacgagcggctcggcttcaccgtcaccgccgacgtcgaggtgcccgaaggaccgcgcacctggtgcatgacccgcaagcccggtgcctga

SEQ ID NO: 1275 - DNA, 2862 bp, Artificial Sequence
  Synthetic Polynucleotides
atggccttaccagtgaccgccttgctcctgccgctggccttgctgctccacgccgccaggccggagatcgtgctgacacagtctcccgccacactgtcactgtctccaggcgaaagagccacactgagctgtagagccagccagagcgtgtcctcttacctggcctggtatcagcagaagcctggacaggctccccggctgctgatctacgatgccagcaatagagccacaggcatccccgccagattttctggctctggcagcggcaccgatttcaccctgaccataagcagcctggaacctgaggacttcgccgtgtactactgccagcagagaagcaactggcccctgacctttggacagggcaccaaggtggaaatcaagagaggcggaggcggaagtggaggcggaggatctggcggcggaggctctgaagttcagctccttgagagtggtggcggcctggttcaacctggcggatctctgagactgtcttgtgccgccagcggcttcacctttagcggctattggatgcactgggtccgacaggcccctggcaaaggacttgaatgggtgtccgccatcagaagcgacggcagcagcaagtactacgccgactctgtgaagggcagattcaccatcagccgggacaacagcaagaacaccctgtacctccagatgaacagcctgagagccgaggacacagccgtgtattattgcgccaaggacggcgtgatcgaggacacctttgattactggggccagggcaccctggtcaccgtttcttctacgcgtgagcagaaactgatctcggaagaggatctggcgaagcccaccacgacgccagcgccgcgaccaccaacaccggcgcccaccatcgcgtcgcagcccctgtccctgcgcccagaggcgtgccggccagcggcggggggcgcagtgcacacgagggggctggacttcgcctgtgacatctacatctgggcgcccttggccgggacttgtggggtccttctcctgtcactggttatcaccctttactgcaaacggggcagaaagaaactcctgtatatattcaaacaaccatttatgagaccagtacaaactactcaagaggaagatggctgtagctgccgatttccagaagaagaagaaggaggatgtgaactgagagtgaagttcagcaggagcgcagacgcccccgcgtaccagcagggccagaaccagctctataacgagctgaatctaggacgaagagaggagtacgatgttttggacaagagacgtggccgggaccctgagatggggggaaagccgagaaggaagaaccctcaggaaggcctgtacaatgaactgcagaaagataagatggcggaggcctacagtgagattgggatgaaaggcgagcgccggaggggcaaggggcacgatggcctttaccagggtctcagtacagccaccaaggacacctacgacgcccttcacatgcaggccctgccccctcgctctagaggatctggagcaacaaacttctcactactcaaacaagcaggtgacgtggaggagaatcccgggcctgggatccacatggccacttacgaggttctctgtgaggtggcgcggaaactgggcacggatgacagggaagtggtattgttcctcctaaacgtgttcatacctcaacccacactggcccaattaattggagctcttagagctttaaaggaggagggcaggttaacgtttcccctgttagcggaatgtctgtttcgtgcaggtcgcagagacctcttgcgcgacctgcttcacttagacccgcgttttttagagcgccacctagcgggcacaatgagttatttcagcccttatcagctcactgttctccacgtagacggggagctgtgtgcgagggatattaggtctttgatatttttaagcaaggacactatagggtctcgcagcacaccacagacattcttacactgggtgtactgtatggaaaacttagacctactgggtcccactgacgtggatgccctaatgtcaatgcttagatctttgtcaagagtagacctacagcgccaagtgcaaaccctaatgggccttcacctttccggcccatcacactcccaacactatcgccatacaccactcgagaccgatttctacgactacaaggacgacgatgacaagactagtggctccggcgagggcagaggaagtctactaacctgcggagatgtggaagaaaatcctggcccacatatgaccgagtacaagcccacggtgcgcctcgccacccgcgacgacgtccccagggccgtacgcaccctcgccgccgcgttcgccgactaccccgccacgcgccacaccgtcgatccggaccgccacatcgagcgggtcaccgagctgcaagaactcttcctcacgcgcgtcgggctcgacatcggcaaggtgtgggtcgcggacgacggcgccgcggtggcggtctggaccacgccggagagcgtcgaagcgggggcggtgttcgccgagatcggcccgcgcatggccgagttgagcggttcccggctggccgcgcagcaacagatggaaggcctcctggcgccgcaccggcccaaggagcccgcgtggttcctggccaccgtcggcgtctcgcccgaccaccagggcaagggtctgggcagcgccgtcgtgctccccggagtggaggcggccgagcgcgccggggtgcccgccttcctggagacctccgcgccccgcaacctccccttctacgagcggctcggcttcaccgtcaccgccgacgtcgaggtgcccgaaggaccgcgcacctggtgcatgacccgcaagcccggtgcctga

SEQ ID NO: 1276 - DNA, 2850 bp, Artificial Sequence
  Synthetic Polynucleotides
atggccttaccagtgaccgccttgctcctgccgctggccttgctgctccacgccgccaggccggacgtgcagatcacacagagccctagctacctggctgcctctcctggcgagacaatcaccatcaactgtcgggccagcaagagcatcagcaaggacctggcctggtatcaagagaagcccggcaagaccaacaagctgctgatctacagcggcagcacactccagtctggcatccccagcagattttccggctctggcagcggcaccgatttcaccctgaccataagcagcctggaacctgaggacttcgccatgtactactgccagcagcacaacaagtacccctacacctttggcggaggcaccaagctggaaatcaagagaggcggaggcggaagtggaggcggaggatctggcggcggaggctctcaagttcaactgcaacagcctggggccgagcttgttagacctggcgcttctgtgaagctgagctgcaaggccagcggctacaccttcaccagctactggatgaactgggtcaagcagcggcctgaccagggcctcgaatggatcggcagaatcgacccctacgacagcgagacacactacaaccagaagttcaaggacaaggccatcctgaccgtggacaagagcagctccaccgcctacatgcaactgagcagcctgacctctgaggatagcgccgtgtactattgcgccagaggcaactgggacgactattggggccagggcacaaccctgacagtgtctagtacgcgtgagcagaaactgatctcggaagaggatctggcgaagcccaccacgacgccagcgccgcgaccaccaacaccggcgcccaccatcgcgtcgcagcccctgtccctgcgcccagaggcgtgccggccagcggcggggggcgcagtgcacacgagggggctggacttcgcctgtgacatctacatctgggcgcccttggccgggacttgtggggtccttctcctgtcactggttatcaccctttactgcaaacggggcagaaagaaactcctgtatatattcaaacaaccatttatgagaccagtacaaactactcaagaggaagatggctgtagctgccgatttccagaagaagaagaaggaggatgtgaactgagagtgaagttcagcaggagcgcagacgcccccgcgtaccagcagggccagaaccagctctataacgagctgaatctaggacgaagagaggagtacgatgttttggacaagagacgtggccgggaccctgagatggggggaaagccgagaaggaagaaccctcaggaaggcctgtacaatgaactgcagaaagataagatggcggaggcctacagtgagattgggatgaaaggcgagcgccggaggggcaaggggcacgatggcctttaccagggtctcagtacagccaccaaggacacctacgacgcccttcacatgcaggccctgccccctcgctctagaggatctggagcaacaaacttctcactactcaaacaagcaggtgacgtggaggagaatcccgggcctgggatccacatggccacttacgaggttctctgtgaggtggcgcggaaactgggcacggatgacagggaagtggtattgttcctcctaaacgtgttcatacctcaacccacactggcccaattaattggagctcttagagctttaaaggaggagggcaggttaacgtttcccctgttagcggaatgtctgtttcgtgcaggtcgcagagacctcttgcgcgacctgcttcacttagacccgcgttttttagagcgccacctagcgggcacaatgagttatttcagcccttatcagctcactgttctccacgtagacggggagctgtgtgcgagggatattaggtctttgatatttttaagcaaggacactatagggtctcgcagcacaccacagacattcttacactgggtgtactgtatggaaaacttagacctactgggtcccactgacgtggatgccctaatgtcaatgcttagatctttgtcaagagtagacctacagcgccaagtgcaaaccctaatgggccttcacctttccggcccatcacactcccaacactatcgccatacaccactcgagaccgatttctacgactacaaggacgacgatgacaagactagtggctccggcgagggcagaggaagtctactaacctgcggagatgtggaagaaaatcctggcccacatatgaccgagtacaagcccacggtgcgcctcgccacccgcgacgacgtccccagggccgtacgcaccctcgccgccgcgttcgccgactaccccgccacgcgccacaccgtcgatccggaccgccacatcgagcgggtcaccgagctgcaagaactcttcctcacgcgcgtcgggctcgacatcggcaaggtgtgggtcgcggacgacggcgccgcggtggcggtctggaccacgccggagagcgtcgaagcgggggcggtgttcgccgagatcggcccgcgcatggccgagttgagcggttcccggctggccgcgcagcaacagatggaaggcctcctggcgccgcaccggcccaaggagcccgcgtggttcctggccaccgtcggcgtctcgcccgaccaccagggcaagggtctgggcagcgccgtcgtgctccccggagtggaggcggccgagcgcgccggggtgcccgccttcctggagacctccgcgccccgcaacctccccttctacgagcggctcggcttcaccgtcaccgccgacgtcgaggtgcccgaaggaccgcgcacctggtgcatgacccgcaagcccggtgcctga

SEQ ID NO: 1277 - DNA, 2943 bp, Artificial Sequence
  Synthetic Polynucleotides
atggccttaccagtgaccgccttgctcctgccgctggccttgctgctccacgccgccaggccgtacatcaacatctacaacgccgagcctgccaatcctagcgagaagaacagccccacacagtacgcctacggcagcggagaattcgacatccagatgacacagtctccagccagcctgtctgcctctctgggagagacagtgaccatcgagtgccggaccagcaaggacatctacagcaacctggcctggttccagcaagagcccggcaattctcctcagctcctgatctacgacgccagcaatctggctgatggcgtgcccagcagattttctggcagcggctctggcacacagtacagcctccagatcaacaacctccagagcgaggacgtggcctcctacttctgccaccagtacaacaactacccctacaccttcggcaccggcaccaagctggaacttaaaggcggaggcggaagtggaggcggaggatctggcggcggaggctctcaagtgcagctccaagagtctggccccacactggtcaatcctggcgacagcgtgaagatgagctgcaaggccagcggctacacctttaccgaccacatcatccactgggtcaagcagagccacggcaagagcctggaatggatcggctacatcaacccctatagcggcggagccaactacaacggcaagttcaagagcaaggccacactgacaatcgacaagagcagcagcaccgcctacatggaattttccagactgaccagcggcgactccgccatctactactgcgccctgaattacggcagctactacgctatggatgcctggggccagggcacaagcgtgacagtttcttctacgcgtgagcagaaactgatctcggaagaggatctggcgaagcccaccacgacgccagcgccgcgaccaccaacaccggcgcccaccatcgcgtcgcagcccctgtccctgcgcccagaggcgtgccggccagcggcggggggcgcagtgcacacgagggggctggacttcgcctgtgacatctacatctgggcgcccttggccgggacttgtggggtccttctcctgtcactggttatcaccctttactgcaaacggggcagaaagaaactcctgtatatattcaaacaaccatttatgagaccagtacaaactactcaagaggaagatggctgtagctgccgatttccagaagaagaagaaggaggatgtgaactgagagtgaagttcagcaggagcgcagacgcccccgcgtaccagcagggccagaaccagctctataacgagctgaatctaggacgaagagaggagtacgatgttttggacaagagacgtggccgggaccctgagatggggggaaagccgagaaggaagaaccctcaggaaggcctgtacaatgaactgcagaaagataagatggcggaggcctacagtgagattgggatgaaaggcgagcgccggaggggcaaggggcacgatggcctttaccagggtctcagtacagccaccaaggacacctacgacgcccttcacatgcaggccctgccccctcgctctagaggatctggagcaacaaacttctcactactcaaacaagcaggtgacgtggaggagaatcccgggcctgggatccacatggccacttacgaggttctctgtgaggtggcgcggaaactgggcacggatgacagggaagtggtattgttcctcctaaacgtgttcatacctcaacccacactggcccaattaattggagctcttagagctttaaaggaggagggcaggttaacgtttcccctgttagcggaatgtctgtttcgtgcaggtcgcagagacctcttgcgcgacctgcttcacttagacccgcgttttttagagcgccacctagcgggcacaatgagttatttcagcccttatcagctcactgttctccacgtagacggggagctgtgtgcgagggatattaggtctttgatatttttaagcaaggacactatagggtctcgcagcacaccacagacattcttacactgggtgtactgtatggaaaacttagacctactgggtcccactgacgtggatgccctaatgtcaatgcttagatctttgtcaagagtagacctacagcgccaagtgcaaaccctaatgggccttcacctttccggcccatcacactcccaacactatcgccatacaccactcgagaccgatttctacgactacaaggacgacgatgacaagactagtggctccggcgagggcagaggaagtctactaacctgcggagatgtggaagaaaatcctggcccacatatgaccgagtacaagcccacggtgcgcctcgccacccgcgacgacgtccccagggccgtacgcaccctcgccgccgcgttcgccgactaccccgccacgcgccacaccgtcgatccggaccgccacatcgagcgggtcaccgagctgcaagaactcttcctcacgcgcgtcgggctcgacatcggcaaggtgtgggtcgcggacgacggcgccgcggtggcggtctggaccacgccggagagcgtcgaagcgggggcggtgttcgccgagatcggcccgcgcatggccgagttgagcggttcccggctggccgcgcagcaacagatggaaggcctcctggcgccgcaccggcccaaggagcccgcgtggttcctggccaccgtcggcgtctcgcccgaccaccagggcaagggtctgggcagcgccgtcgtgctccccggagtggaggcggccgagcgcgccggggtgcccgccttcctggagacctccgcgccccgcaacctccccttctacgagcggctcggcttcaccgtcaccgccgacgtcgaggtgcccgaaggaccgcgcacctggtgcatgacccgcaagcccggtgcctga

SEQ ID NO: 1278 - DNA, 2856 bp, Artificial Sequence
  Synthetic Polynucleotides
atggccttaccagtgaccgccttgctcctgccgctggccttgctgctccacgccgccaggccggagatcgtgctgacacagagccctaccagcatgacagcctctccaggcgagcaagtgaccatcacctgtagagccagcagcagcatcaactacatgcactggtatcagcagaagcctggcgcaagccccagaccttggatctacgagacaagcaagctggcctccggcgtgcccgatagattttctggatctgccagcggcaccagctacagcctgaccatcaacaacatggaagccgaggacgccgccacctactactgccagcagtggaattacccctcctggacctttggcggaggcaccaagctggaacttaaaggcggaggcggaagtggaggcggaggatctggcggcggaggctctgaagtgcagctcgttgagtctggtggcggactggttcagcctggaagaagcctgaagctgagctgtgccgccagcggcttcaccttcagcgactacaatatggcctgggtccgacaggcccctaagaaaggactggaatgggtcgccaccatcctgtacgatggcggcagaacctactaccggggcagcgtgaagggcagattcaccatcagcagagacaacgccaagagcaccctgtacctgcggatggactctctgagaagcgaggataccgccacatattactgtgccacacacagccggggcaccgactactttgattattggggccagggcgtgatggttaccgtgtctagtacgcgtgagcagaaactgatctcggaagaggatctggcgaagcccaccacgacgccagcgccgcgaccaccaacaccggcgcccaccatcgcgtcgcagcccctgtccctgcgcccagaggcgtgccggccagcggcggggggcgcagtgcacacgagggggctggacttcgcctgtgacatctacatctgggcgcccttggccgggacttgtggggtccttctcctgtcactggttatcaccctttactgcaaacggggcagaaagaaactcctgtatatattcaaacaaccatttatgagaccagtacaaactactcaagaggaagatggctgtagctgccgatttccagaagaagaagaaggaggatgtgaactgagagtgaagttcagcaggagcgcagacgcccccgcgtaccagcagggccagaaccagctctataacgagctgaatctaggacgaagagaggagtacgatgttttggacaagagacgtggccgggaccctgagatggggggaaagccgagaaggaagaaccctcaggaaggcctgtacaatgaactgcagaaagataagatggcggaggcctacagtgagattgggatgaaaggcgagcgccggaggggcaaggggcacgatggcctttaccagggtctcagtacagccaccaaggacacctacgacgcccttcacatgcaggccctgccccctcgctctagaggatctggagcaacaaacttctcactactcaaacaagcaggtgacgtggaggagaatcccgggcctgggatccacatggccacttacgaggttctctgtgaggtggcgcggaaactgggcacggatgacagggaagtggtattgttcctcctaaacgtgttcatacctcaacccacactggcccaattaattggagctcttagagctttaaaggaggagggcaggttaacgtttcccctgttagcggaatgtctgtttcgtgcaggtcgcagagacctcttgcgcgacctgcttcacttagacccgcgttttttagagcgccacctagcgggcacaatgagttatttcagcccttatcagctcactgttctccacgtagacggggagctgtgtgcgagggatattaggtctttgatatttttaagcaaggacactatagggtctcgcagcacaccacagacattcttacactgggtgtactgtatggaaaacttagacctactgggtcccactgacgtggatgccctaatgtcaatgcttagatctttgtcaagagtagacctacagcgccaagtgcaaaccctaatgggccttcacctttccggcccatcacactcccaacactatcgccatacaccactcgagaccgatttctacgactacaaggacgacgatgacaagactagtggctccggcgagggcagaggaagtctactaacctgcggagatgtggaagaaaatcctggcccacatatgaccgagtacaagcccacggtgcgcctcgccacccgcgacgacgtccccagggccgtacgcaccctcgccgccgcgttcgccgactaccccgccacgcgccacaccgtcgatccggaccgccacatcgagcgggtcaccgagctgcaagaactcttcctcacgcgcgtcgggctcgacatcggcaaggtgtgggtcgcggacgacggcgccgcggtggcggtctggaccacgccggagagcgtcgaagcgggggcggtgttcgccgagatcggcccgcgcatggccgagttgagcggttcccggctggccgcgcagcaacagatggaaggcctcctggcgccgcaccggcccaaggagcccgcgtggttcctggccaccgtcggcgtctcgcccgaccaccagggcaagggtctgggcagcgccgtcgtgctccccggagtggaggcggccgagcgcgccggggtgcccgccttcctggagacctccgcgccccgcaacctccccttctacgagcggctcggcttcaccgtcaccgccgacgtcgaggtgcccgaaggaccgcgcacctggtgcatgacccgcaagcccggtgcctga

SEQ ID NO: 1279 - DNA, 2883 bp, Artificial Sequence
  Synthetic Polynucleotides
atggccttaccagtgaccgccttgctcctgccgctggccttgctgctccacgccgccaggccggacatcgtgatgacacagagcccttctagcctggccgtgtctgagggcgagacagtgaccatcaactgcaagagcagccagagcttcctgtctagcggcgacggcaagaattacgtggcctggtatcagtacaagcccggacagagccccaagctgctgatctactgggccagcacaagacagagcggcgtgcccgatagattcatcggctctggcagcggcaccgacttcaccctgacaatctctacagtgcaggccgaggacctggctatctactactgccagcagtattacgacacccctctgacctttggctccggcaccaagctggaaatcaaaggcggaggcggaagtggaggcggaggatctggcggcggaggctctgaagtgaagctgcaagagtctggccccagcctggtgcagagtagccaaacactgagcctgacctgtaccgtgtccggctttagcctgaccagctaccacatccactgggtccgacagacccctggcaaaggactggaatggatgggcgtgatgtggagcgacggcgacaccagctataacagcgccctgaagtcccggctgagcatcagcagagatacaagccagagccaggtgttcctgaagatgaacagcctccagaccgaggacaccgccacctactattgtgccagaggctactacagcagctacctgtacctttggttcgcctattggggccagggcaccctggttacagtcagctctacgcgtgagcagaaactgatctcggaagaggatctggcgaagcccaccacgacgccagcgccgcgaccaccaacaccggcgcccaccatcgcgtcgcagcccctgtccctgcgcccagaggcgtgccggccagcggcggggggcgcagtgcacacgagggggctggacttcgcctgtgacatctacatctgggcgcccttggccgggacttgtggggtccttctcctgtcactggttatcaccctttactgcaaacggggcagaaagaaactcctgtatatattcaaacaaccatttatgagaccagtacaaactactcaagaggaagatggctgtagctgccgatttccagaagaagaagaaggaggatgtgaactgagagtgaagttcagcaggagcgcagacgcccccgcgtaccagcagggccagaaccagctctataacgagctgaatctaggacgaagagaggagtacgatgttttggacaagagacgtggccgggaccctgagatggggggaaagccgagaaggaagaaccctcaggaaggcctgtacaatgaactgcagaaagataagatggcggaggcctacagtgagattgggatgaaaggcgagcgccggaggggcaaggggcacgatggcctttaccagggtctcagtacagccaccaaggacacctacgacgcccttcacatgcaggccctgccccctcgctctagaggatctggagcaacaaacttctcactactcaaacaagcaggtgacgtggaggagaatcccgggcctgggatccacatggccacttacgaggttctctgtgaggtggcgcggaaactgggcacggatgacagggaagtggtattgttcctcctaaacgtgttcatacctcaacccacactggcccaattaattggagctcttagagctttaaaggaggagggcaggttaacgtttcccctgttagcggaatgtctgtttcgtgcaggtcgcagagacctcttgcgcgacctgcttcacttagacccgcgttttttagagcgccacctagcgggcacaatgagttatttcagcccttatcagctcactgttctccacgtagacggggagctgtgtgcgagggatattaggtctttgatatttttaagcaaggacactatagggtctcgcagcacaccacagacattcttacactgggtgtactgtatggaaaacttagacctactgggtcccactgacgtggatgccctaatgtcaatgcttagatctttgtcaagagtagacctacagcgccaagtgcaaaccctaatgggccttcacctttccggcccatcacactcccaacactatcgccatacaccactcgagaccgatttctacgactacaaggacgacgatgacaagactagtggctccggcgagggcagaggaagtctactaacctgcggagatgtggaagaaaatcctggcccacatatgaccgagtacaagcccacggtgcgcctcgccacccgcgacgacgtccccagggccgtacgcaccctcgccgccgcgttcgccgactaccccgccacgcgccacaccgtcgatccggaccgccacatcgagcgggtcaccgagctgcaagaactcttcctcacgcgcgtcgggctcgacatcggcaaggtgtgggtcgcggacgacggcgccgcggtggcggtctggaccacgccggagagcgtcgaagcgggggcggtgttcgccgagatcggcccgcgcatggccgagttgagcggttcccggctggccgcgcagcaacagatggaaggcctcctggcgccgcaccggcccaaggagcccgcgtggttcctggccaccgtcggcgtctcgcccgaccaccagggcaagggtctgggcagcgccgtcgtgctccccggagtggaggcggccgagcgcgccggggtgcccgccttcctggagacctccgcgccccgcaacctccccttctacgagcggctcggcttcaccgtcaccgccgacgtcgaggtgcccgaaggaccgcgcacctggtgcatgacccgcaagcccggtgcctga

SEQ ID NO: 1280 - DNA, 2895 bp, Artificial Sequence
  Synthetic Polynucleotides
atggccttaccagtgaccgccttgctcctgccgctggccttgctgctccacgccgccaggccggacgtgctgatgacccagacacctgtgtctctgccagtgtctctcggaggccaggtgtccatctcctgtagaagcagccagagcctggtgcactccgacggcgatacctacctgcactggtatctccagaagcctggacagagccctcagctcctgatctaccgggtgtccaacagattcagcggcgtgcccgatagattttccggcagcggctctggcaccgacttcaccctgaagatcagcagagtggaacccgaggacctgggcctgtactactgtctccagaccacacacttcccaccttggacctttggcggaggcaccaagctggaaatgaaaggcggaggcggaagtggaggcggaggatctggcggcggaggctctcaggttcagctccagcagtctggacccgagcttagaaggccaggatctagcgtcagactgagctgcaaggccagcggctaccggatcaaggacttcctgatccactggattaagaacagacccgagcacggcctggaatggatcggatggattgaccctgaggacggcgagactaagtacgcccagaagttccagaccaaggccacactgaccgccgacacctctagcaacaccgcctacatgcaactgagcagcctgaccagcgaggacaccgccacctacttttgtgctagatggggcgacgtgtactacggcctgatgagaggccatgtgatggatgcctggggccagggaacaagcgtgacagtctcttctacgcgtgagcagaaactgatctcggaagaggatctggcgaagcccaccacgacgccagcgccgcgaccaccaacaccggcgcccaccatcgcgtcgcagcccctgtccctgcgcccagaggcgtgccggccagcggcggggggcgcagtgcacacgagggggctggacttcgcctgtgacatctacatctgggcgcccttggccgggacttgtggggtccttctcctgtcactggttatcaccctttactgcaaacggggcagaaagaaactcctgtatatattcaaacaaccatttatgagaccagtacaaactactcaagaggaagatggctgtagctgccgatttccagaagaagaagaaggaggatgtgaactgagagtgaagttcagcaggagcgcagacgcccccgcgtaccagcagggccagaaccagctctataacgagctgaatctaggacgaagagaggagtacgatgttttggacaagagacgtggccgggaccctgagatggggggaaagccgagaaggaagaaccctcaggaaggcctgtacaatgaactgcagaaagataagatggcggaggcctacagtgagattgggatgaaaggcgagcgccggaggggcaaggggcacgatggcctttaccagggtctcagtacagccaccaaggacacctacgacgcccttcacatgcaggccctgccccctcgctctagaggatctggagcaacaaacttctcactactcaaacaagcaggtgacgtggaggagaatcccgggcctgggatccacatggccacttacgaggttctctgtgaggtggcgcggaaactgggcacggatgacagggaagtggtattgttcctcctaaacgtgttcatacctcaacccacactggcccaattaattggagctcttagagctttaaaggaggagggcaggttaacgtttcccctgttagcggaatgtctgtttcgtgcaggtcgcagagacctcttgcgcgacctgcttcacttagacccgcgttttttagagcgccacctagcgggcacaatgagttatttcagcccttatcagctcactgttctccacgtagacggggagctgtgtgcgagggatattaggtctttgatatttttaagcaaggacactatagggtctcgcagcacaccacagacattcttacactgggtgtactgtatggaaaacttagacctactgggtcccactgacgtggatgccctaatgtcaatgcttagatctttgtcaagagtagacctacagcgccaagtgcaaaccctaatgggccttcacctttccggcccatcacactcccaacactatcgccatacaccactcgagaccgatttctacgactacaaggacgacgatgacaagactagtggctccggcgagggcagaggaagtctactaacctgcggagatgtggaagaaaatcctggcccacatatgaccgagtacaagcccacggtgcgcctcgccacccgcgacgacgtccccagggccgtacgcaccctcgccgccgcgttcgccgactaccccgccacgcgccacaccgtcgatccggaccgccacatcgagcgggtcaccgagctgcaagaactcttcctcacgcgcgtcgggctcgacatcggcaaggtgtgggtcgcggacgacggcgccgcggtggcggtctggaccacgccggagagcgtcgaagcgggggcggtgttcgccgagatcggcccgcgcatggccgagttgagcggttcccggctggccgcgcagcaacagatggaaggcctcctggcgccgcaccggcccaaggagcccgcgtggttcctggccaccgtcggcgtctcgcccgaccaccagggcaagggtctgggcagcgccgtcgtgctccccggagtggaggcggccgagcgcgccggggtgcccgccttcctggagacctccgcgccccgcaacctccccttctacgagcggctcggcttcaccgtcaccgccgacgtcgaggtgcccgaaggaccgcgcacctggtgcatgacccgcaagcccggtgcctga

SEQ ID NO: 1281 - DNA, 2868 bp, Artificial Sequence
  Synthetic Polynucleotides
atggccttaccagtgaccgccttgctcctgccgctggccttgctgctccacgccgccaggccggacatccagatgacccagtctaccagttccctgagtgcatccctcggagacagggtgacgatcagttgcagcgcaagccaagggatcaataactatctgaactggtatcagcagaaaccggacggaacagtcgaactcctgatttattacaccagcacccttcagagtggcgtcccttcccggttcagtggctccggaagcgggaccgattactccctgaccatttctaatctggagccagaggacataggaacgtattattgccagcagtatagtaaactgccacgaacttttggaggggggacgaaactggagatcaaaggcggaggcggaagtggaggcggaggatctggcggcggaggctctcaggtgcaactccagcagtccggaagcgagcttatgatgccaggggcatcagtgaagatcagctgcaaggctactggctacaccttctctaattactggatagagtgggttaaacaaaggccagggcacggcctggaatggatcggcgagatcctgcctgggacaggccgaaccatttataacgagaagttcaaaggcaaggctactttcaccgcagatataagctctaatacagtgcaaatgcagctctcttccctgacaagtgaggatagtgccgtgtattattgcgcacgaagagattactatggaaatttttattacgctatggattattggggtcaaggaacaagtgtgaccgttagcagcacgcgtgagcagaaactgatctcggaagaggatctggcgaagcccaccacgacgccagcgccgcgaccaccaacaccggcgcccaccatcgcgtcgcagcccctgtccctgcgcccagaggcgtgccggccagcggcggggggcgcagtgcacacgagggggctggacttcgcctgtgacatctacatctgggcgcccttggccgggacttgtggggtccttctcctgtcactggttatcaccctttactgcaaacggggcagaaagaaactcctgtatatattcaaacaaccatttatgagaccagtacaaactactcaagaggaagatggctgtagctgccgatttccagaagaagaagaaggaggatgtgaactgagagtgaagttcagcaggagcgcagacgcccccgcgtaccagcagggccagaaccagctctataacgagctgaatctaggacgaagagaggagtacgatgttttggacaagagacgtggccgggaccctgagatggggggaaagccgagaaggaagaaccctcaggaaggcctgtacaatgaactgcagaaagataagatggcggaggcctacagtgagattgggatgaaaggcgagcgccggaggggcaaggggcacgatggcctttaccagggtctcagtacagccaccaaggacacctacgacgcccttcacatgcaggccctgccccctcgctctagaggatctggagcaacaaacttctcactactcaaacaagcaggtgacgtggaggagaatcccgggcctgggatccacatggccacttacgaggttctctgtgaggtggcgcggaaactgggcacggatgacagggaagtggtattgttcctcctaaacgtgttcatacctcaacccacactggcccaattaattggagctcttagagctttaaaggaggagggcaggttaacgtttcccctgttagcggaatgtctgtttcgtgcaggtcgcagagacctcttgcgcgacctgcttcacttagacccgcgttttttagagcgccacctagcgggcacaatgagttatttcagcccttatcagctcactgttctccacgtagacggggagctgtgtgcgagggatattaggtctttgatatttttaagcaaggacactatagggtctcgcagcacaccacagacattcttacactgggtgtactgtatggaaaacttagacctactgggtcccactgacgtggatgccctaatgtcaatgcttagatctttgtcaagagtagacctacagcgccaagtgcaaaccctaatgggccttcacctttccggcccatcacactcccaacactatcgccatacaccactcgagaccgatttctacgactacaaggacgacgatgacaagactagtggctccggcgagggcagaggaagtctactaacctgcggagatgtggaagaaaatcctggcccacatatgaccgagtacaagcccacggtgcgcctcgccacccgcgacgacgtccccagggccgtacgcaccctcgccgccgcgttcgccgactaccccgccacgcgccacaccgtcgatccggaccgccacatcgagcgggtcaccgagctgcaagaactcttcctcacgcgcgtcgggctcgacatcggcaaggtgtgggtcgcggacgacggcgccgcggtggcggtctggaccacgccggagagcgtcgaagcgggggcggtgttcgccgagatcggcccgcgcatggccgagttgagcggttcccggctggccgcgcagcaacagatggaaggcctcctggcgccgcaccggcccaaggagcccgcgtggttcctggccaccgtcggcgtctcgcccgaccaccagggcaagggtctgggcagcgccgtcgtgctccccggagtggaggcggccgagcgcgccggggtgcccgccttcctggagacctccgcgccccgcaacctccccttctacgagcggctcggcttcaccgtcaccgccgacgtcgaggtgcccgaaggaccgcgcacctggtgcatgacccgcaagcccggtgcctga

SEQ ID NO: 1282 - DNA, 2853 bp, Artificial Sequence
  Synthetic Polynucleotides
atggccttaccagtgaccgccttgctcctgccgctggccttgctgctccacgccgccaggccggacatccagatgacccagagccctgccagcctgtccgtgtctgtgggcgagacagtgaccatcacctgtcgggccagcgagaacatctacagcaacctggcctggtatcagcagaagcagggcaagagcccccaactgctggtgtacgccgccaccaatctggccgatggcgtgcccagcagattttccggctctggcagcggcacccagtacagcctgaagatcaacagcctccagagcgaggacttcggcagctactactgccagcacttctggggcacctggacctttggaggaggcaccaccctggaaatcaagggcggaggcggaagtggaggcggaggatctggcggcggaggctctgaagtgcaactccagcagagcggccctgagcttgtgaagcctggcgcttccgtgaagatgagctgcaaggccagcggctacaccttcaccgactactacatgaagtggatgaagcagagccacggcaagtccctggaatggatcggcgacatcaaccccaacaacggcggcaccacctacaaccagaagttcaagggcaaggccaccctgaccgtggacaagagcagcagcaccgcctacatgcaactgaacagcctgaccagcgaggacagcgccgtgtactactgcgccagagactacggctacggctatttcgactactggggccagggcacaaccctgacagtgtcctctacgcgtgagcagaaactgatctcggaagaggatctggcgaagcccaccacgacgccagcgccgcgaccaccaacaccggcgcccaccatcgcgtcgcagcccctgtccctgcgcccagaggcgtgccggccagcggcggggggcgcagtgcacacgagggggctggacttcgcctgtgacatctacatctgggcgcccttggccgggacttgtggggtccttctcctgtcactggttatcaccctttactgcaaacggggcagaaagaaactcctgtatatattcaaacaaccatttatgagaccagtacaaactactcaagaggaagatggctgtagctgccgatttccagaagaagaagaaggaggatgtgaactgagagtgaagttcagcaggagcgcagacgcccccgcgtaccagcagggccagaaccagctctataacgagctgaatctaggacgaagagaggagtacgatgttttggacaagagacgtggccgggaccctgagatggggggaaagccgagaaggaagaaccctcaggaaggcctgtacaatgaactgcagaaagataagatggcggaggcctacagtgagattgggatgaaaggcgagcgccggaggggcaaggggcacgatggcctttaccagggtctcagtacagccaccaaggacacctacgacgcccttcacatgcaggccctgccccctcgctctagaggatctggagcaacaaacttctcactactcaaacaagcaggtgacgtggaggagaatcccgggcctgggatccacatggccacttacgaggttctctgtgaggtggcgcggaaactgggcacggatgacagggaagtggtattgttcctcctaaacgtgttcatacctcaacccacactggcccaattaattggagctcttagagctttaaaggaggagggcaggttaacgtttcccctgttagcggaatgtctgtttcgtgcaggtcgcagagacctcttgcgcgacctgcttcacttagacccgcgttttttagagcgccacctagcgggcacaatgagttatttcagcccttatcagctcactgttctccacgtagacggggagctgtgtgcgagggatattaggtctttgatatttttaagcaaggacactatagggtctcgcagcacaccacagacattcttacactgggtgtactgtatggaaaacttagacctactgggtcccactgacgtggatgccctaatgtcaatgcttagatctttgtcaagagtagacctacagcgccaagtgcaaaccctaatgggccttcacctttccggcccatcacactcccaacactatcgccatacaccactcgagaccgatttctacgactacaaggacgacgatgacaagactagtggctccggcgagggcagaggaagtctactaacctgcggagatgtggaagaaaatcctggcccacatatgaccgagtacaagcccacggtgcgcctcgccacccgcgacgacgtccccagggccgtacgcaccctcgccgccgcgttcgccgactaccccgccacgcgccacaccgtcgatccggaccgccacatcgagcgggtcaccgagctgcaagaactcttcctcacgcgcgtcgggctcgacatcggcaaggtgtgggtcgcggacgacggcgccgcggtggcggtctggaccacgccggagagcgtcgaagcgggggcggtgttcgccgagatcggcccgcgcatggccgagttgagcggttcccggctggccgcgcagcaacagatggaaggcctcctggcgccgcaccggcccaaggagcccgcgtggttcctggccaccgtcggcgtctcgcccgaccaccagggcaagggtctgggcagcgccgtcgtgctccccggagtggaggcggccgagcgcgccggggtgcccgccttcctggagacctccgcgccccgcaacctccccttctacgagcggctcggcttcaccgtcaccgccgacgtcgaggtgcccgaaggaccgcgcacctggtgcatgacccgcaagcccggtgcctga

SEQ ID NO: 1283 - DNA, 2862 bp, Artificial Sequence
  Synthetic Polynucleotides
atggccttaccagtgaccgccttgctcctgccgctggccttgctgctccacgccgccaggccggagatcgtgctgacacagagccctggcaccctgagcctgtctccaggcgaaagagccacactgagctgtcgggcctctcagagcgtgggaggctacctggcttggtatcagcagaagccaggccaggcccccagactgctgatctacgacgccagcaatcgggccacaggcatccccgccagattttctggcagcggctccggcaccgacttcaccctgacaatcagcagcctggaacccgaggacttcgccgtgtactactgccagcagcggaacaactggccccccatgtacacattcggccagggcaccaagctggaaatcaagagaggcggaggcggaagtggaggcggaggatctggcggcggaggctctcaggtgcaactggtgcagagcggagccgaagtgaagaaacccggcagcagcgtgaaggtgtcctgcaaggcttccggcggcaccttcagcagctacgccatttcttgggtgcgccaggctcctggacagggcctggaatggatgggcggcatcatccctatcctgggcaccgccaactacgcccagaaattccagggcagagtgaccatcaccgccgacgagagcaccagcaccgcctacatggaactgagcagcctgcggagcgaggacacagccgtgtattattgcgccagatggggcggaggggccttcgacatttggggccagggaacaatggtcaccgtgtccagcacgcgtgagcagaaactgatctcggaagaggatctggcgaagcccaccacgacgccagcgccgcgaccaccaacaccggcgcccaccatcgcgtcgcagcccctgtccctgcgcccagaggcgtgccggccagcggcggggggcgcagtgcacacgagggggctggacttcgcctgtgacatctacatctgggcgcccttggccgggacttgtggggtccttctcctgtcactggttatcaccctttactgcaaacggggcagaaagaaactcctgtatatattcaaacaaccatttatgagaccagtacaaactactcaagaggaagatggctgtagctgccgatttccagaagaagaagaaggaggatgtgaactgagagtgaagttcagcaggagcgcagacgcccccgcgtaccagcagggccagaaccagctctataacgagctgaatctaggacgaagagaggagtacgatgttttggacaagagacgtggccgggaccctgagatggggggaaagccgagaaggaagaaccctcaggaaggcctgtacaatgaactgcagaaagataagatggcggaggcctacagtgagattgggatgaaaggcgagcgccggaggggcaaggggcacgatggcctttaccagggtctcagtacagccaccaaggacacctacgacgcccttcacatgcaggccctgccccctcgctctagaggatctggagcaacaaacttctcactactcaaacaagcaggtgacgtggaggagaatcccgggcctgggatccacatggccacttacgaggttctctgtgaggtggcgcggaaactgggcacggatgacagggaagtggtattgttcctcctaaacgtgttcatacctcaacccacactggcccaattaattggagctcttagagctttaaaggaggagggcaggttaacgtttcccctgttagcggaatgtctgtttcgtgcaggtcgcagagacctcttgcgcgacctgcttcacttagacccgcgttttttagagcgccacctagcgggcacaatgagttatttcagcccttatcagctcactgttctccacgtagacggggagctgtgtgcgagggatattaggtctttgatatttttaagcaaggacactatagggtctcgcagcacaccacagacattcttacactgggtgtactgtatggaaaacttagacctactgggtcccactgacgtggatgccctaatgtcaatgcttagatctttgtcaagagtagacctacagcgccaagtgcaaaccctaatgggccttcacctttccggcccatcacactcccaacactatcgccatacaccactcgagaccgatttctacgactacaaggacgacgatgacaagactagtggctccggcgagggcagaggaagtctactaacctgcggagatgtggaagaaaatcctggcccacatatgaccgagtacaagcccacggtgcgcctcgccacccgcgacgacgtccccagggccgtacgcaccctcgccgccgcgttcgccgactaccccgccacgcgccacaccgtcgatccggaccgccacatcgagcgggtcaccgagctgcaagaactcttcctcacgcgcgtcgggctcgacatcggcaaggtgtgggtcgcggacgacggcgccgcggtggcggtctggaccacgccggagagcgtcgaagcgggggcggtgttcgccgagatcggcccgcgcatggccgagttgagcggttcccggctggccgcgcagcaacagatggaaggcctcctggcgccgcaccggcccaaggagcccgcgtggttcctggccaccgtcggcgtctcgcccgaccaccagggcaagggtctgggcagcgccgtcgtgctccccggagtggaggcggccgagcgcgccggggtgcccgccttcctggagacctccgcgccccgcaacctccccttctacgagcggctcggcttcaccgtcaccgccgacgtcgaggtgcccgaaggaccgcgcacctggtgcatgacccgcaagcccggtgcctga

SEQ ID NO: 1284 - DNA, 2847 bp, Artificial Sequence
  Synthetic Polynucleotides
atggccttaccagtgaccgccttgctcctgccgctggccttgctgctccacgccgccaggccgcagatcgtgctgacacagagccctgccctgatgagcgccagccctggcgagaaagtgaccatgacctgtagcgccagcagcagcgtgcgctacatgtactggtatcagcagaagcccagaagcagccccaagccctggattcacctgaccagcaatctggcctctggcgtgcccgctagattttccggctctggcagcggcaccagctacagcctgaccatcagcagcatggaagccgaggacgccgccacctactactgccagcagtggtccagccaccccttcacatttggctccggcaccaagctggaaatcaagggcggaggcggaagtggaggcggaggatctggcggcggaggctctgatgtgcaactccaggaaagcggccctggccttgtgaagcctagccagagcctgtccctgacctgtaccgtgaccggcttcagcatcaccagcgactactcttggaactggatcagacagttccctggcaacaaactggaatggatgggctacatcagctactccggccacacctcctacaaccccagcctggaaagccggatctccatcaccagagacaccagcaagaaccagttcttcttgcaactgaacagcgtgaccaccgaggataccgccacatattactgtaccagaggcaactgggacgtggtgtactggggccagggcacacttgtgaccgtgtctgctacgcgtgagcagaaactgatctcggaagaggatctggcgaagcccaccacgacgccagcgccgcgaccaccaacaccggcgcccaccatcgcgtcgcagcccctgtccctgcgcccagaggcgtgccggccagcggcggggggcgcagtgcacacgagggggctggacttcgcctgtgacatctacatctgggcgcccttggccgggacttgtggggtccttctcctgtcactggttatcaccctttactgcaaacggggcagaaagaaactcctgtatatattcaaacaaccatttatgagaccagtacaaactactcaagaggaagatggctgtagctgccgatttccagaagaagaagaaggaggatgtgaactgagagtgaagttcagcaggagcgcagacgcccccgcgtaccagcagggccagaaccagctctataacgagctgaatctaggacgaagagaggagtacgatgttttggacaagagacgtggccgggaccctgagatggggggaaagccgagaaggaagaaccctcaggaaggcctgtacaatgaactgcagaaagataagatggcggaggcctacagtgagattgggatgaaaggcgagcgccggaggggcaaggggcacgatggcctttaccagggtctcagtacagccaccaaggacacctacgacgcccttcacatgcaggccctgccccctcgctctagaggatctggagcaacaaacttctcactactcaaacaagcaggtgacgtggaggagaatcccgggcctgggatccacatggccacttacgaggttctctgtgaggtggcgcggaaactgggcacggatgacagggaagtggtattgttcctcctaaacgtgttcatacctcaacccacactggcccaattaattggagctcttagagctttaaaggaggagggcaggttaacgtttcccctgttagcggaatgtctgtttcgtgcaggtcgcagagacctcttgcgcgacctgcttcacttagacccgcgttttttagagcgccacctagcgggcacaatgagttatttcagcccttatcagctcactgttctccacgtagacggggagctgtgtgcgagggatattaggtctttgatatttttaagcaaggacactatagggtctcgcagcacaccacagacattcttacactgggtgtactgtatggaaaacttagacctactgggtcccactgacgtggatgccctaatgtcaatgcttagatctttgtcaagagtagacctacagcgccaagtgcaaaccctaatgggccttcacctttccggcccatcacactcccaacactatcgccatacaccactcgagaccgatttctacgactacaaggacgacgatgacaagactagtggctccggcgagggcagaggaagtctactaacctgcggagatgtggaagaaaatcctggcccacatatgaccgagtacaagcccacggtgcgcctcgccacccgcgacgacgtccccagggccgtacgcaccctcgccgccgcgttcgccgactaccccgccacgcgccacaccgtcgatccggaccgccacatcgagcgggtcaccgagctgcaagaactcttcctcacgcgcgtcgggctcgacatcggcaaggtgtgggtcgcggacgacggcgccgcggtggcggtctggaccacgccggagagcgtcgaagcgggggcggtgttcgccgagatcggcccgcgcatggccgagttgagcggttcccggctggccgcgcagcaacagatggaaggcctcctggcgccgcaccggcccaaggagcccgcgtggttcctggccaccgtcggcgtctcgcccgaccaccagggcaagggtctgggcagcgccgtcgtgctccccggagtggaggcggccgagcgcgccggggtgcccgccttcctggagacctccgcgccccgcaacctccccttctacgagcggctcggcttcaccgtcaccgccgacgtcgaggtgcccgaaggaccgcgcacctggtgcatgacccgcaagcccggtgcctga

SEQ ID NO: 1285 - DNA, 2877 bp, Artificial Sequence
  Synthetic Polynucleotides
atggccttaccagtgaccgccttgctcctgccgctggccttgctgctccacgccgccaggccggacgtcgtgatgacccagagccctctgagcctgcctgtgacactgggacagcctgccagcatctcctgtcggagcagccagagcatcgtgcacagcgacggcaacacctacctggaatggtatcagcagcggccaggccagagccccagacggctgatctacaaggtgtccaacagattcagcggcgtgcccgacagattctccggcagcggctctggcaccgacttcaccctgaagatcagcagagtggaagccgaggacgtgggcgtgtactactgttttcaaggcagccacgccccctggacctttggcggaggaacaaaggtggaaatcaagggcggaggcggaagtggaggcggaggatctggcggcggaggctctgaagtgcaactggtggaatcaggcggcggactggtgcagcctggcggatctctgagactgagctgtgccgccagcggcttcaccttcagcagctacggaatgcactgggtgcgccaggcccctggcaaaggactggaatgggtggcctacatcaccaccagaagcagcaccatctactacgccgacagcgtgaagggccggttcaccatctccagagacaacgccaagaacagcctgtacctccagatgaactccctgcgggccgaggacaccgccgtgtactattgcaccagagagcccctgaccggctactacgctatggactattggggccagggcaccagcgtgaccgtgtctagtacgcgtgagcagaaactgatctcggaagaggatctggcgaagcccaccacgacgccagcgccgcgaccaccaacaccggcgcccaccatcgcgtcgcagcccctgtccctgcgcccagaggcgtgccggccagcggcggggggcgcagtgcacacgagggggctggacttcgcctgtgacatctacatctgggcgcccttggccgggacttgtggggtccttctcctgtcactggttatcaccctttactgcaaacggggcagaaagaaactcctgtatatattcaaacaaccatttatgagaccagtacaaactactcaagaggaagatggctgtagctgccgatttccagaagaagaagaaggaggatgtgaactgagagtgaagttcagcaggagcgcagacgcccccgcgtaccagcagggccagaaccagctctataacgagctgaatctaggacgaagagaggagtacgatgttttggacaagagacgtggccgggaccctgagatggggggaaagccgagaaggaagaaccctcaggaaggcctgtacaatgaactgcagaaagataagatggcggaggcctacagtgagattgggatgaaaggcgagcgccggaggggcaaggggcacgatggcctttaccagggtctcagtacagccaccaaggacacctacgacgcccttcacatgcaggccctgccccctcgctctagaggatctggagcaacaaacttctcactactcaaacaagcaggtgacgtggaggagaatcccgggcctgggatccacatggccacttacgaggttctctgtgaggtggcgcggaaactgggcacggatgacagggaagtggtattgttcctcctaaacgtgttcatacctcaacccacactggcccaattaattggagctcttagagctttaaaggaggagggcaggttaacgtttcccctgttagcggaatgtctgtttcgtgcaggtcgcagagacctcttgcgcgacctgcttcacttagacccgcgttttttagagcgccacctagcgggcacaatgagttatttcagcccttatcagctcactgttctccacgtagacggggagctgtgtgcgagggatattaggtctttgatatttttaagcaaggacactatagggtctcgcagcacaccacagacattcttacactgggtgtactgtatggaaaacttagacctactgggtcccactgacgtggatgccctaatgtcaatgcttagatctttgtcaagagtagacctacagcgccaagtgcaaaccctaatgggccttcacctttccggcccatcacactcccaacactatcgccatacaccactcgagaccgatttctacgactacaaggacgacgatgacaagactagtggctccggcgagggcagaggaagtctactaacctgcggagatgtggaagaaaatcctggcccacatatgaccgagtacaagcccacggtgcgcctcgccacccgcgacgacgtccccagggccgtacgcaccctcgccgccgcgttcgccgactaccccgccacgcgccacaccgtcgatccggaccgccacatcgagcgggtcaccgagctgcaagaactcttcctcacgcgcgtcgggctcgacatcggcaaggtgtgggtcgcggacgacggcgccgcggtggcggtctggaccacgccggagagcgtcgaagcgggggcggtgttcgccgagatcggcccgcgcatggccgagttgagcggttcccggctggccgcgcagcaacagatggaaggcctcctggcgccgcaccggcccaaggagcccgcgtggttcctggccaccgtcggcgtctcgcccgaccaccagggcaagggtctgggcagcgccgtcgtgctccccggagtggaggcggccgagcgcgccggggtgcccgccttcctggagacctccgcgccccgcaacctccccttctacgagcggctcggcttcaccgtcaccgccgacgtcgaggtgcccgaaggaccgcgcacctggtgcatgacccgcaagcccggtgcctga

SEQ ID NO: 1286 - DNA, 2853 bp, Artificial Sequence
  Synthetic Polynucleotides
atggccttaccagtgaccgccttgctcctgccgctggccttgctgctccacgccgccaggccggacatccagatgacccagagccccagcagcctgtctgccagcgtgggcgacagagtgaccatcacctgtagagccagccagagcatcagcctgtggctgaactggtatcagcagaagcccggcaaggcccccaagctgctgatctacgccgccagcacactccagagcggcgtgccaagcagattttccggcagcggctccggcaccgacttcaccctgacaatcagctccctccagcccgaggacttcgccacctactactgccagcagtactacaccagcccctacaccttcggccagggcaccaaggtggaaatcaagagaggcggaggcggaagtggaggcggaggatctggcggcggaggctctcaggtgcaactgctggaatctggcggcggactggtgcagcctggcggatctctgagactgagctgtgccgccagcggcttcaccttcagcagctacgccatgagctgggtgcgccaggcccctggaaaaggactggaatgggtgtccgtgatccggtccagcggcagcagcacctattacgccgatagcgtgaagggccggttcaccatcagccgggacaacagcaagaacaccctgtacctccagatgaacagcctgcgggccgaggacaccgccgtgtactattgtgctaggggaggcggctacttcgactactggggccagggaacactcgtgaccgtgtcctctacgcgtgagcagaaactgatctcggaagaggatctggcgaagcccaccacgacgccagcgccgcgaccaccaacaccggcgcccaccatcgcgtcgcagcccctgtccctgcgcccagaggcgtgccggccagcggcggggggcgcagtgcacacgagggggctggacttcgcctgtgacatctacatctgggcgcccttggccgggacttgtggggtccttctcctgtcactggttatcaccctttactgcaaacggggcagaaagaaactcctgtatatattcaaacaaccatttatgagaccagtacaaactactcaagaggaagatggctgtagctgccgatttccagaagaagaagaaggaggatgtgaactgagagtgaagttcagcaggagcgcagacgcccccgcgtaccagcagggccagaaccagctctataacgagctgaatctaggacgaagagaggagtacgatgttttggacaagagacgtggccgggaccctgagatggggggaaagccgagaaggaagaaccctcaggaaggcctgtacaatgaactgcagaaagataagatggcggaggcctacagtgagattgggatgaaaggcgagcgccggaggggcaaggggcacgatggcctttaccagggtctcagtacagccaccaaggacacctacgacgcccttcacatgcaggccctgccccctcgctctagaggatctggagcaacaaacttctcactactcaaacaagcaggtgacgtggaggagaatcccgggcctgggatccacatggccacttacgaggttctctgtgaggtggcgcggaaactgggcacggatgacagggaagtggtattgttcctcctaaacgtgttcatacctcaacccacactggcccaattaattggagctcttagagctttaaaggaggagggcaggttaacgtttcccctgttagcggaatgtctgtttcgtgcaggtcgcagagacctcttgcgcgacctgcttcacttagacccgcgttttttagagcgccacctagcgggcacaatgagttatttcagcccttatcagctcactgttctccacgtagacggggagctgtgtgcgagggatattaggtctttgatatttttaagcaaggacactatagggtctcgcagcacaccacagacattcttacactgggtgtactgtatggaaaacttagacctactgggtcccactgacgtggatgccctaatgtcaatgcttagatctttgtcaagagtagacctacagcgccaagtgcaaaccctaatgggccttcacctttccggcccatcacactcccaacactatcgccatacaccactcgagaccgatttctacgactacaaggacgacgatgacaagactagtggctccggcgagggcagaggaagtctactaacctgcggagatgtggaagaaaatcctggcccacatatgaccgagtacaagcccacggtgcgcctcgccacccgcgacgacgtccccagggccgtacgcaccctcgccgccgcgttcgccgactaccccgccacgcgccacaccgtcgatccggaccgccacatcgagcgggtcaccgagctgcaagaactcttcctcacgcgcgtcgggctcgacatcggcaaggtgtgggtcgcggacgacggcgccgcggtggcggtctggaccacgccggagagcgtcgaagcgggggcggtgttcgccgagatcggcccgcgcatggccgagttgagcggttcccggctggccgcgcagcaacagatggaaggcctcctggcgccgcaccggcccaaggagcccgcgtggttcctggccaccgtcggcgtctcgcccgaccaccagggcaagggtctgggcagcgccgtcgtgctccccggagtggaggcggccgagcgcgccggggtgcccgccttcctggagacctccgcgccccgcaacctccccttctacgagcggctcggcttcaccgtcaccgccgacgtcgaggtgcccgaaggaccgcgcacctggtgcatgacccgcaagcccggtgcctga

SEQ ID NO: 1287 - DNA, 2862 bp, Artificial Sequence
  Synthetic Polynucleotides
atggccttaccagtgaccgccttgctcctgccgctggccttgctgctccacgccgccaggccggacatccagatgacccagagccccagcagcctgtctgccagcgtgggcgacagagtgaccatcacctgtagagccagccagagcatcagcagctacctgaactggtatcagcagaagcccggcaaggcccccaaactgctgatctacgccgtgtccacactccagagcggcgtgcccagcagattttctggcagcggctccggcaccgacttcaccctgacaatcagctccctccagcccgaggacttcgccacctactactgtcagcagagcggcaccttccctcccaccacatttggacagggcaccaaggtggaaatcaagagaggcggaggcggaagtggaggcggaggatctggcggcggaggctctcaggtgcaactgctggaatctggcggcggactggtgcagcctggcggatctctgagactgagctgtgccgccagcggcttcaccttcagcagccacggaatgcactgggtgcgccaggcccctggaaagggactggaatgggtgtccgtgatctccggcagcggcagcaataccggctacgccgatagcgtgaagggccggttcaccatcagccgggacaacagcaagaacaccctgtacctccagatgaacagcctgcgggccgaggacaccgccgtgtactattgtgccagacagtggggcagctacgccttcgattcttggggccagggcaccctcgtgaccgtgtcatctacgcgtgagcagaaactgatctcggaagaggatctggcgaagcccaccacgacgccagcgccgcgaccaccaacaccggcgcccaccatcgcgtcgcagcccctgtccctgcgcccagaggcgtgccggccagcggcggggggcgcagtgcacacgagggggctggacttcgcctgtgacatctacatctgggcgcccttggccgggacttgtggggtccttctcctgtcactggttatcaccctttactgcaaacggggcagaaagaaactcctgtatatattcaaacaaccatttatgagaccagtacaaactactcaagaggaagatggctgtagctgccgatttccagaagaagaagaaggaggatgtgaactgagagtgaagttcagcaggagcgcagacgcccccgcgtaccagcagggccagaaccagctctataacgagctgaatctaggacgaagagaggagtacgatgttttggacaagagacgtggccgggaccctgagatggggggaaagccgagaaggaagaaccctcaggaaggcctgtacaatgaactgcagaaagataagatggcggaggcctacagtgagattgggatgaaaggcgagcgccggaggggcaaggggcacgatggcctttaccagggtctcagtacagccaccaaggacacctacgacgcccttcacatgcaggccctgccccctcgctctagaggatctggagcaacaaacttctcactactcaaacaagcaggtgacgtggaggagaatcccgggcctgggatccacatggccacttacgaggttctctgtgaggtggcgcggaaactgggcacggatgacagggaagtggtattgttcctcctaaacgtgttcatacctcaacccacactggcccaattaattggagctcttagagctttaaaggaggagggcaggttaacgtttcccctgttagcggaatgtctgtttcgtgcaggtcgcagagacctcttgcgcgacctgcttcacttagacccgcgttttttagagcgccacctagcgggcacaatgagttatttcagcccttatcagctcactgttctccacgtagacggggagctgtgtgcgagggatattaggtctttgatatttttaagcaaggacactatagggtctcgcagcacaccacagacattcttacactgggtgtactgtatggaaaacttagacctactgggtcccactgacgtggatgccctaatgtcaatgcttagatctttgtcaagagtagacctacagcgccaagtgcaaaccctaatgggccttcacctttccggcccatcacactcccaacactatcgccatacaccactcgagaccgatttctacgactacaaggacgacgatgacaagactagtggctccggcgagggcagaggaagtctactaacctgcggagatgtggaagaaaatcctggcccacatatgaccgagtacaagcccacggtgcgcctcgccacccgcgacgacgtccccagggccgtacgcaccctcgccgccgcgttcgccgactaccccgccacgcgccacaccgtcgatccggaccgccacatcgagcgggtcaccgagctgcaagaactcttcctcacgcgcgtcgggctcgacatcggcaaggtgtgggtcgcggacgacggcgccgcggtggcggtctggaccacgccggagagcgtcgaagcgggggcggtgttcgccgagatcggcccgcgcatggccgagttgagcggttcccggctggccgcgcagcaacagatggaaggcctcctggcgccgcaccggcccaaggagcccgcgtggttcctggccaccgtcggcgtctcgcccgaccaccagggcaagggtctgggcagcgccgtcgtgctccccggagtggaggcggccgagcgcgccggggtgcccgccttcctggagacctccgcgccccgcaacctccccttctacgagcggctcggcttcaccgtcaccgccgacgtcgaggtgcccgaaggaccgcgcacctggtgcatgacccgcaagcccggtgcctga

SEQ ID NO: 1288 - DNA, 2892 bp, Artificial Sequence
  Synthetic Polynucleotides
atggccttaccagtgaccgccttgctcctgccgctggccttgctgctccacgccgccaggccggacatcgtgatgagccagagccctagcagcctggccgtgtccgtgggcgagaaagtgaccatgagctgcaagagcagccagtccctgctgcacagcagcaaccagaagaactacctggcctggtatcagcagaagcccggccagtcccccaaggtgctgatctactgggccagcaccagagaaagcggcgtgcccgatagattcaccggcagcggctctggcaccgacttcaccctgaccatcaccagcgtgaagtccgaggacctggctgtgtactactgccagcagtattacagctacccctggaccttcggcggaggcacccggctggaaatcaaaagaggcggaggcggaagtggaggcggaggatctggcggcggaggctctgaagtgcaactccagcagagcgtggccgagcttgtgaagcctggcgcttccgtgaagatgtcctgcaaggtgtccggctacaccctgacagaccacaccatccactggatgaagcagcggcctgagcagggcctggaatggatcggctacatctaccccagggacggcatcaccggctacaacgagaagttcaagggcaaggccacactgaccgccgacaccagcagcagcacagcctacatgcaactgaacagcctgaccagcgaggacagcgccgtgtacttctgtgccagatggggctacagctacagaaactacgcctactactacgactactggggccagggcacaaccctgaccgtgtctagtacgcgtgagcagaaactgatctcggaagaggatctggcgaagcccaccacgacgccagcgccgcgaccaccaacaccggcgcccaccatcgcgtcgcagcccctgtccctgcgcccagaggcgtgccggccagcggcggggggcgcagtgcacacgagggggctggacttcgcctgtgacatctacatctgggcgcccttggccgggacttgtggggtccttctcctgtcactggttatcaccctttactgcaaacggggcagaaagaaactcctgtatatattcaaacaaccatttatgagaccagtacaaactactcaagaggaagatggctgtagctgccgatttccagaagaagaagaaggaggatgtgaactgagagtgaagttcagcaggagcgcagacgcccccgcgtaccagcagggccagaaccagctctataacgagctgaatctaggacgaagagaggagtacgatgttttggacaagagacgtggccgggaccctgagatggggggaaagccgagaaggaagaaccctcaggaaggcctgtacaatgaactgcagaaagataagatggcggaggcctacagtgagattgggatgaaaggcgagcgccggaggggcaaggggcacgatggcctttaccagggtctcagtacagccaccaaggacacctacgacgcccttcacatgcaggccctgccccctcgctctagaggatctggagcaacaaacttctcactactcaaacaagcaggtgacgtggaggagaatcccgggcctgggatccacatggccacttacgaggttctctgtgaggtggcgcggaaactgggcacggatgacagggaagtggtattgttcctcctaaacgtgttcatacctcaacccacactggcccaattaattggagctcttagagctttaaaggaggagggcaggttaacgtttcccctgttagcggaatgtctgtttcgtgcaggtcgcagagacctcttgcgcgacctgcttcacttagacccgcgttttttagagcgccacctagcgggcacaatgagttatttcagcccttatcagctcactgttctccacgtagacggggagctgtgtgcgagggatattaggtctttgatatttttaagcaaggacactatagggtctcgcagcacaccacagacattcttacactgggtgtactgtatggaaaacttagacctactgggtcccactgacgtggatgccctaatgtcaatgcttagatctttgtcaagagtagacctacagcgccaagtgcaaaccctaatgggccttcacctttccggcccatcacactcccaacactatcgccatacaccactcgagaccgatttctacgactacaaggacgacgatgacaagactagtggctccggcgagggcagaggaagtctactaacctgcggagatgtggaagaaaatcctggcccacatatgaccgagtacaagcccacggtgcgcctcgccacccgcgacgacgtccccagggccgtacgcaccctcgccgccgcgttcgccgactaccccgccacgcgccacaccgtcgatccggaccgccacatcgagcgggtcaccgagctgcaagaactcttcctcacgcgcgtcgggctcgacatcggcaaggtgtgggtcgcggacgacggcgccgcggtggcggtctggaccacgccggagagcgtcgaagcgggggcggtgttcgccgagatcggcccgcgcatggccgagttgagcggttcccggctggccgcgcagcaacagatggaaggcctcctggcgccgcaccggcccaaggagcccgcgtggttcctggccaccgtcggcgtctcgcccgaccaccagggcaagggtctgggcagcgccgtcgtgctccccggagtggaggcggccgagcgcgccggggtgcccgccttcctggagacctccgcgccccgcaacctccccttctacgagcggctcggcttcaccgtcaccgccgacgtcgaggtgcccgaaggaccgcgcacctggtgcatgacccgcaagcccggtgcctga

SEQ ID NO: 1289 - DNA, 2883 bp, Artificial Sequence
  Synthetic Polynucleotides
atggccttaccagtgaccgccttgctcctgccgctggccttgctgctccacgccgccaggccggagatcgtgctgacacagagccctggcaccctgagcctgtctccaggcgaaagagccacactgagctgtcgggccagccagagcgtgtccagctcttacctggcctggtatcagcagaagcccggccaggctccccggctgctgatctacggaacaagcagcagagccaccggcatccccgacagattttctggcagcggctccggcaccgacttcaccctgacaatcagcagactggaacccgaggacttcgccgtgtactactgccagcagtacggcagcagccccttcacctttggcggaggcaccaaggtggaaatcaagagaggcggaggcggaagtggaggcggaggatctggcggcggaggctctcaggtgcaactccaggaatctggccccggactggctaagcccagcgagacactgagcctgacctgtaccgtgtccggcgacagcatcaccagctactactggtcctggatcagacagccccctggcaagggcctggaatggatcggctacatctactacagcggcagcaccaactacaaccccagcctgaagtccagagtgaccatcagcgtggacaccagcaagaaccagttctccctgaagctgagcagcgtgacagccgccgacaccgccgtgtattattgcgccagagatcagcggagaatcgccgctgccggcacccacttttacggcatggatgtgtggggccagggcaccaccgtgaccgtgtcatctacgcgtgagcagaaactgatctcggaagaggatctggcgaagcccaccacgacgccagcgccgcgaccaccaacaccggcgcccaccatcgcgtcgcagcccctgtccctgcgcccagaggcgtgccggccagcggcggggggcgcagtgcacacgagggggctggacttcgcctgtgacatctacatctgggcgcccttggccgggacttgtggggtccttctcctgtcactggttatcaccctttactgcaaacggggcagaaagaaactcctgtatatattcaaacaaccatttatgagaccagtacaaactactcaagaggaagatggctgtagctgccgatttccagaagaagaagaaggaggatgtgaactgagagtgaagttcagcaggagcgcagacgcccccgcgtaccagcagggccagaaccagctctataacgagctgaatctaggacgaagagaggagtacgatgttttggacaagagacgtggccgggaccctgagatggggggaaagccgagaaggaagaaccctcaggaaggcctgtacaatgaactgcagaaagataagatggcggaggcctacagtgagattgggatgaaaggcgagcgccggaggggcaaggggcacgatggcctttaccagggtctcagtacagccaccaaggacacctacgacgcccttcacatgcaggccctgccccctcgctctagaggatctggagcaacaaacttctcactactcaaacaagcaggtgacgtggaggagaatcccgggcctgggatccacatggccacttacgaggttctctgtgaggtggcgcggaaactgggcacggatgacagggaagtggtattgttcctcctaaacgtgttcatacctcaacccacactggcccaattaattggagctcttagagctttaaaggaggagggcaggttaacgtttcccctgttagcggaatgtctgtttcgtgcaggtcgcagagacctcttgcgcgacctgcttcacttagacccgcgttttttagagcgccacctagcgggcacaatgagttatttcagcccttatcagctcactgttctccacgtagacggggagctgtgtgcgagggatattaggtctttgatatttttaagcaaggacactatagggtctcgcagcacaccacagacattcttacactgggtgtactgtatggaaaacttagacctactgggtcccactgacgtggatgccctaatgtcaatgcttagatctttgtcaagagtagacctacagcgccaagtgcaaaccctaatgggccttcacctttccggcccatcacactcccaacactatcgccatacaccactcgagaccgatttctacgactacaaggacgacgatgacaagactagtggctccggcgagggcagaggaagtctactaacctgcggagatgtggaagaaaatcctggcccacatatgaccgagtacaagcccacggtgcgcctcgccacccgcgacgacgtccccagggccgtacgcaccctcgccgccgcgttcgccgactaccccgccacgcgccacaccgtcgatccggaccgccacatcgagcgggtcaccgagctgcaagaactcttcctcacgcgcgtcgggctcgacatcggcaaggtgtgggtcgcggacgacggcgccgcggtggcggtctggaccacgccggagagcgtcgaagcgggggcggtgttcgccgagatcggcccgcgcatggccgagttgagcggttcccggctggccgcgcagcaacagatggaaggcctcctggcgccgcaccggcccaaggagcccgcgtggttcctggccaccgtcggcgtctcgcccgaccaccagggcaagggtctgggcagcgccgtcgtgctccccggagtggaggcggccgagcgcgccggggtgcccgccttcctggagacctccgcgccccgcaacctccccttctacgagcggctcggcttcaccgtcaccgccgacgtcgaggtgcccgaaggaccgcgcacctggtgcatgacccgcaagcccggtgcctga

SEQ ID NO: 1290 - DNA, 2859 bp, Artificial Sequence
  Synthetic Polynucleotides
atggccttaccagtgaccgccttgctcctgccgctggccttgctgctccacgccgccaggccggacatcctgctgacccagagccccgtgatcctgtccgtgtctcctggcgagagagtgtccttcagctgtcgggccagccagagcatcggcaccaacatccactggtatcagcagcggaccaacggcagccccagactgctgattaagtacgccagcgagtccatcagcggcatccccagcagattttccggcagcggctccggcaccgacttcaccctgagcatcaacagcgtggaaagcgaggacattgccgactactactgccagcagaacaacaactggcccaccaccttcggagccggcaccaagctggaactgaagggcggaggcggaagtggaggcggaggatctggcggcggaggctctcaggtgcagctgaagcagagcggacctggcctggtgcagcctagccagagcctgtccatcacctgtaccgtgtccggcttcagcctgaccaactacggcgtgcactgggtgcgccagagccctggaaaaggactggaatggctgggagtgatttggagcggcggcaacaccgactacaacacccccttcaccagcagactgtctatcaacaaggacaacagcaagagccaggtgttcttcaagatgaacagcctccagagcaacgacaccgccatctactactgtgctagagccctgacctactatgactacgagttcgcctactggggccagggcacactcgtgacagtgtctgctacgcgtgagcagaaactgatctcggaagaggatctggcgaagcccaccacgacgccagcgccgcgaccaccaacaccggcgcccaccatcgcgtcgcagcccctgtccctgcgcccagaggcgtgccggccagcggcggggggcgcagtgcacacgagggggctggacttcgcctgtgacatctacatctgggcgcccttggccgggacttgtggggtccttctcctgtcactggttatcaccctttactgcaaacggggcagaaagaaactcctgtatatattcaaacaaccatttatgagaccagtacaaactactcaagaggaagatggctgtagctgccgatttccagaagaagaagaaggaggatgtgaactgagagtgaagttcagcaggagcgcagacgcccccgcgtaccagcagggccagaaccagctctataacgagctgaatctaggacgaagagaggagtacgatgttttggacaagagacgtggccgggaccctgagatggggggaaagccgagaaggaagaaccctcaggaaggcctgtacaatgaactgcagaaagataagatggcggaggcctacagtgagattgggatgaaaggcgagcgccggaggggcaaggggcacgatggcctttaccagggtctcagtacagccaccaaggacacctacgacgcccttcacatgcaggccctgccccctcgctctagaggatctggagcaacaaacttctcactactcaaacaagcaggtgacgtggaggagaatcccgggcctgggatccacatggccacttacgaggttctctgtgaggtggcgcggaaactgggcacggatgacagggaagtggtattgttcctcctaaacgtgttcatacctcaacccacactggcccaattaattggagctcttagagctttaaaggaggagggcaggttaacgtttcccctgttagcggaatgtctgtttcgtgcaggtcgcagagacctcttgcgcgacctgcttcacttagacccgcgttttttagagcgccacctagcgggcacaatgagttatttcagcccttatcagctcactgttctccacgtagacggggagctgtgtgcgagggatattaggtctttgatatttttaagcaaggacactatagggtctcgcagcacaccacagacattcttacactgggtgtactgtatggaaaacttagacctactgggtcccactgacgtggatgccctaatgtcaatgcttagatctttgtcaagagtagacctacagcgccaagtgcaaaccctaatgggccttcacctttccggcccatcacactcccaacactatcgccatacaccactcgagaccgatttctacgactacaaggacgacgatgacaagactagtggctccggcgagggcagaggaagtctactaacctgcggagatgtggaagaaaatcctggcccacatatgaccgagtacaagcccacggtgcgcctcgccacccgcgacgacgtccccagggccgtacgcaccctcgccgccgcgttcgccgactaccccgccacgcgccacaccgtcgatccggaccgccacatcgagcgggtcaccgagctgcaagaactcttcctcacgcgcgtcgggctcgacatcggcaaggtgtgggtcgcggacgacggcgccgcggtggcggtctggaccacgccggagagcgtcgaagcgggggcggtgttcgccgagatcggcccgcgcatggccgagttgagcggttcccggctggccgcgcagcaacagatggaaggcctcctggcgccgcaccggcccaaggagcccgcgtggttcctggccaccgtcggcgtctcgcccgaccaccagggcaagggtctgggcagcgccgtcgtgctccccggagtggaggcggccgagcgcgccggggtgcccgccttcctggagacctccgcgccccgcaacctccccttctacgagcggctcggcttcaccgtcaccgccgacgtcgaggtgcccgaaggaccgcgcacctggtgcatgacccgcaagcccggtgcctga

SEQ ID NO: 1291 - DNA, 2838 bp, Artificial Sequence
  Synthetic Polynucleotides
atggccttaccagtgaccgccttgctcctgccgctggccttgctgctccacgccgccaggccgatgacccagagccccaagttcctgctggtgtctgccggcgacagagtgaccctgacatgcaaggccagccagagcgtgaacaacgacgtgtactggtatcagcaggaacccggccagtcccccaagctgctgatctactgggccagcaccagagaaagcggcgtgcccgatagattcaccggcagcggctctggcaccgacttcaccctgacaatcagcagcgtgcaggccgaggacctggccgtgtactactgcaagcagagctacaacctgtacaccttcggcggaggcaccaagctggaaatcaagagaggcggcggaggatctggcggaggcggatctgggggcggaggctctgaatctggaagaggactggtgcagcctggcggcagcagaaagctgtcttgtgccgccagcggcttcaccttcagcaccagcggaatgcactgggtgcgccaggcccctgagaagggactggaatgggtggcctacatcagctccggcagcaccaccatctaccacgccgataccgtgaagggccggttcaccatcagccgggacaaccccaagaataccctgttcctccagatgaccagcctgcggagcgaggacaccgccatgtactattgctgcgccagaagcggccagttcggcaactacttcgactactggggccagggcaccaccctgaccgtgtcatctacgcgtgagcagaaactgatctcggaagaggatctggcgaagcccaccacgacgccagcgccgcgaccaccaacaccggcgcccaccatcgcgtcgcagcccctgtccctgcgcccagaggcgtgccggccagcggcggggggcgcagtgcacacgagggggctggacttcgcctgtgacatctacatctgggcgcccttggccgggacttgtggggtccttctcctgtcactggttatcaccctttactgcaaacggggcagaaagaaactcctgtatatattcaaacaaccatttatgagaccagtacaaactactcaagaggaagatggctgtagctgccgatttccagaagaagaagaaggaggatgtgaactgagagtgaagttcagcaggagcgcagacgcccccgcgtaccagcagggccagaaccagctctataacgagctgaatctaggacgaagagaggagtacgatgttttggacaagagacgtggccgggaccctgagatggggggaaagccgagaaggaagaaccctcaggaaggcctgtacaatgaactgcagaaagataagatggcggaggcctacagtgagattgggatgaaaggcgagcgccggaggggcaaggggcacgatggcctttaccagggtctcagtacagccaccaaggacacctacgacgcccttcacatgcaggccctgccccctcgctctagaggatctggagcaacaaacttctcactactcaaacaagcaggtgacgtggaggagaatcccgggcctgggatccacatggccacttacgaggttctctgtgaggtggcgcggaaactgggcacggatgacagggaagtggtattgttcctcctaaacgtgttcatacctcaacccacactggcccaattaattggagctcttagagctttaaaggaggagggcaggttaacgtttcccctgttagcggaatgtctgtttcgtgcaggtcgcagagacctcttgcgcgacctgcttcacttagacccgcgttttttagagcgccacctagcgggcacaatgagttatttcagcccttatcagctcactgttctccacgtagacggggagctgtgtgcgagggatattaggtctttgatatttttaagcaaggacactatagggtctcgcagcacaccacagacattcttacactgggtgtactgtatggaaaacttagacctactgggtcccactgacgtggatgccctaatgtcaatgcttagatctttgtcaagagtagacctacagcgccaagtgcaaaccctaatgggccttcacctttccggcccatcacactcccaacactatcgccatacaccactcgagaccgatttctacgactacaaggacgacgatgacaagactagtggctccggcgagggcagaggaagtctactaacctgcggagatgtggaagaaaatcctggcccacatatgaccgagtacaagcccacggtgcgcctcgccacccgcgacgacgtccccagggccgtacgcaccctcgccgccgcgttcgccgactaccccgccacgcgccacaccgtcgatccggaccgccacatcgagcgggtcaccgagctgcaagaactcttcctcacgcgcgtcgggctcgacatcggcaaggtgtgggtcgcggacgacggcgccgcggtggcggtctggaccacgccggagagcgtcgaagcgggggcggtgttcgccgagatcggcccgcgcatggccgagttgagcggttcccggctggccgcgcagcaacagatggaaggcctcctggcgccgcaccggcccaaggagcccgcgtggttcctggccaccgtcggcgtctcgcccgaccaccagggcaagggtctgggcagcgccgtcgtgctccccggagtggaggcggccgagcgcgccggggtgcccgccttcctggagacctccgcgccccgcaacctccccttctacgagcggctcggcttcaccgtcaccgccgacgtcgaggtgcccgaaggaccgcgcacctggtgcatgacccgcaagcccggtgcctga

SEQ ID NO: 1292 - DNA, 2853 bp, Artificial Sequence
  Synthetic Polynucleotides
atggccttaccagtgaccgccttgctcctgccgctggccttgctgctccacgccgccaggccgcagagcccatctagcctggctgtgtctgccggcgagaaagtgaccatgagctgcaagagcagccagagcctgctgaacagccggacccggaagaactacctggcctggtatcagcagaagcccggccagagccccaagctgctgatctactgggccagcaccagagaaagcggcgtgcccgatagattcaccggctctggcagcggcaccgacttcaccctgacaatcagcagcgtgcaggccgaggacctggccgtgtactactgcaagcagagcaacctgtacaccttcggcggaggcaccaagctggaaatcaagggcggaggcggaagtggaggcggaggatctggcggcggaggctctcaggtgcagctggaagagtctggacccgagcttgtgaagcctggggccagcgtgaagctgtcctgtaaagccagcggctacaccttcaccgagtacatcatccactgggtcaagcagcggagcggccagggcctggaatggatcggctggttttaccctggctccggcagcatcaagtacaacgagaagttcaaggacaaggccaccctgaccgccgacaagtccagcagcaccgtgtacatggaactgagcggcctgaccagcgaggacagcgccgtgtatttctgcgccagacacgacggctacagctacttcgactattggggccagggcaccacactgaccgtgtcctctacgcgtgagcagaaactgatctcggaagaggatctggcgaagcccaccacgacgccagcgccgcgaccaccaacaccggcgcccaccatcgcgtcgcagcccctgtccctgcgcccagaggcgtgccggccagcggcggggggcgcagtgcacacgagggggctggacttcgcctgtgacatctacatctgggcgcccttggccgggacttgtggggtccttctcctgtcactggttatcaccctttactgcaaacggggcagaaagaaactcctgtatatattcaaacaaccatttatgagaccagtacaaactactcaagaggaagatggctgtagctgccgatttccagaagaagaagaaggaggatgtgaactgagagtgaagttcagcaggagcgcagacgcccccgcgtaccagcagggccagaaccagctctataacgagctgaatctaggacgaagagaggagtacgatgttttggacaagagacgtggccgggaccctgagatggggggaaagccgagaaggaagaaccctcaggaaggcctgtacaatgaactgcagaaagataagatggcggaggcctacagtgagattgggatgaaaggcgagcgccggaggggcaaggggcacgatggcctttaccagggtctcagtacagccaccaaggacacctacgacgcccttcacatgcaggccctgccccctcgctctagaggatctggagcaacaaacttctcactactcaaacaagcaggtgacgtggaggagaatcccgggcctgggatccacatggccacttacgaggttctctgtgaggtggcgcggaaactgggcacggatgacagggaagtggtattgttcctcctaaacgtgttcatacctcaacccacactggcccaattaattggagctcttagagctttaaaggaggagggcaggttaacgtttcccctgttagcggaatgtctgtttcgtgcaggtcgcagagacctcttgcgcgacctgcttcacttagacccgcgttttttagagcgccacctagcgggcacaatgagttatttcagcccttatcagctcactgttctccacgtagacggggagctgtgtgcgagggatattaggtctttgatatttttaagcaaggacactatagggtctcgcagcacaccacagacattcttacactgggtgtactgtatggaaaacttagacctactgggtcccactgacgtggatgccctaatgtcaatgcttagatctttgtcaagagtagacctacagcgccaagtgcaaaccctaatgggccttcacctttccggcccatcacactcccaacactatcgccatacaccactcgagaccgatttctacgactacaaggacgacgatgacaagactagtggctccggcgagggcagaggaagtctactaacctgcggagatgtggaagaaaatcctggcccacatatgaccgagtacaagcccacggtgcgcctcgccacccgcgacgacgtccccagggccgtacgcaccctcgccgccgcgttcgccgactaccccgccacgcgccacaccgtcgatccggaccgccacatcgagcgggtcaccgagctgcaagaactcttcctcacgcgcgtcgggctcgacatcggcaaggtgtgggtcgcggacgacggcgccgcggtggcggtctggaccacgccggagagcgtcgaagcgggggcggtgttcgccgagatcggcccgcgcatggccgagttgagcggttcccggctggccgcgcagcaacagatggaaggcctcctggcgccgcaccggcccaaggagcccgcgtggttcctggccaccgtcggcgtctcgcccgaccaccagggcaagggtctgggcagcgccgtcgtgctccccggagtggaggcggccgagcgcgccggggtgcccgccttcctggagacctccgcgccccgcaacctccccttctacgagcggctcggcttcaccgtcaccgccgacgtcgaggtgcccgaaggaccgcgcacctggtgcatgacccgcaagcccggtgcctga

SEQ ID NO: 1293 - DNA, 2889 bp, Artificial Sequence
  Synthetic Polynucleotides
atggaaatgttccagggcctgctgctgctcctgctgctttctatgggaggcacatgggccagcagagagatgctgaggcccagatgcagacccatcaatgccacactggccgtggaaaaagagggctgccctgtctgcatcaccgtgaacaccacaatctgcgccggctactgccccaccatgacaagagttctgcaaggcgtgctgcccgctctgcctcaggtcgtgtgcaactatcgggacgtccgcttcgagagcatcagactgcctggatgtcccagaggcgtgaaccctgtggtgtcttatgccgtggctctgagctgtcagtgcgccctgtgtagaagaagcaccaccgattgcggcggacccaaggatcaccctctgacctgtgacgaccctagattccaggccagcagcagctctaaagcccctccaccttctctgccatctccaagcagactgcccggacctagcgacacacctattctgcctcaaggcggaggcggaagtggaggcggaggatctggcggcggaggctctgctcctgatgtgcaggattgccctgagtgcaccctgcaagagaaccccttcttctcccaacctggcgctcctatcctccagtgcatgggctgctgcttcagccgggcttatcccacacctctgcggagcaagaaaaccatgctggtccagaaaaacgtgaccagcgagagcacctgttgtgtggctaagagctacaacagagtgaccgtgatgggcggcttcaaggtggaaaatcacaccgcctgccactgctccacctgttactaccacaagagcacgcgtgagcagaaactgatctcggaagaggatctggcgaagcccaccacgacgccagcgccgcgaccaccaacaccggcgcccaccatcgcgtcgcagcccctgtccctgcgcccagaggcgtgccggccagcggcggggggcgcagtgcacacgagggggctggacttcgcctgtgacatctacatctgggcgcccttggccgggacttgtggggtccttctcctgtcactggttatcaccctttactgcaaacggggcagaaagaaactcctgtatatattcaaacaaccatttatgagaccagtacaaactactcaagaggaagatggctgtagctgccgatttccagaagaagaagaaggaggatgtgaactgagagtgaagttcagcaggagcgcagacgcccccgcgtaccagcagggccagaaccagctctataacgagctgaatctaggacgaagagaggagtacgatgttttggacaagagacgtggccgggaccctgagatggggggaaagccgagaaggaagaaccctcaggaaggcctgtacaatgaactgcagaaagataagatggcggaggcctacagtgagattgggatgaaaggcgagcgccggaggggcaaggggcacgatggcctttaccagggtctcagtacagccaccaaggacacctacgacgcccttcacatgcaggccctgccccctcgctctagaggatctggagcaacaaacttctcactactcaaacaagcaggtgacgtggaggagaatcccgggcctgggatccacatggccacttacgaggttctctgtgaggtggcgcggaaactgggcacggatgacagggaagtggtattgttcctcctaaacgtgttcatacctcaacccacactggcccaattaattggagctcttagagctttaaaggaggagggcaggttaacgtttcccctgttagcggaatgtctgtttcgtgcaggtcgcagagacctcttgcgcgacctgcttcacttagacccgcgttttttagagcgccacctagcgggcacaatgagttatttcagcccttatcagctcactgttctccacgtagacggggagctgtgtgcgagggatattaggtctttgatatttttaagcaaggacactatagggtctcgcagcacaccacagacattcttacactgggtgtactgtatggaaaacttagacctactgggtcccactgacgtggatgccctaatgtcaatgcttagatctttgtcaagagtagacctacagcgccaagtgcaaaccctaatgggccttcacctttccggcccatcacactcccaacactatcgccatacaccactcgagaccgatttctacgactacaaggacgacgatgacaagactagtggctccggcgagggcagaggaagtctactaacctgcggagatgtggaagaaaatcctggcccacatatgaccgagtacaagcccacggtgcgcctcgccacccgcgacgacgtccccagggccgtacgcaccctcgccgccgcgttcgccgactaccccgccacgcgccacaccgtcgatccggaccgccacatcgagcgggtcaccgagctgcaagaactcttcctcacgcgcgtcgggctcgacatcggcaaggtgtgggtcgcggacgacggcgccgcggtggcggtctggaccacgccggagagcgtcgaagcgggggcggtgttcgccgagatcggcccgcgcatggccgagttgagcggttcccggctggccgcgcagcaacagatggaaggcctcctggcgccgcaccggcccaaggagcccgcgtggttcctggccaccgtcggcgtctcgcccgaccaccagggcaagggtctgggcagcgccgtcgtgctccccggagtggaggcggccgagcgcgccggggtgcccgccttcctggagacctccgcgccccgcaacctccccttctacgagcggctcggcttcaccgtcaccgccgacgtcgaggtgcccgaaggaccgcgcacctggtgcatgacccgcaagcccggtgcctga

SEQ ID NO: 1294 - DNA, 2862 bp, Artificial Sequence
  Synthetic Polynucleotides
atggccttaccagtgaccgccttgctcctgccgctggccttgctgctccacgccgccaggccggacatccagatgacccagagccccagcagcctgtctgcctctctgggcgagagagtgtccctgacctgtcgggccacacaggaactgagcggctacctgtcttggctgcagcagaagcccgacggcaccatcaagcggctgatctacgccgccagcaccctggatagcggcgtgcccaagagattcagcggcaacagaagcggcagcgactacagcctgaccatcagctccctggaaagcgaggacttcgccgactactactgcctgcagtacgccatctacccctacaccttcggcggaggcaccaagctggaaatcaagggcggaggcggaagtggaggcggaggatctggcggcggaggctctgaggtgcaactgcagcagtctggccccgagcttgtgaagcctggcgcctccgtgaagatgagctgcaaggccagcggctacacctttaccagctacttcatccactgggtcaagcagaaacccggccagggcctggaatggatcggcttcatcaacccttacaacgacggcagcaagtacaacgagaagttcaagggcaaggccaccctgaccagcgacaagagcagcagcaccgcctacatggaactgtccagcctgacatccgaggacagcgccgtgtactactgcaccagggacgacggctactacggctacgccatggactactggggccagggaacaagcgtcaccgtgtcctctacgcgtgagcagaaactgatctcggaagaggatctggcgaagcccaccacgacgccagcgccgcgaccaccaacaccggcgcccaccatcgcgtcgcagcccctgtccctgcgcccagaggcgtgccggccagcggcggggggcgcagtgcacacgagggggctggacttcgcctgtgacatctacatctgggcgcccttggccgggacttgtggggtccttctcctgtcactggttatcaccctttactgcaaacggggcagaaagaaactcctgtatatattcaaacaaccatttatgagaccagtacaaactactcaagaggaagatggctgtagctgccgatttccagaagaagaagaaggaggatgtgaactgagagtgaagttcagcaggagcgcagacgcccccgcgtaccagcagggccagaaccagctctataacgagctgaatctaggacgaagagaggagtacgatgttttggacaagagacgtggccgggaccctgagatggggggaaagccgagaaggaagaaccctcaggaaggcctgtacaatgaactgcagaaagataagatggcggaggcctacagtgagattgggatgaaaggcgagcgccggaggggcaaggggcacgatggcctttaccagggtctcagtacagccaccaaggacacctacgacgcccttcacatgcaggccctgccccctcgctctagaggatctggagcaacaaacttctcactactcaaacaagcaggtgacgtggaggagaatcccgggcctgggatccacatggccacttacgaggttctctgtgaggtggcgcggaaactgggcacggatgacagggaagtggtattgttcctcctaaacgtgttcatacctcaacccacactggcccaattaattggagctcttagagctttaaaggaggagggcaggttaacgtttcccctgttagcggaatgtctgtttcgtgcaggtcgcagagacctcttgcgcgacctgcttcacttagacccgcgttttttagagcgccacctagcgggcacaatgagttatttcagcccttatcagctcactgttctccacgtagacggggagctgtgtgcgagggatattaggtctttgatatttttaagcaaggacactatagggtctcgcagcacaccacagacattcttacactgggtgtactgtatggaaaacttagacctactgggtcccactgacgtggatgccctaatgtcaatgcttagatctttgtcaagagtagacctacagcgccaagtgcaaaccctaatgggccttcacctttccggcccatcacactcccaacactatcgccatacaccactcgagaccgatttctacgactacaaggacgacgatgacaagactagtggctccggcgagggcagaggaagtctactaacctgcggagatgtggaagaaaatcctggcccacatatgaccgagtacaagcccacggtgcgcctcgccacccgcgacgacgtccccagggccgtacgcaccctcgccgccgcgttcgccgactaccccgccacgcgccacaccgtcgatccggaccgccacatcgagcgggtcaccgagctgcaagaactcttcctcacgcgcgtcgggctcgacatcggcaaggtgtgggtcgcggacgacggcgccgcggtggcggtctggaccacgccggagagcgtcgaagcgggggcggtgttcgccgagatcggcccgcgcatggccgagttgagcggttcccggctggccgcgcagcaacagatggaaggcctcctggcgccgcaccggcccaaggagcccgcgtggttcctggccaccgtcggcgtctcgcccgaccaccagggcaagggtctgggcagcgccgtcgtgctccccggagtggaggcggccgagcgcgccggggtgcccgccttcctggagacctccgcgccccgcaacctccccttctacgagcggctcggcttcaccgtcaccgccgacgtcgaggtgcccgaaggaccgcgcacctggtgcatgacccgcaagcccggtgcctga

SEQ ID NO: 1295 - DNA, 2877 bp, Artificial Sequence
  Synthetic Polynucleotides
atggccttaccagtgaccgccttgctcctgccgctggccttgctgctccacgccgccaggccggacaccatcgtgctgacacagagccctgcttccctggccgtgtccctgggacagagagccaccatctcttgcagagccagcgagagcgtggacagctacggcaacagcttcatgcactggtatcagcagaagcccggccagccccccaagctgctgatctacctggcctccaacctggaaagcggcgtgcccgccagattttctggcagcggcagcagaaccgacttcaccctgaccatcgaccccgtggaagccgatgatgccgccacctactactgccagcagaacaactacgacccctggaccttcggcggaggcaccaagctggaaatcaagggcggaggcggaagtggaggcggaggatctggcggcggaggctctgaagtgcaactccagcagagcggccctgagcttgtgaagcctggcgcttccgtgaagatgagctgcaaggccagcggctacaccttcaccagctacgtgatgcactgggtcaagcagaaacctggacagggcctggaatggatcggctacatcaacccctacaacgacggcaccaagtacaacgagaagttcaagggcaaggccaccctgacaagcgacaccagcagcagcaccgcctacatggaactgaacagcctgaccagcgaggacagcgccgtgtacttctgcgccagacccatctacttcgacaacgactacttcgattactggggccagggcaccaccctgaaggtgtcctctacgcgtgagcagaaactgatctcggaagaggatctggcgaagcccaccacgacgccagcgccgcgaccaccaacaccggcgcccaccatcgcgtcgcagcccctgtccctgcgcccagaggcgtgccggccagcggcggggggcgcagtgcacacgagggggctggacttcgcctgtgacatctacatctgggcgcccttggccgggacttgtggggtccttctcctgtcactggttatcaccctttactgcaaacggggcagaaagaaactcctgtatatattcaaacaaccatttatgagaccagtacaaactactcaagaggaagatggctgtagctgccgatttccagaagaagaagaaggaggatgtgaactgagagtgaagttcagcaggagcgcagacgcccccgcgtaccagcagggccagaaccagctctataacgagctgaatctaggacgaagagaggagtacgatgttttggacaagagacgtggccgggaccctgagatggggggaaagccgagaaggaagaaccctcaggaaggcctgtacaatgaactgcagaaagataagatggcggaggcctacagtgagattgggatgaaaggcgagcgccggaggggcaaggggcacgatggcctttaccagggtctcagtacagccaccaaggacacctacgacgcccttcacatgcaggccctgccccctcgctctagaggatctggagcaacaaacttctcactactcaaacaagcaggtgacgtggaggagaatcccgggcctgggatccacatggccacttacgaggttctctgtgaggtggcgcggaaactgggcacggatgacagggaagtggtattgttcctcctaaacgtgttcatacctcaacccacactggcccaattaattggagctcttagagctttaaaggaggagggcaggttaacgtttcccctgttagcggaatgtctgtttcgtgcaggtcgcagagacctcttgcgcgacctgcttcacttagacccgcgttttttagagcgccacctagcgggcacaatgagttatttcagcccttatcagctcactgttctccacgtagacggggagctgtgtgcgagggatattaggtctttgatatttttaagcaaggacactatagggtctcgcagcacaccacagacattcttacactgggtgtactgtatggaaaacttagacctactgggtcccactgacgtggatgccctaatgtcaatgcttagatctttgtcaagagtagacctacagcgccaagtgcaaaccctaatgggccttcacctttccggcccatcacactcccaacactatcgccatacaccactcgagaccgatttctacgactacaaggacgacgatgacaagactagtggctccggcgagggcagaggaagtctactaacctgcggagatgtggaagaaaatcctggcccacatatgaccgagtacaagcccacggtgcgcctcgccacccgcgacgacgtccccagggccgtacgcaccctcgccgccgcgttcgccgactaccccgccacgcgccacaccgtcgatccggaccgccacatcgagcgggtcaccgagctgcaagaactcttcctcacgcgcgtcgggctcgacatcggcaaggtgtgggtcgcggacgacggcgccgcggtggcggtctggaccacgccggagagcgtcgaagcgggggcggtgttcgccgagatcggcccgcgcatggccgagttgagcggttcccggctggccgcgcagcaacagatggaaggcctcctggcgccgcaccggcccaaggagcccgcgtggttcctggccaccgtcggcgtctcgcccgaccaccagggcaagggtctgggcagcgccgtcgtgctccccggagtggaggcggccgagcgcgccggggtgcccgccttcctggagacctccgcgccccgcaacctccccttctacgagcggctcggcttcaccgtcaccgccgacgtcgaggtgcccgaaggaccgcgcacctggtgcatgacccgcaagcccggtgcctga

SEQ ID NO: 1296 - DNA, 2862 bp, Artificial Sequence
  Synthetic Polynucleotides
atggccttaccagtgaccgccttgctcctgccgctggccttgctgctccacgccgccaggccggacatccagatgacacagagccctagcagcctgtctgccagcgtgggagacagagtgaccatcacatgcaaggccagccaggatgtgtctacagccgtggcctggttccagcagaagcctggaaaagcccctaagctgctgatctacagccccagctacagatacaccggcgtgcccagcagattttctggcagcggctctggcaccgacttcaccctgacaatatccagcctccagcctgaggacttcacctactactgccagcagctctacagcaccccttacacattcggccagggcaccaaggtggaaatcaaaggcggaggcggaagtggaggcggaggatctggcggcggaggctctgaagtgcaactggttcagagcggagccgaagtgaagaaacctggggcctctgtgaaggtgtcctgcaaagccagcggctacacctttaccgactactacctggacgtggtcgtgcggcaagctcctggacaaggactggaatggatcggcagagtgaacccctacaacggcggcaccatctacaaccagaaattcaagggaagagtgaccctgaccagagacaccagcacctccacagcctacctggaactgagcagcctgagaagcgaagataccgccgtgtactactgcgccagggaccactacagatatgaccctctgctggactactggggccagggaaccctggttacagtgtctagtacgcgtgagcagaaactgatctcggaagaggatctggcgaagcccaccacgacgccagcgccgcgaccaccaacaccggcgcccaccatcgcgtcgcagcccctgtccctgcgcccagaggcgtgccggccagcggcggggggcgcagtgcacacgagggggctggacttcgcctgtgacatctacatctgggcgcccttggccgggacttgtggggtccttctcctgtcactggttatcaccctttactgcaaacggggcagaaagaaactcctgtatatattcaaacaaccatttatgagaccagtacaaactactcaagaggaagatggctgtagctgccgatttccagaagaagaagaaggaggatgtgaactgagagtgaagttcagcaggagcgcagacgcccccgcgtaccagcagggccagaaccagctctataacgagctgaatctaggacgaagagaggagtacgatgttttggacaagagacgtggccgggaccctgagatggggggaaagccgagaaggaagaaccctcaggaaggcctgtacaatgaactgcagaaagataagatggcggaggcctacagtgagattgggatgaaaggcgagcgccggaggggcaaggggcacgatggcctttaccagggtctcagtacagccaccaaggacacctacgacgcccttcacatgcaggccctgccccctcgctctagaggatctggagcaacaaacttctcactactcaaacaagcaggtgacgtggaggagaatcccgggcctgggatccacatggccacttacgaggttctctgtgaggtggcgcggaaactgggcacggatgacagggaagtggtattgttcctcctaaacgtgttcatacctcaacccacactggcccaattaattggagctcttagagctttaaaggaggagggcaggttaacgtttcccctgttagcggaatgtctgtttcgtgcaggtcgcagagacctcttgcgcgacctgcttcacttagacccgcgttttttagagcgccacctagcgggcacaatgagttatttcagcccttatcagctcactgttctccacgtagacggggagctgtgtgcgagggatattaggtctttgatatttttaagcaaggacactatagggtctcgcagcacaccacagacattcttacactgggtgtactgtatggaaaacttagacctactgggtcccactgacgtggatgccctaatgtcaatgcttagatctttgtcaagagtagacctacagcgccaagtgcaaaccctaatgggccttcacctttccggcccatcacactcccaacactatcgccatacaccactcgagaccgatttctacgactacaaggacgacgatgacaagactagtggctccggcgagggcagaggaagtctactaacctgcggagatgtggaagaaaatcctggcccacatatgaccgagtacaagcccacggtgcgcctcgccacccgcgacgacgtccccagggccgtacgcaccctcgccgccgcgttcgccgactaccccgccacgcgccacaccgtcgatccggaccgccacatcgagcgggtcaccgagctgcaagaactcttcctcacgcgcgtcgggctcgacatcggcaaggtgtgggtcgcggacgacggcgccgcggtggcggtctggaccacgccggagagcgtcgaagcgggggcggtgttcgccgagatcggcccgcgcatggccgagttgagcggttcccggctggccgcgcagcaacagatggaaggcctcctggcgccgcaccggcccaaggagcccgcgtggttcctggccaccgtcggcgtctcgcccgaccaccagggcaagggtctgggcagcgccgtcgtgctccccggagtggaggcggccgagcgcgccggggtgcccgccttcctggagacctccgcgccccgcaacctccccttctacgagcggctcggcttcaccgtcaccgccgacgtcgaggtgcccgaaggaccgcgcacctggtgcatgacccgcaagcccggtgcctga

SEQ ID NO: 1297 - DNA, 2880 bp, Artificial Sequence
  Synthetic Polynucleotides
atggccttaccagtgaccgccttgctcctgccgctggccttgctgctccacgccgccaggccggacatccagatgacacagagccctagcagcctgtctgccagcgtgggagacagagtgaccatcacctgtagagccagccagagcgtgtccaccagcagctacaactacatgcactggtatcagcagaagcccggcaagcctcctaagctgctgattaagtacgccagcaacctggaaagcggcgtgcccagcagattttctggcagcggctctggcaccgacttcaccctgacaatatccagcctccagcctgaggacttcgccacctactactgtcagcactcctgggagatccctctgacattcggccagggcaccaaggtggaaatcaaaggcggaggcggaagtggaggcggaggatctggcggcggaggctctgaagtgcaactggttcagagcggagccgaagtgaagaaacctggggcctctgtgaaggtgtcctgcaaggccagcggctacagcttcaccgactattatatgcactgggtccgacaggctccaggccagggacttgagtggatcggcagaatcaacccctacaacggcgctgccttctacagccagaacttcaaggatagagtgaccctgaccgtggacaccagcaccagcacagcctacctggaactgagcagcctgagaagcgaggacaccgccgtgtactactgcgccattgagagaggcgctgacctggaaggctacgctatggattattggggccagggaaccctggtcaccgtgtcatctacgcgtgagcagaaactgatctcggaagaggatctggcgaagcccaccacgacgccagcgccgcgaccaccaacaccggcgcccaccatcgcgtcgcagcccctgtccctgcgcccagaggcgtgccggccagcggcggggggcgcagtgcacacgagggggctggacttcgcctgtgacatctacatctgggcgcccttggccgggacttgtggggtccttctcctgtcactggttatcaccctttactgcaaacggggcagaaagaaactcctgtatatattcaaacaaccatttatgagaccagtacaaactactcaagaggaagatggctgtagctgccgatttccagaagaagaagaaggaggatgtgaactgagagtgaagttcagcaggagcgcagacgcccccgcgtaccagcagggccagaaccagctctataacgagctgaatctaggacgaagagaggagtacgatgttttggacaagagacgtggccgggaccctgagatggggggaaagccgagaaggaagaaccctcaggaaggcctgtacaatgaactgcagaaagataagatggcggaggcctacagtgagattgggatgaaaggcgagcgccggaggggcaaggggcacgatggcctttaccagggtctcagtacagccaccaaggacacctacgacgcccttcacatgcaggccctgccccctcgctctagaggatctggagcaacaaacttctcactactcaaacaagcaggtgacgtggaggagaatcccgggcctgggatccacatggccacttacgaggttctctgtgaggtggcgcggaaactgggcacggatgacagggaagtggtattgttcctcctaaacgtgttcatacctcaacccacactggcccaattaattggagctcttagagctttaaaggaggagggcaggttaacgtttcccctgttagcggaatgtctgtttcgtgcaggtcgcagagacctcttgcgcgacctgcttcacttagacccgcgttttttagagcgccacctagcgggcacaatgagttatttcagcccttatcagctcactgttctccacgtagacggggagctgtgtgcgagggatattaggtctttgatatttttaagcaaggacactatagggtctcgcagcacaccacagacattcttacactgggtgtactgtatggaaaacttagacctactgggtcccactgacgtggatgccctaatgtcaatgcttagatctttgtcaagagtagacctacagcgccaagtgcaaaccctaatgggccttcacctttccggcccatcacactcccaacactatcgccatacaccactcgagaccgatttctacgactacaaggacgacgatgacaagactagtggctccggcgagggcagaggaagtctactaacctgcggagatgtggaagaaaatcctggcccacatatgaccgagtacaagcccacggtgcgcctcgccacccgcgacgacgtccccagggccgtacgcaccctcgccgccgcgttcgccgactaccccgccacgcgccacaccgtcgatccggaccgccacatcgagcgggtcaccgagctgcaagaactcttcctcacgcgcgtcgggctcgacatcggcaaggtgtgggtcgcggacgacggcgccgcggtggcggtctggaccacgccggagagcgtcgaagcgggggcggtgttcgccgagatcggcccgcgcatggccgagttgagcggttcccggctggccgcgcagcaacagatggaaggcctcctggcgccgcaccggcccaaggagcccgcgtggttcctggccaccgtcggcgtctcgcccgaccaccagggcaagggtctgggcagcgccgtcgtgctccccggagtggaggcggccgagcgcgccggggtgcccgccttcctggagacctccgcgccccgcaacctccccttctacgagcggctcggcttcaccgtcaccgccgacgtcgaggtgcccgaaggaccgcgcacctggtgcatgacccgcaagcccggtgcctga

SEQ ID NO: 1298 - DNA, 2874 bp, Artificial Sequence
  Synthetic Polynucleotides
atggccttaccagtgaccgccttgctcctgccgctggccttgctgctccacgccgccaggccggagatcgtgctgacacagtctccagccacactgagcgcttctccaggcgagagagtgaccctgacctgtagagccagcagcaacgtgatctccagctacgtgcactggtatcagcagaagcctggcagcagccccagactgtttctgtacagcaccagcaatctggcctccggcgtgccaagcagattttctggctctggcagcggcaccgacttcacctttaccatctctagcctggaagccgaggacgccgccacctactactgtcagcagtacagcggctaccctctgaccttcggccagggcacaagactggaaatcaaaggcggaggcggaagtggaggcggaggatctggcggcggaggctctcaagttcagctgcaagagtctggccctggcctggtcaagcctagcgaaacactgagcctgacctgcgccgtgtctggctactctatcaccagcgcctactattggaactggatcagacagcctcctggcaaaggactggaatggatcggctacatcagctacgacggcagaaacaactacaaccccagcctgaagaaccggatcaccatcaatcccgacaccagcaagaaccagttcagcctccagctgaacagcgtgacccctgaggataccgccgtgtactactgtgccagagaaggcgactacgacgtgggcaactactacgctatggactactggggccagggaaccctggtcacagtctcttctacgcgtgagcagaaactgatctcggaagaggatctggcgaagcccaccacgacgccagcgccgcgaccaccaacaccggcgcccaccatcgcgtcgcagcccctgtccctgcgcccagaggcgtgccggccagcggcggggggcgcagtgcacacgagggggctggacttcgcctgtgacatctacatctgggcgcccttggccgggacttgtggggtccttctcctgtcactggttatcaccctttactgcaaacggggcagaaagaaactcctgtatatattcaaacaaccatttatgagaccagtacaaactactcaagaggaagatggctgtagctgccgatttccagaagaagaagaaggaggatgtgaactgagagtgaagttcagcaggagcgcagacgcccccgcgtaccagcagggccagaaccagctctataacgagctgaatctaggacgaagagaggagtacgatgttttggacaagagacgtggccgggaccctgagatggggggaaagccgagaaggaagaaccctcaggaaggcctgtacaatgaactgcagaaagataagatggcggaggcctacagtgagattgggatgaaaggcgagcgccggaggggcaaggggcacgatggcctttaccagggtctcagtacagccaccaaggacacctacgacgcccttcacatgcaggccctgccccctcgctctagaggatctggagcaacaaacttctcactactcaaacaagcaggtgacgtggaggagaatcccgggcctgggatccacatggccacttacgaggttctctgtgaggtggcgcggaaactgggcacggatgacagggaagtggtattgttcctcctaaacgtgttcatacctcaacccacactggcccaattaattggagctcttagagctttaaaggaggagggcaggttaacgtttcccctgttagcggaatgtctgtttcgtgcaggtcgcagagacctcttgcgcgacctgcttcacttagacccgcgttttttagagcgccacctagcgggcacaatgagttatttcagcccttatcagctcactgttctccacgtagacggggagctgtgtgcgagggatattaggtctttgatatttttaagcaaggacactatagggtctcgcagcacaccacagacattcttacactgggtgtactgtatggaaaacttagacctactgggtcccactgacgtggatgccctaatgtcaatgcttagatctttgtcaagagtagacctacagcgccaagtgcaaaccctaatgggccttcacctttccggcccatcacactcccaacactatcgccatacaccactcgagaccgatttctacgactacaaggacgacgatgacaagactagtggctccggcgagggcagaggaagtctactaacctgcggagatgtggaagaaaatcctggcccacatatgaccgagtacaagcccacggtgcgcctcgccacccgcgacgacgtccccagggccgtacgcaccctcgccgccgcgttcgccgactaccccgccacgcgccacaccgtcgatccggaccgccacatcgagcgggtcaccgagctgcaagaactcttcctcacgcgcgtcgggctcgacatcggcaaggtgtgggtcgcggacgacggcgccgcggtggcggtctggaccacgccggagagcgtcgaagcgggggcggtgttcgccgagatcggcccgcgcatggccgagttgagcggttcccggctggccgcgcagcaacagatggaaggcctcctggcgccgcaccggcccaaggagcccgcgtggttcctggccaccgtcggcgtctcgcccgaccaccagggcaagggtctgggcagcgccgtcgtgctccccggagtggaggcggccgagcgcgccggggtgcccgccttcctggagacctccgcgccccgcaacctccccttctacgagcggctcggcttcaccgtcaccgccgacgtcgaggtgcccgaaggaccgcgcacctggtgcatgacccgcaagcccggtgcctga

SEQ ID NO: 1299 - DNA, 2874 bp, Artificial Sequence
  Synthetic Polynucleotides
atggccttaccagtgaccgccttgctcctgccgctggccttgctgctccacgccgccaggccggagatcgtgctgacacagtctcccgccacactgtcactgtctccaggcgaaagagccacactgagctgtagagccagcagcaacgtgatctccagctacgtgcactggtatcagcagaagcctggacaggcccctcggctgctgatctacagcacaagcaatctggcctctggcatccccgccagattttctggctctggaagcggcaccgacttcaccctgaccataagcagcctggaacctgaggacttcgccgtgtactactgccagcagtatagcggctaccctctgaccttcggccagggcacaagactggaaatcaaaggcggaggcggaagtggaggcggaggatctggcggcggaggctctgaagtgcaactggtggaaagtggcggcggactggtgcaacctggaagaagcctgagactgtcctgtgccgccagcggctactctatcacaagcgcctactactggaactgggtccgacaggctcctggcaaaggactggaatgggtgtcctacatcagctacgacggcagaaacaactacaaccccagcctgaagaaccgcttcaccatcagccgggacaacgccaagaagtccctgtacctccagatgaacagcctgagagccgaggacacagccctgtactattgcgccaaagagggcgactacgacgtcggcaactactacgctatggactactggggccagggaaccaccgtgactgtctcttctacgcgtgagcagaaactgatctcggaagaggatctggcgaagcccaccacgacgccagcgccgcgaccaccaacaccggcgcccaccatcgcgtcgcagcccctgtccctgcgcccagaggcgtgccggccagcggcggggggcgcagtgcacacgagggggctggacttcgcctgtgacatctacatctgggcgcccttggccgggacttgtggggtccttctcctgtcactggttatcaccctttactgcaaacggggcagaaagaaactcctgtatatattcaaacaaccatttatgagaccagtacaaactactcaagaggaagatggctgtagctgccgatttccagaagaagaagaaggaggatgtgaactgagagtgaagttcagcaggagcgcagacgcccccgcgtaccagcagggccagaaccagctctataacgagctgaatctaggacgaagagaggagtacgatgttttggacaagagacgtggccgggaccctgagatggggggaaagccgagaaggaagaaccctcaggaaggcctgtacaatgaactgcagaaagataagatggcggaggcctacagtgagattgggatgaaaggcgagcgccggaggggcaaggggcacgatggcctttaccagggtctcagtacagccaccaaggacacctacgacgcccttcacatgcaggccctgccccctcgctctagaggatctggagcaacaaacttctcactactcaaacaagcaggtgacgtggaggagaatcccgggcctgggatccacatggccacttacgaggttctctgtgaggtggcgcggaaactgggcacggatgacagggaagtggtattgttcctcctaaacgtgttcatacctcaacccacactggcccaattaattggagctcttagagctttaaaggaggagggcaggttaacgtttcccctgttagcggaatgtctgtttcgtgcaggtcgcagagacctcttgcgcgacctgcttcacttagacccgcgttttttagagcgccacctagcgggcacaatgagttatttcagcccttatcagctcactgttctccacgtagacggggagctgtgtgcgagggatattaggtctttgatatttttaagcaaggacactatagggtctcgcagcacaccacagacattcttacactgggtgtactgtatggaaaacttagacctactgggtcccactgacgtggatgccctaatgtcaatgcttagatctttgtcaagagtagacctacagcgccaagtgcaaaccctaatgggccttcacctttccggcccatcacactcccaacactatcgccatacaccactcgagaccgatttctacgactacaaggacgacgatgacaagactagtggctccggcgagggcagaggaagtctactaacctgcggagatgtggaagaaaatcctggcccacatatgaccgagtacaagcccacggtgcgcctcgccacccgcgacgacgtccccagggccgtacgcaccctcgccgccgcgttcgccgactaccccgccacgcgccacaccgtcgatccggaccgccacatcgagcgggtcaccgagctgcaagaactcttcctcacgcgcgtcgggctcgacatcggcaaggtgtgggtcgcggacgacggcgccgcggtggcggtctggaccacgccggagagcgtcgaagcgggggcggtgttcgccgagatcggcccgcgcatggccgagttgagcggttcccggctggccgcgcagcaacagatggaaggcctcctggcgccgcaccggcccaaggagcccgcgtggttcctggccaccgtcggcgtctcgcccgaccaccagggcaagggtctgggcagcgccgtcgtgctccccggagtggaggcggccgagcgcgccggggtgcccgccttcctggagacctccgcgccccgcaacctccccttctacgagcggctcggcttcaccgtcaccgccgacgtcgaggtgcccgaaggaccgcgcacctggtgcatgacccgcaagcccggtgcctga

SEQ ID NO: 1300 - DNA, 2910 bp, Artificial Sequence
  Synthetic Polynucleotides
atggccttaccagtgaccgccttgctcctgccgctggccttgctgctccacgccgccaggccggacctgaacttcatgctgacccagccccacagcgtgtccggcagccctggaaagaccgtgaccatctcctgcaccagaagcaccggcagcatcaccagcaactacgtgcactggtatcagcagaggcccggcagcagccctaccaccgtgatctgcgaggacaacgagaggccaagcggcgtgcccgatagattcagcggctccatcgacatcagcagcaacagcgccagcctgaccatcagcggcctgaaaaccgaggacgaggccgactactactgccagagctacgacgacagcaaccacatctccgtgttcggcaccgggaccaaagtgaccgtgctgggacagcccaaggccaatcctggcggaggcggaagtggaggcggaggatctggcggcggaggctctcaggtgcaactgcaggaatctggccctggcctcgtgaagcccagcgagacactgagcctgacctgcacagtgtccggcggcagcattagcagcagcaattactactggggctggattcggcagccccctggcaagggactggaatggatcggagccatctactacagcggcagcacctactacaaccccagcctgaagtccagagtggctatcagcgtggacaccagcaagaaccagttctccctgaagctgagcagcgtgacagccgccgataccgccgtgtactactgcgccagacggatcggagtggccggacagtggtacttcgacctgtggggcagaggaaccctcgtgaccgtgtctagcacgcgtgagcagaaactgatctcggaagaggatctggcgaagcccaccacgacgccagcgccgcgaccaccaacaccggcgcccaccatcgcgtcgcagcccctgtccctgcgcccagaggcgtgccggccagcggcggggggcgcagtgcacacgagggggctggacttcgcctgtgacatctacatctgggcgcccttggccgggacttgtggggtccttctcctgtcactggttatcaccctttactgcaaacggggcagaaagaaactcctgtatatattcaaacaaccatttatgagaccagtacaaactactcaagaggaagatggctgtagctgccgatttccagaagaagaagaaggaggatgtgaactgagagtgaagttcagcaggagcgcagacgcccccgcgtaccagcagggccagaaccagctctataacgagctgaatctaggacgaagagaggagtacgatgttttggacaagagacgtggccgggaccctgagatggggggaaagccgagaaggaagaaccctcaggaaggcctgtacaatgaactgcagaaagataagatggcggaggcctacagtgagattgggatgaaaggcgagcgccggaggggcaaggggcacgatggcctttaccagggtctcagtacagccaccaaggacacctacgacgcccttcacatgcaggccctgccccctcgctctagaggatctggagcaacaaacttctcactactcaaacaagcaggtgacgtggaggagaatcccgggcctgggatccacatggccacttacgaggttctctgtgaggtggcgcggaaactgggcacggatgacagggaagtggtattgttcctcctaaacgtgttcatacctcaacccacactggcccaattaattggagctcttagagctttaaaggaggagggcaggttaacgtttcccctgttagcggaatgtctgtttcgtgcaggtcgcagagacctcttgcgcgacctgcttcacttagacccgcgttttttagagcgccacctagcgggcacaatgagttatttcagcccttatcagctcactgttctccacgtagacggggagctgtgtgcgagggatattaggtctttgatatttttaagcaaggacactatagggtctcgcagcacaccacagacattcttacactgggtgtactgtatggaaaacttagacctactgggtcccactgacgtggatgccctaatgtcaatgcttagatctttgtcaagagtagacctacagcgccaagtgcaaaccctaatgggccttcacctttccggcccatcacactcccaacactatcgccatacaccactcgagaccgatttctacgactacaaggacgacgatgacaagactagtggctccggcgagggcagaggaagtctactaacctgcggagatgtggaagaaaatcctggcccacatatgaccgagtacaagcccacggtgcgcctcgccacccgcgacgacgtccccagggccgtacgcaccctcgccgccgcgttcgccgactaccccgccacgcgccacaccgtcgatccggaccgccacatcgagcgggtcaccgagctgcaagaactcttcctcacgcgcgtcgggctcgacatcggcaaggtgtgggtcgcggacgacggcgccgcggtggcggtctggaccacgccggagagcgtcgaagcgggggcggtgttcgccgagatcggcccgcgcatggccgagttgagcggttcccggctggccgcgcagcaacagatggaaggcctcctggcgccgcaccggcccaaggagcccgcgtggttcctggccaccgtcggcgtctcgcccgaccaccagggcaagggtctgggcagcgccgtcgtgctccccggagtggaggcggccgagcgcgccggggtgcccgccttcctggagacctccgcgccccgcaacctccccttctacgagcggctcggcttcaccgtcaccgccgacgtcgaggtgcccgaaggaccgcgcacctggtgcatgacccgcaagcccggtgcctga

SEQ ID NO: 1301 - DNA, 2868 bp, Artificial Sequence
  Synthetic Polynucleotides
atggccttaccagtgaccgccttgctcctgccgctggccttgctgctccacgccgccaggccggacatccagatgacccagagccccagcagcctgagcgccagcgtgggcgacagagtgaccatcacctgcaaggccagccaggacgtgggcatcgccgtggcctggtaccagcagaagcccggcaaggtgcccaagctgctgatctactgggccagcaccagacacaccggcgtgcccgacagattcagcggcagcggcagcggcaccgacttcaccctgaccatcagcagcctgcagcccgaggacgtggccacctactactgccagcagtacagcagctacccctacaccttcggccagggcaccaaggtggagatcaagggcggaggcggaagtggaggcggaggatctggcggcggaggctctcagatccagttggtgcagtctggacctgacctgaagaagcctggagagacagtcaagatcagttgcaaggcttctgggtataccttcacaaacactggaatgaactgggtgaagcaggctccaggaaagggtttaaagtggatgggctggataaatacctacactggagagccaacatacgctgatgacttcaagggacggtttaccttctctttggaaacctctgccagcactgcctatttgcagatcaacaacctcaaaaatgaggacacggctacatatttctgtacaagatggggctacggtagtagcctttattatgctatggactactggggtcaaggaacctcagtcaccgtctcctcaacgcgtgagcagaaactgatctcggaagaggatctggcgaagcccaccacgacgccagcgccgcgaccaccaacaccggcgcccaccatcgcgtcgcagcccctgtccctgcgcccagaggcgtgccggccagcggcggggggcgcagtgcacacgagggggctggacttcgcctgtgacatctacatctgggcgcccttggccgggacttgtggggtccttctcctgtcactggttatcaccctttactgcaaacggggcagaaagaaactcctgtatatattcaaacaaccatttatgagaccagtacaaactactcaagaggaagatggctgtagctgccgatttccagaagaagaagaaggaggatgtgaactgagagtgaagttcagcaggagcgcagacgcccccgcgtaccagcagggccagaaccagctctataacgagctgaatctaggacgaagagaggagtacgatgttttggacaagagacgtggccgggaccctgagatggggggaaagccgagaaggaagaaccctcaggaaggcctgtacaatgaactgcagaaagataagatggcggaggcctacagtgagattgggatgaaaggcgagcgccggaggggcaaggggcacgatggcctttaccagggtctcagtacagccaccaaggacacctacgacgcccttcacatgcaggccctgccccctcgctctagaggatctggagcaacaaacttctcactactcaaacaagcaggtgacgtggaggagaatcccgggcctgggatccacatggccacttacgaggttctctgtgaggtggcgcggaaactgggcacggatgacagggaagtggtattgttcctcctaaacgtgttcatacctcaacccacactggcccaattaattggagctcttagagctttaaaggaggagggcaggttaacgtttcccctgttagcggaatgtctgtttcgtgcaggtcgcagagacctcttgcgcgacctgcttcacttagacccgcgttttttagagcgccacctagcgggcacaatgagttatttcagcccttatcagctcactgttctccacgtagacggggagctgtgtgcgagggatattaggtctttgatatttttaagcaaggacactatagggtctcgcagcacaccacagacattcttacactgggtgtactgtatggaaaacttagacctactgggtcccactgacgtggatgccctaatgtcaatgcttagatctttgtcaagagtagacctacagcgccaagtgcaaaccctaatgggccttcacctttccggcccatcacactcccaacactatcgccatacaccactcgagaccgatttctacgactacaaggacgacgatgacaagactagtggctccggcgagggcagaggaagtctactaacctgcggagatgtggaagaaaatcctggcccacatatgaccgagtacaagcccacggtgcgcctcgccacccgcgacgacgtccccagggccgtacgcaccctcgccgccgcgttcgccgactaccccgccacgcgccacaccgtcgatccggaccgccacatcgagcgggtcaccgagctgcaagaactcttcctcacgcgcgtcgggctcgacatcggcaaggtgtgggtcgcggacgacggcgccgcggtggcggtctggaccacgccggagagcgtcgaagcgggggcggtgttcgccgagatcggcccgcgcatggccgagttgagcggttcccggctggccgcgcagcaacagatggaaggcctcctggcgccgcaccggcccaaggagcccgcgtggttcctggccaccgtcggcgtctcgcccgaccaccagggcaagggtctgggcagcgccgtcgtgctccccggagtggaggcggccgagcgcgccggggtgcccgccttcctggagacctccgcgccccgcaacctccccttctacgagcggctcggcttcaccgtcaccgccgacgtcgaggtgcccgaaggaccgcgcacctggtgcatgacccgcaagcccggtgcctga

SEQ ID NO: 1302 - DNA, 2859 bp, Artificial Sequence
  Synthetic Polynucleotides
atggccttaccagtgaccgccttgctcctgccgctggccttgctgctccacgccgccaggccggacatccagatgacccagagccccagcagcctgtctgccagcgtgggcgacagagtgaccatcacatgcaaggccagccaggacgtgggaatcgccgtggcctggtatcagcagaaacccggcaaggtgcccaagctgctgatctactgggccagcaccagacacaccggcgtgcccgatagattttccggcagcggctccggcaccgacttcaccctgacaatcagctccctccagcccgaggacgtggcaacctactactgccagcagtacagcagctacccctacaccttcggccagggcaccaaggtggaaatcaagggcggaggcggaagtggaggcggaggatctggcggcggaggctctgaagtgcaactggtggaatcaggcggcggactggtgcagcctggcggatctctgagactgagctgtgccgccagcggcttcgacttcagccggtactggatgagctgggtgcgccaggcccctggcaaaggactggaatggatcggcgagatcaaccccgacagcagcaccatcaactacgcccccagcctgaaggacaagttcatcatcagccgggacaacgccaagaacagcctgtacctccagatgaactccctgcgggccgaggacaccgccgtgtactattgcgccagacccgacggcaactactggtacttcgacgtgtggggccagggaaccctcgtgaccgtgtcatctacgcgtgagcagaaactgatctcggaagaggatctggcgaagcccaccacgacgccagcgccgcgaccaccaacaccggcgcccaccatcgcgtcgcagcccctgtccctgcgcccagaggcgtgccggccagcggcggggggcgcagtgcacacgagggggctggacttcgcctgtgacatctacatctgggcgcccttggccgggacttgtggggtccttctcctgtcactggttatcaccctttactgcaaacggggcagaaagaaactcctgtatatattcaaacaaccatttatgagaccagtacaaactactcaagaggaagatggctgtagctgccgatttccagaagaagaagaaggaggatgtgaactgagagtgaagttcagcaggagcgcagacgcccccgcgtaccagcagggccagaaccagctctataacgagctgaatctaggacgaagagaggagtacgatgttttggacaagagacgtggccgggaccctgagatggggggaaagccgagaaggaagaaccctcaggaaggcctgtacaatgaactgcagaaagataagatggcggaggcctacagtgagattgggatgaaaggcgagcgccggaggggcaaggggcacgatggcctttaccagggtctcagtacagccaccaaggacacctacgacgcccttcacatgcaggccctgccccctcgctctagaggatctggagcaacaaacttctcactactcaaacaagcaggtgacgtggaggagaatcccgggcctgggatccacatggccacttacgaggttctctgtgaggtggcgcggaaactgggcacggatgacagggaagtggtattgttcctcctaaacgtgttcatacctcaacccacactggcccaattaattggagctcttagagctttaaaggaggagggcaggttaacgtttcccctgttagcggaatgtctgtttcgtgcaggtcgcagagacctcttgcgcgacctgcttcacttagacccgcgttttttagagcgccacctagcgggcacaatgagttatttcagcccttatcagctcactgttctccacgtagacggggagctgtgtgcgagggatattaggtctttgatatttttaagcaaggacactatagggtctcgcagcacaccacagacattcttacactgggtgtactgtatggaaaacttagacctactgggtcccactgacgtggatgccctaatgtcaatgcttagatctttgtcaagagtagacctacagcgccaagtgcaaaccctaatgggccttcacctttccggcccatcacactcccaacactatcgccatacaccactcgagaccgatttctacgactacaaggacgacgatgacaagactagtggctccggcgagggcagaggaagtctactaacctgcggagatgtggaagaaaatcctggcccacatatgaccgagtacaagcccacggtgcgcctcgccacccgcgacgacgtccccagggccgtacgcaccctcgccgccgcgttcgccgactaccccgccacgcgccacaccgtcgatccggaccgccacatcgagcgggtcaccgagctgcaagaactcttcctcacgcgcgtcgggctcgacatcggcaaggtgtgggtcgcggacgacggcgccgcggtggcggtctggaccacgccggagagcgtcgaagcgggggcggtgttcgccgagatcggcccgcgcatggccgagttgagcggttcccggctggccgcgcagcaacagatggaaggcctcctggcgccgcaccggcccaaggagcccgcgtggttcctggccaccgtcggcgtctcgcccgaccaccagggcaagggtctgggcagcgccgtcgtgctccccggagtggaggcggccgagcgcgccggggtgcccgccttcctggagacctccgcgccccgcaacctccccttctacgagcggctcggcttcaccgtcaccgccgacgtcgaggtgcccgaaggaccgcgcacctggtgcatgacccgcaagcccggtgcctga

SEQ ID NO: 1303 - DNA, 2862 bp, Artificial Sequence
  Synthetic Polynucleotides
atggccttaccagtgaccgccttgctcctgccgctggccttgctgctccacgccgccaggccggacatcgtgatgacccagagccagaagagcatgagcaccagcgtgggcgacagagtgagcatcacctgcaaggccagccaggacgtgatcaccggcgtggcctggtaccagcagaagcccggccagagccccaagctgctgatctacagcgccagctacagatacaccggcgtgcccgacagattcaccggcagcggcagcggcaccgacttcaccttcaccatcagcaacgtgcaggccgaggacctggccgtgtactactgccagcagcactacagcacccccctgaccttcggcgccggcaccaagctggagctgaagggcggaggcggaagtggaggcggaggatctggcggcggaggctctcaggtgcagctgcagcagcccggcgccgagctggtgagacccggcgccagcgtgaagctgagctgcaaggccagcggctacagcttcaccacctactggatgaactgggtgaagcagagacccggccagggcctggagtggatcggcatgatccaccccagcgacagcgagaccagactgaaccagaagttcaaggacaaggccaccctgaccgtggacaagagcagcagcaccgcctacatgcagctgagcagccccaccagcgaggacagcgccgtgtactactgcgccagaagcaccatgatcgccaccagagccatggactactggggccagggcaccagcgtgaccgtgagcagcacgcgtgagcagaaactgatctcggaagaggatctggcgaagcccaccacgacgccagcgccgcgaccaccaacaccggcgcccaccatcgcgtcgcagcccctgtccctgcgcccagaggcgtgccggccagcggcggggggcgcagtgcacacgagggggctggacttcgcctgtgacatctacatctgggcgcccttggccgggacttgtggggtccttctcctgtcactggttatcaccctttactgcaaacggggcagaaagaaactcctgtatatattcaaacaaccatttatgagaccagtacaaactactcaagaggaagatggctgtagctgccgatttccagaagaagaagaaggaggatgtgaactgagagtgaagttcagcaggagcgcagacgcccccgcgtaccagcagggccagaaccagctctataacgagctgaatctaggacgaagagaggagtacgatgttttggacaagagacgtggccgggaccctgagatggggggaaagccgagaaggaagaaccctcaggaaggcctgtacaatgaactgcagaaagataagatggcggaggcctacagtgagattgggatgaaaggcgagcgccggaggggcaaggggcacgatggcctttaccagggtctcagtacagccaccaaggacacctacgacgcccttcacatgcaggccctgccccctcgctctagaggatctggagcaacaaacttctcactactcaaacaagcaggtgacgtggaggagaatcccgggcctgggatccacatggccacttacgaggttctctgtgaggtggcgcggaaactgggcacggatgacagggaagtggtattgttcctcctaaacgtgttcatacctcaacccacactggcccaattaattggagctcttagagctttaaaggaggagggcaggttaacgtttcccctgttagcggaatgtctgtttcgtgcaggtcgcagagacctcttgcgcgacctgcttcacttagacccgcgttttttagagcgccacctagcgggcacaatgagttatttcagcccttatcagctcactgttctccacgtagacggggagctgtgtgcgagggatattaggtctttgatatttttaagcaaggacactatagggtctcgcagcacaccacagacattcttacactgggtgtactgtatggaaaacttagacctactgggtcccactgacgtggatgccctaatgtcaatgcttagatctttgtcaagagtagacctacagcgccaagtgcaaaccctaatgggccttcacctttccggcccatcacactcccaacactatcgccatacaccactcgagaccgatttctacgactacaaggacgacgatgacaagactagtggctccggcgagggcagaggaagtctactaacctgcggagatgtggaagaaaatcctggcccacatatgaccgagtacaagcccacggtgcgcctcgccacccgcgacgacgtccccagggccgtacgcaccctcgccgccgcgttcgccgactaccccgccacgcgccacaccgtcgatccggaccgccacatcgagcgggtcaccgagctgcaagaactcttcctcacgcgcgtcgggctcgacatcggcaaggtgtgggtcgcggacgacggcgccgcggtggcggtctggaccacgccggagagcgtcgaagcgggggcggtgttcgccgagatcggcccgcgcatggccgagttgagcggttcccggctggccgcgcagcaacagatggaaggcctcctggcgccgcaccggcccaaggagcccgcgtggttcctggccaccgtcggcgtctcgcccgaccaccagggcaagggtctgggcagcgccgtcgtgctccccggagtggaggcggccgagcgcgccggggtgcccgccttcctggagacctccgcgccccgcaacctccccttctacgagcggctcggcttcaccgtcaccgccgacgtcgaggtgcccgaaggaccgcgcacctggtgcatgacccgcaagcccggtgcctga

SEQ ID NO: 1304 - DNA, 2868 bp, Artificial Sequence
  Synthetic Polynucleotides
atggccttaccagtgaccgccttgctcctgccgctggccttgctgctccacgccgccaggccggacatccagatgacacagagccctagcagcctgtctgccagcgtgggagacagagtgaccatcacatgcaaggccagccaggatgtgtctacagccgtggcctggtatcagcagaagcctggaaaggcccctaagctgctgatctacagcgccagctacagatacaccggcgtgcccgatagattcacaggctctggcagcggcaccgacttcaccctgacaatatctagcctccagcctgaggacttcgccacctactactgccagcagcactacagcacccctccatacacatttggcggaggcaccaaggtggaaatcaagagaggcggaggcggaagtggaggcggaggatctggcggcggaggctctcaagttcaactggttcagagcggagccgaagtgaagaaacctggggcctctgtgaaggtgtcctgcaaagccagcggctacgcctttagcagctcctggatgaactgggtccgacaggctcctggacagggcctcgaatggatcggcagaatctatcctggcgacggcgacaccaagtacaacggcaagttcaagggcaaagccacactgaccgccgacaagagcacaagcaccgcctacatggaactgagcagcctgagaagcgaggacaccgccgtgtactactgtgccagatccaccatgatcgccaccggcgctatggattattggggccagggaaccctggtcaccgtgtcatctacgcgtgagcagaaactgatctcggaagaggatctggcgaagcccaccacgacgccagcgccgcgaccaccaacaccggcgcccaccatcgcgtcgcagcccctgtccctgcgcccagaggcgtgccggccagcggcggggggcgcagtgcacacgagggggctggacttcgcctgtgacatctacatctgggcgcccttggccgggacttgtggggtccttctcctgtcactggttatcaccctttactgcaaacggggcagaaagaaactcctgtatatattcaaacaaccatttatgagaccagtacaaactactcaagaggaagatggctgtagctgccgatttccagaagaagaagaaggaggatgtgaactgagagtgaagttcagcaggagcgcagacgcccccgcgtaccagcagggccagaaccagctctataacgagctgaatctaggacgaagagaggagtacgatgttttggacaagagacgtggccgggaccctgagatggggggaaagccgagaaggaagaaccctcaggaaggcctgtacaatgaactgcagaaagataagatggcggaggcctacagtgagattgggatgaaaggcgagcgccggaggggcaaggggcacgatggcctttaccagggtctcagtacagccaccaaggacacctacgacgcccttcacatgcaggccctgccccctcgctctagaggatctggagcaacaaacttctcactactcaaacaagcaggtgacgtggaggagaatcccgggcctgggatccacatggccacttacgaggttctctgtgaggtggcgcggaaactgggcacggatgacagggaagtggtattgttcctcctaaacgtgttcatacctcaacccacactggcccaattaattggagctcttagagctttaaaggaggagggcaggttaacgtttcccctgttagcggaatgtctgtttcgtgcaggtcgcagagacctcttgcgcgacctgcttcacttagacccgcgttttttagagcgccacctagcgggcacaatgagttatttcagcccttatcagctcactgttctccacgtagacggggagctgtgtgcgagggatattaggtctttgatatttttaagcaaggacactatagggtctcgcagcacaccacagacattcttacactgggtgtactgtatggaaaacttagacctactgggtcccactgacgtggatgccctaatgtcaatgcttagatctttgtcaagagtagacctacagcgccaagtgcaaaccctaatgggccttcacctttccggcccatcacactcccaacactatcgccatacaccactcgagaccgatttctacgactacaaggacgacgatgacaagactagtggctccggcgagggcagaggaagtctactaacctgcggagatgtggaagaaaatcctggcccacatatgaccgagtacaagcccacggtgcgcctcgccacccgcgacgacgtccccagggccgtacgcaccctcgccgccgcgttcgccgactaccccgccacgcgccacaccgtcgatccggaccgccacatcgagcgggtcaccgagctgcaagaactcttcctcacgcgcgtcgggctcgacatcggcaaggtgtgggtcgcggacgacggcgccgcggtggcggtctggaccacgccggagagcgtcgaagcgggggcggtgttcgccgagatcggcccgcgcatggccgagttgagcggttcccggctggccgcgcagcaacagatggaaggcctcctggcgccgcaccggcccaaggagcccgcgtggttcctggccaccgtcggcgtctcgcccgaccaccagggcaagggtctgggcagcgccgtcgtgctccccggagtggaggcggccgagcgcgccggggtgcccgccttcctggagacctccgcgccccgcaacctccccttctacgagcggctcggcttcaccgtcaccgccgacgtcgaggtgcccgaaggaccgcgcacctggtgcatgacccgcaagcccggtgcctga

SEQ ID NO: 1305 - DNA, 2871 bp, Artificial Sequence
  Synthetic Polynucleotides
atggccttaccagtgaccgccttgctcctgccgctggccttgctgctccacgccgccaggccggacgtggtcatgacacagacacctctgagcctgagcgtgacacctggacagcctgccagcatcagctgtagaagcagccagagcctggtgcacaacaacggcaacacctacctgcactggtatctccagaagcctggacagagccctcagctgctgatctacaaggtgtccaacagattcagcggcgtgcccgacagattttctggcagcggctctggcaccgacttcaccctgaagattagcagagtggaagccgaggacgtgggcgtgtacttctgtagccagagcacacacgtgccaccttacacctttggcggaggcaccaaggtggaaatcaaaggcggaggcggaagtggaggcggaggatctggcggcggaggctctgaagtgcagctggttgagtctggtggcggactggttcaacctggcggaagcctgagactgtcttgtgccgccagcggcttcaccttcagcgactactatatggcctgggtccgacaggcccctggcaaaggacttgaatgggtcgccgagatcaactacgacggcagcagcacctactacgtggacagcgtgaagggcagattcaccatcagccgggacaacgccaagaacagcctgtacctccagatgaactccctgagagccgaggataccgccgtgtactactgcgccagagacagaggcttctacttcgactattggggccagggcaccaccgtgacagtctcttctacgcgtgagcagaaactgatctcggaagaggatctggcgaagcccaccacgacgccagcgccgcgaccaccaacaccggcgcccaccatcgcgtcgcagcccctgtccctgcgcccagaggcgtgccggccagcggcggggggcgcagtgcacacgagggggctggacttcgcctgtgacatctacatctgggcgcccttggccgggacttgtggggtccttctcctgtcactggttatcaccctttactgcaaacggggcagaaagaaactcctgtatatattcaaacaaccatttatgagaccagtacaaactactcaagaggaagatggctgtagctgccgatttccagaagaagaagaaggaggatgtgaactgagagtgaagttcagcaggagcgcagacgcccccgcgtaccagcagggccagaaccagctctataacgagctgaatctaggacgaagagaggagtacgatgttttggacaagagacgtggccgggaccctgagatggggggaaagccgagaaggaagaaccctcaggaaggcctgtacaatgaactgcagaaagataagatggcggaggcctacagtgagattgggatgaaaggcgagcgccggaggggcaaggggcacgatggcctttaccagggtctcagtacagccaccaaggacacctacgacgcccttcacatgcaggccctgccccctcgctctagaggatctggagcaacaaacttctcactactcaaacaagcaggtgacgtggaggagaatcccgggcctgggatccacatggccacttacgaggttctctgtgaggtggcgcggaaactgggcacggatgacagggaagtggtattgttcctcctaaacgtgttcatacctcaacccacactggcccaattaattggagctcttagagctttaaaggaggagggcaggttaacgtttcccctgttagcggaatgtctgtttcgtgcaggtcgcagagacctcttgcgcgacctgcttcacttagacccgcgttttttagagcgccacctagcgggcacaatgagttatttcagcccttatcagctcactgttctccacgtagacggggagctgtgtgcgagggatattaggtctttgatatttttaagcaaggacactatagggtctcgcagcacaccacagacattcttacactgggtgtactgtatggaaaacttagacctactgggtcccactgacgtggatgccctaatgtcaatgcttagatctttgtcaagagtagacctacagcgccaagtgcaaaccctaatgggccttcacctttccggcccatcacactcccaacactatcgccatacaccactcgagaccgatttctacgactacaaggacgacgatgacaagactagtggctccggcgagggcagaggaagtctactaacctgcggagatgtggaagaaaatcctggcccacatatgaccgagtacaagcccacggtgcgcctcgccacccgcgacgacgtccccagggccgtacgcaccctcgccgccgcgttcgccgactaccccgccacgcgccacaccgtcgatccggaccgccacatcgagcgggtcaccgagctgcaagaactcttcctcacgcgcgtcgggctcgacatcggcaaggtgtgggtcgcggacgacggcgccgcggtggcggtctggaccacgccggagagcgtcgaagcgggggcggtgttcgccgagatcggcccgcgcatggccgagttgagcggttcccggctggccgcgcagcaacagatggaaggcctcctggcgccgcaccggcccaaggagcccgcgtggttcctggccaccgtcggcgtctcgcccgaccaccagggcaagggtctgggcagcgccgtcgtgctccccggagtggaggcggccgagcgcgccggggtgcccgccttcctggagacctccgcgccccgcaacctccccttctacgagcggctcggcttcaccgtcaccgccgacgtcgaggtgcccgaaggaccgcgcacctggtgcatgacccgcaagcccggtgcctga

SEQ ID NO: 1306 - DNA, 2871 bp, Artificial Sequence
  Synthetic Polynucleotides
atggccttaccagtgaccgccttgctcctgccgctggccttgctgctccacgccgccaggccggacgtggtcatgacacagacacctctgagcctgagcgtgacacctggacagcctgccagcatctcctgtagaagcagccagagcctggtgcacagcaacggcctgacatacctgcactggtatctccagaagcctggacagagccctcagctcctgatctacaaggtgtccaacagattcagcggcgtgcccgacagattttctggcagcggctctggcaccgacttcaccctgaagatcagcagagtggaagccgaggacgtgggcgtgtacttctgtagccagagcacacacgtgccacctttcacctttggcggaggcaccaaggtggaaatcaaaggcggaggcggaagtggaggcggaggatctggcggcggaggctctgaagtgcagctcgttgagtctggtggcggactggttcaacctggcggaagcctgagactgtcttgtgccgccagcggcttcaccttcagcgactactatatggcctgggtccgacaggcccctggcaaaggacttgaatgggtcgccagcatcaactacgacggcgagagcacctactacgtggacagcgtgaagggcagattcaccatcagccgggacaacgccaagaacagcctgtacctccagatgaactccctgagagccgaggataccgccgtgtactactgcgccagagacagaggctactacttcgactattggggccagggcaccaccgtgacagtctcttctacgcgtgagcagaaactgatctcggaagaggatctggcgaagcccaccacgacgccagcgccgcgaccaccaacaccggcgcccaccatcgcgtcgcagcccctgtccctgcgcccagaggcgtgccggccagcggcggggggcgcagtgcacacgagggggctggacttcgcctgtgacatctacatctgggcgcccttggccgggacttgtggggtccttctcctgtcactggttatcaccctttactgcaaacggggcagaaagaaactcctgtatatattcaaacaaccatttatgagaccagtacaaactactcaagaggaagatggctgtagctgccgatttccagaagaagaagaaggaggatgtgaactgagagtgaagttcagcaggagcgcagacgcccccgcgtaccagcagggccagaaccagctctataacgagctgaatctaggacgaagagaggagtacgatgttttggacaagagacgtggccgggaccctgagatggggggaaagccgagaaggaagaaccctcaggaaggcctgtacaatgaactgcagaaagataagatggcggaggcctacagtgagattgggatgaaaggcgagcgccggaggggcaaggggcacgatggcctttaccagggtctcagtacagccaccaaggacacctacgacgcccttcacatgcaggccctgccccctcgctctagaggatctggagcaacaaacttctcactactcaaacaagcaggtgacgtggaggagaatcccgggcctgggatccacatggccacttacgaggttctctgtgaggtggcgcggaaactgggcacggatgacagggaagtggtattgttcctcctaaacgtgttcatacctcaacccacactggcccaattaattggagctcttagagctttaaaggaggagggcaggttaacgtttcccctgttagcggaatgtctgtttcgtgcaggtcgcagagacctcttgcgcgacctgcttcacttagacccgcgttttttagagcgccacctagcgggcacaatgagttatttcagcccttatcagctcactgttctccacgtagacggggagctgtgtgcgagggatattaggtctttgatatttttaagcaaggacactatagggtctcgcagcacaccacagacattcttacactgggtgtactgtatggaaaacttagacctactgggtcccactgacgtggatgccctaatgtcaatgcttagatctttgtcaagagtagacctacagcgccaagtgcaaaccctaatgggccttcacctttccggcccatcacactcccaacactatcgccatacaccactcgagaccgatttctacgactacaaggacgacgatgacaagactagtggctccggcgagggcagaggaagtctactaacctgcggagatgtggaagaaaatcctggcccacatatgaccgagtacaagcccacggtgcgcctcgccacccgcgacgacgtccccagggccgtacgcaccctcgccgccgcgttcgccgactaccccgccacgcgccacaccgtcgatccggaccgccacatcgagcgggtcaccgagctgcaagaactcttcctcacgcgcgtcgggctcgacatcggcaaggtgtgggtcgcggacgacggcgccgcggtggcggtctggaccacgccggagagcgtcgaagcgggggcggtgttcgccgagatcggcccgcgcatggccgagttgagcggttcccggctggccgcgcagcaacagatggaaggcctcctggcgccgcaccggcccaaggagcccgcgtggttcctggccaccgtcggcgtctcgcccgaccaccagggcaagggtctgggcagcgccgtcgtgctccccggagtggaggcggccgagcgcgccggggtgcccgccttcctggagacctccgcgccccgcaacctccccttctacgagcggctcggcttcaccgtcaccgccgacgtcgaggtgcccgaaggaccgcgcacctggtgcatgacccgcaagcccggtgcctga

SEQ ID NO: 1307 - DNA, 2871 bp, Artificial Sequence
  Synthetic Polynucleotides
atggccttaccagtgaccgccttgctcctgccgctggccttgctgctccacgccgccaggccggacgtggtcatgacacagagccctctgagcctgcctgtgacacctggcgaacctgccagcatctcctgtagaagcagccagagcctggtgcacagcaacggcaatacctacctgcactggtatctccagaagcctggacagagcccacagctcctgatctacaaggtgtccaaccggttcagcggcgtgcccgatagattttctggcagcggctctggcaccgacttcaccctgaagatcagcagagtggaagccgaggacgtgggcgtgtacttctgtagccagagcacacacgtgccacctttcacctttggcggaggcaccaaggtggaaatcaaaggcggaggcggaagtggaggcggaggatctggcggcggaggctctgaagtgcagctcgttgagtctggtggcggactggttcaacctggcggaagcctgagactgtcttgtgccgccagcggcttcaccttcagcgactactatatggcctgggtccgacaggcccctggcaaaggacttgaatgggtcgccgacatcaactacgatggcggcagcacctactacctggacagcctgaagtcccggttcaccatctccagagacaacgccaagaacagcctgtacctccagatgaactccctgagagccgaggataccgccgtgtactactgcgccagagacagaggctactacttcgactattggggccagggcaccctggtcacagtctcttctacgcgtgagcagaaactgatctcggaagaggatctggcgaagcccaccacgacgccagcgccgcgaccaccaacaccggcgcccaccatcgcgtcgcagcccctgtccctgcgcccagaggcgtgccggccagcggcggggggcgcagtgcacacgagggggctggacttcgcctgtgacatctacatctgggcgcccttggccgggacttgtggggtccttctcctgtcactggttatcaccctttactgcaaacggggcagaaagaaactcctgtatatattcaaacaaccatttatgagaccagtacaaactactcaagaggaagatggctgtagctgccgatttccagaagaagaagaaggaggatgtgaactgagagtgaagttcagcaggagcgcagacgcccccgcgtaccagcagggccagaaccagctctataacgagctgaatctaggacgaagagaggagtacgatgttttggacaagagacgtggccgggaccctgagatggggggaaagccgagaaggaagaaccctcaggaaggcctgtacaatgaactgcagaaagataagatggcggaggcctacagtgagattgggatgaaaggcgagcgccggaggggcaaggggcacgatggcctttaccagggtctcagtacagccaccaaggacacctacgacgcccttcacatgcaggccctgccccctcgctctagaggatctggagcaacaaacttctcactactcaaacaagcaggtgacgtggaggagaatcccgggcctgggatccacatggccacttacgaggttctctgtgaggtggcgcggaaactgggcacggatgacagggaagtggtattgttcctcctaaacgtgttcatacctcaacccacactggcccaattaattggagctcttagagctttaaaggaggagggcaggttaacgtttcccctgttagcggaatgtctgtttcgtgcaggtcgcagagacctcttgcgcgacctgcttcacttagacccgcgttttttagagcgccacctagcgggcacaatgagttatttcagcccttatcagctcactgttctccacgtagacggggagctgtgtgcgagggatattaggtctttgatatttttaagcaaggacactatagggtctcgcagcacaccacagacattcttacactgggtgtactgtatggaaaacttagacctactgggtcccactgacgtggatgccctaatgtcaatgcttagatctttgtcaagagtagacctacagcgccaagtgcaaaccctaatgggccttcacctttccggcccatcacactcccaacactatcgccatacaccactcgagaccgatttctacgactacaaggacgacgatgacaagactagtggctccggcgagggcagaggaagtctactaacctgcggagatgtggaagaaaatcctggcccacatatgaccgagtacaagcccacggtgcgcctcgccacccgcgacgacgtccccagggccgtacgcaccctcgccgccgcgttcgccgactaccccgccacgcgccacaccgtcgatccggaccgccacatcgagcgggtcaccgagctgcaagaactcttcctcacgcgcgtcgggctcgacatcggcaaggtgtgggtcgcggacgacggcgccgcggtggcggtctggaccacgccggagagcgtcgaagcgggggcggtgttcgccgagatcggcccgcgcatggccgagttgagcggttcccggctggccgcgcagcaacagatggaaggcctcctggcgccgcaccggcccaaggagcccgcgtggttcctggccaccgtcggcgtctcgcccgaccaccagggcaagggtctgggcagcgccgtcgtgctccccggagtggaggcggccgagcgcgccggggtgcccgccttcctggagacctccgcgccccgcaacctccccttctacgagcggctcggcttcaccgtcaccgccgacgtcgaggtgcccgaaggaccgcgcacctggtgcatgacccgcaagcccggtgcctga

SEQ ID NO: 1308 - DNA, 2865 bp, Artificial Sequence
  Synthetic Polynucleotides
atggccttaccagtgaccgccttgctcctgccgctggccttgctgctccacgccgccaggccggacatccagatgacccagagcagcagctacctgagcgtgtcccttggcggcagagtgaccatcacctgtaaagccagcgaccacatcaacaactggctggcctggtatcagcagaagcctggcaacgcccctagactgctgattagcggagccacctctctggaaacaggcgtgccaagcagattttccggcagcggctctggcaaggactacaccctgagcatcaccagcctccagaccgaggatgtggctacctactactgccagcagtattggagcaccccttggacctttggcggaggcaccaagctggaaatcaaaggcggaggcggaagtggaggcggaggatctggcggcggaggctctcaggttcagctccagcagtctggcgctgagcttgctagacctggcgcttctgtgaagctgagctgcaaggccagcggctacaccttcaccagctactggatgcagtgggtcaagcagaggccaggccaaggactggaatggatcggagccatctatcccggcgacggcgataccagatacacccagaagttcaagggcaaagccacactgaccgccgacaagagcagctccacagcctacatgcaactgagcagcctggcttccgaggacagcgccgtgtactattgtgccagaggcaaggtgtactacggcagcaaccctttcgcctattggggccagggaaccctggttacagtgtctgctacgcgtgagcagaaactgatctcggaagaggatctggcgaagcccaccacgacgccagcgccgcgaccaccaacaccggcgcccaccatcgcgtcgcagcccctgtccctgcgcccagaggcgtgccggccagcggcggggggcgcagtgcacacgagggggctggacttcgcctgtgacatctacatctgggcgcccttggccgggacttgtggggtccttctcctgtcactggttatcaccctttactgcaaacggggcagaaagaaactcctgtatatattcaaacaaccatttatgagaccagtacaaactactcaagaggaagatggctgtagctgccgatttccagaagaagaagaaggaggatgtgaactgagagtgaagttcagcaggagcgcagacgcccccgcgtaccagcagggccagaaccagctctataacgagctgaatctaggacgaagagaggagtacgatgttttggacaagagacgtggccgggaccctgagatggggggaaagccgagaaggaagaaccctcaggaaggcctgtacaatgaactgcagaaagataagatggcggaggcctacagtgagattgggatgaaaggcgagcgccggaggggcaaggggcacgatggcctttaccagggtctcagtacagccaccaaggacacctacgacgcccttcacatgcaggccctgccccctcgctctagaggatctggagcaacaaacttctcactactcaaacaagcaggtgacgtggaggagaatcccgggcctgggatccacatggccacttacgaggttctctgtgaggtggcgcggaaactgggcacggatgacagggaagtggtattgttcctcctaaacgtgttcatacctcaacccacactggcccaattaattggagctcttagagctttaaaggaggagggcaggttaacgtttcccctgttagcggaatgtctgtttcgtgcaggtcgcagagacctcttgcgcgacctgcttcacttagacccgcgttttttagagcgccacctagcgggcacaatgagttatttcagcccttatcagctcactgttctccacgtagacggggagctgtgtgcgagggatattaggtctttgatatttttaagcaaggacactatagggtctcgcagcacaccacagacattcttacactgggtgtactgtatggaaaacttagacctactgggtcccactgacgtggatgccctaatgtcaatgcttagatctttgtcaagagtagacctacagcgccaagtgcaaaccctaatgggccttcacctttccggcccatcacactcccaacactatcgccatacaccactcgagaccgatttctacgactacaaggacgacgatgacaagactagtggctccggcgagggcagaggaagtctactaacctgcggagatgtggaagaaaatcctggcccacatatgaccgagtacaagcccacggtgcgcctcgccacccgcgacgacgtccccagggccgtacgcaccctcgccgccgcgttcgccgactaccccgccacgcgccacaccgtcgatccggaccgccacatcgagcgggtcaccgagctgcaagaactcttcctcacgcgcgtcgggctcgacatcggcaaggtgtgggtcgcggacgacggcgccgcggtggcggtctggaccacgccggagagcgtcgaagcgggggcggtgttcgccgagatcggcccgcgcatggccgagttgagcggttcccggctggccgcgcagcaacagatggaaggcctcctggcgccgcaccggcccaaggagcccgcgtggttcctggccaccgtcggcgtctcgcccgaccaccagggcaagggtctgggcagcgccgtcgtgctccccggagtggaggcggccgagcgcgccggggtgcccgccttcctggagacctccgcgccccgcaacctccccttctacgagcggctcggcttcaccgtcaccgccgacgtcgaggtgcccgaaggaccgcgcacctggtgcatgacccgcaagcccggtgcctga

SEQ ID NO: 1309 - DNA, 2865 bp, Artificial Sequence
  Synthetic Polynucleotides
atggccttaccagtgaccgccttgctcctgccgctggccttgctgctccacgccgccaggccggacatcgtgatgacccagagccacaagttcatgagcaccagcgtgggcgacagagtgtccatcacctgtaaagccagccaggacgtgtcaacagccgtggcctggtatcagcagaagcctggacagagccccaagctgctgatctacagcgccagctacagatacaccggcgtgcccgatagattcacaggctctggcagcggcaccgacttcacctttacaatcagcagcgtgcaggccgaggacctggccgtgtattattgccagcagcactacagcacccctccatacacatttggcggaggcaccaagctggaaatcaaaggcggaggcggaagtggaggcggaggatctggcggcggaggctctcaggttcagctccagcagtctggccctgagcttgtgaaacctggcgcttccgtgaagattagctgcaaggccagcggctacgccttcagcagctcctggatgaactgggtcaagcagaggccaggccagggcctcgaatggatcggcagaatctatcctggcgacggcgacaccaagtacaacggcaagttcaagggcaaagccacactgaccgccgacaagtctagcagcaccgcctatatgcagctcagcagcctgacctctgtggacagcgccgtgtacttctgtgcccggtctaccatgattgccaccggcgctatggattactggggccagggaacaagcgtgaccgtgtcatctacgcgtgagcagaaactgatctcggaagaggatctggcgaagcccaccacgacgccagcgccgcgaccaccaacaccggcgcccaccatcgcgtcgcagcccctgtccctgcgcccagaggcgtgccggccagcggcggggggcgcagtgcacacgagggggctggacttcgcctgtgacatctacatctgggcgcccttggccgggacttgtggggtccttctcctgtcactggttatcaccctttactgcaaacggggcagaaagaaactcctgtatatattcaaacaaccatttatgagaccagtacaaactactcaagaggaagatggctgtagctgccgatttccagaagaagaagaaggaggatgtgaactgagagtgaagttcagcaggagcgcagacgcccccgcgtaccagcagggccagaaccagctctataacgagctgaatctaggacgaagagaggagtacgatgttttggacaagagacgtggccgggaccctgagatggggggaaagccgagaaggaagaaccctcaggaaggcctgtacaatgaactgcagaaagataagatggcggaggcctacagtgagattgggatgaaaggcgagcgccggaggggcaaggggcacgatggcctttaccagggtctcagtacagccaccaaggacacctacgacgcccttcacatgcaggccctgccccctcgctctagaggatctggagcaacaaacttctcactactcaaacaagcaggtgacgtggaggagaatcccgggcctgggatccacatggccacttacgaggttctctgtgaggtggcgcggaaactgggcacggatgacagggaagtggtattgttcctcctaaacgtgttcatacctcaacccacactggcccaattaattggagctcttagagctttaaaggaggagggcaggttaacgtttcccctgttagcggaatgtctgtttcgtgcaggtcgcagagacctcttgcgcgacctgcttcacttagacccgcgttttttagagcgccacctagcgggcacaatgagttatttcagcccttatcagctcactgttctccacgtagacggggagctgtgtgcgagggatattaggtctttgatatttttaagcaaggacactatagggtctcgcagcacaccacagacattcttacactgggtgtactgtatggaaaacttagacctactgggtcccactgacgtggatgccctaatgtcaatgcttagatctttgtcaagagtagacctacagcgccaagtgcaaaccctaatgggccttcacctttccggcccatcacactcccaacactatcgccatacaccactcgagaccgatttctacgactacaaggacgacgatgacaagactagtggctccggcgagggcagaggaagtctactaacctgcggagatgtggaagaaaatcctggcccacatatgaccgagtacaagcccacggtgcgcctcgccacccgcgacgacgtccccagggccgtacgcaccctcgccgccgcgttcgccgactaccccgccacgcgccacaccgtcgatccggaccgccacatcgagcgggtcaccgagctgcaagaactcttcctcacgcgcgtcgggctcgacatcggcaaggtgtgggtcgcggacgacggcgccgcggtggcggtctggaccacgccggagagcgtcgaagcgggggcggtgttcgccgagatcggcccgcgcatggccgagttgagcggttcccggctggccgcgcagcaacagatggaaggcctcctggcgccgcaccggcccaaggagcccgcgtggttcctggccaccgtcggcgtctcgcccgaccaccagggcaagggtctgggcagcgccgtcgtgctccccggagtggaggcggccgagcgcgccggggtgcccgccttcctggagacctccgcgccccgcaacctccccttctacgagcggctcggcttcaccgtcaccgccgacgtcgaggtgcccgaaggaccgcgcacctggtgcatgacccgcaagcccggtgcctga

SEQ ID NO: 1310 - DNA, 2880 bp, Artificial Sequence
  Synthetic Polynucleotides
atggccttaccagtgaccgccttgctcctgccgctggccttgctgctccacgccgccaggccgcagagcgtgctgacacagcctccatccgtgtctggcgctccaggccagagagtgaccatctcctgtaccggcagcggcagcaacatcggagccccctacgacgtgtcctggtatcagcaactgcctggcaccgcccccaagctgctgatctaccacaacaacaagcggcccagcggcgtgcccgatagattcagcggctctaagagcggcaccagcgccagcctggctatcactggactccaggccgaggacgaggccgactactactgtgccacagtggaagccggcctgagcggctctgtgtttggcggcggaacaaagctgaccgtgctgggagctggcggaggcggaagtggaggcggaggatctggcggcggaggctctcaggtgcaactggtgcagagcggagccgaagtgaagaaacctggggccagcgtgaaggtgtcctgcaaggtgtccggctacaccctgaccgagctgagcattcactgggtgcgccaggcccctggcaagggactggaatggatgggcggcttcgaccccgaagagaacgagatcgtgtacgcccagcggttccagggcagagtgacaatgaccgaggacaccagcaccgacaccgcctacatggaactgagcagcctgcggagcgaggataccgccgtgtactactgcgccatcgtgggcagcttcagccctctgacactgggcctgtggggccagggaactatggtcaccgtgtccagcacgcgtgagcagaaactgatctcggaagaggatctggcgaagcccaccacgacgccagcgccgcgaccaccaacaccggcgcccaccatcgcgtcgcagcccctgtccctgcgcccagaggcgtgccggccagcggcggggggcgcagtgcacacgagggggctggacttcgcctgtgacatctacatctgggcgcccttggccgggacttgtggggtccttctcctgtcactggttatcaccctttactgcaaacggggcagaaagaaactcctgtatatattcaaacaaccatttatgagaccagtacaaactactcaagaggaagatggctgtagctgccgatttccagaagaagaagaaggaggatgtgaactgagagtgaagttcagcaggagcgcagacgcccccgcgtaccagcagggccagaaccagctctataacgagctgaatctaggacgaagagaggagtacgatgttttggacaagagacgtggccgggaccctgagatggggggaaagccgagaaggaagaaccctcaggaaggcctgtacaatgaactgcagaaagataagatggcggaggcctacagtgagattgggatgaaaggcgagcgccggaggggcaaggggcacgatggcctttaccagggtctcagtacagccaccaaggacacctacgacgcccttcacatgcaggccctgccccctcgctctagaggatctggagcaacaaacttctcactactcaaacaagcaggtgacgtggaggagaatcccgggcctgggatccacatggccacttacgaggttctctgtgaggtggcgcggaaactgggcacggatgacagggaagtggtattgttcctcctaaacgtgttcatacctcaacccacactggcccaattaattggagctcttagagctttaaaggaggagggcaggttaacgtttcccctgttagcggaatgtctgtttcgtgcaggtcgcagagacctcttgcgcgacctgcttcacttagacccgcgttttttagagcgccacctagcgggcacaatgagttatttcagcccttatcagctcactgttctccacgtagacggggagctgtgtgcgagggatattaggtctttgatatttttaagcaaggacactatagggtctcgcagcacaccacagacattcttacactgggtgtactgtatggaaaacttagacctactgggtcccactgacgtggatgccctaatgtcaatgcttagatctttgtcaagagtagacctacagcgccaagtgcaaaccctaatgggccttcacctttccggcccatcacactcccaacactatcgccatacaccactcgagaccgatttctacgactacaaggacgacgatgacaagactagtggctccggcgagggcagaggaagtctactaacctgcggagatgtggaagaaaatcctggcccacatatgaccgagtacaagcccacggtgcgcctcgccacccgcgacgacgtccccagggccgtacgcaccctcgccgccgcgttcgccgactaccccgccacgcgccacaccgtcgatccggaccgccacatcgagcgggtcaccgagctgcaagaactcttcctcacgcgcgtcgggctcgacatcggcaaggtgtgggtcgcggacgacggcgccgcggtggcggtctggaccacgccggagagcgtcgaagcgggggcggtgttcgccgagatcggcccgcgcatggccgagttgagcggttcccggctggccgcgcagcaacagatggaaggcctcctggcgccgcaccggcccaaggagcccgcgtggttcctggccaccgtcggcgtctcgcccgaccaccagggcaagggtctgggcagcgccgtcgtgctccccggagtggaggcggccgagcgcgccggggtgcccgccttcctggagacctccgcgccccgcaacctccccttctacgagcggctcggcttcaccgtcaccgccgacgtcgaggtgcccgaaggaccgcgcacctggtgcatgacccgcaagcccggtgcctga

SEQ ID NO: 1311 - DNA, 2880 bp, Artificial Sequence
  Synthetic Polynucleotides
atggccttaccagtgaccgccttgctcctgccgctggccttgctgctccacgccgccaggccgcagagcgtgctgacacagcctccatccgtgtctggcgctccaggccagagagtgaccatctcctgtaccggcagcggcagcaacatcggagccccctacgacgtgtcctggtatcagcaactgcctggcaccgcccccaagctgctgatctaccacaacaacaagcggcccagcggcgtgcccgatagattcagcggctctaagagcggcaccagcgccagcctggctatcactggactccaggccgaggacgaggccgactactactgccagagctacgacagcagcagcatcagcaccatcttcggcggaggcaccaagctgacagtgctgggagctggcggaggcggaagtggaggcggaggatctggcggcggaggctctcaggtgcaactggtgcagagcggagccgaagtgaagaaacctggggccagcgtgaaggtgtcctgcaaggtgtccggctacaccctgaccgagctgagcattcactgggtgcgccaggcccctggcaagggactggaatggatgggcggcttcgaccccgaagagaacgagatcgtgtacgcccagcggttccagggcagagtgacaatgaccgaggacaccagcaccgacaccgcctacatggaactgagcagcctgcggagcgaggataccgccgtgtactactgtgccatcgtgggcagcttcagcggaatcgcctacagaccttggggccagggcacaatggtcaccgtgtctagcacgcgtgagcagaaactgatctcggaagaggatctggcgaagcccaccacgacgccagcgccgcgaccaccaacaccggcgcccaccatcgcgtcgcagcccctgtccctgcgcccagaggcgtgccggccagcggcggggggcgcagtgcacacgagggggctggacttcgcctgtgacatctacatctgggcgcccttggccgggacttgtggggtccttctcctgtcactggttatcaccctttactgcaaacggggcagaaagaaactcctgtatatattcaaacaaccatttatgagaccagtacaaactactcaagaggaagatggctgtagctgccgatttccagaagaagaagaaggaggatgtgaactgagagtgaagttcagcaggagcgcagacgcccccgcgtaccagcagggccagaaccagctctataacgagctgaatctaggacgaagagaggagtacgatgttttggacaagagacgtggccgggaccctgagatggggggaaagccgagaaggaagaaccctcaggaaggcctgtacaatgaactgcagaaagataagatggcggaggcctacagtgagattgggatgaaaggcgagcgccggaggggcaaggggcacgatggcctttaccagggtctcagtacagccaccaaggacacctacgacgcccttcacatgcaggccctgccccctcgctctagaggatctggagcaacaaacttctcactactcaaacaagcaggtgacgtggaggagaatcccgggcctgggatccacatggccacttacgaggttctctgtgaggtggcgcggaaactgggcacggatgacagggaagtggtattgttcctcctaaacgtgttcatacctcaacccacactggcccaattaattggagctcttagagctttaaaggaggagggcaggttaacgtttcccctgttagcggaatgtctgtttcgtgcaggtcgcagagacctcttgcgcgacctgcttcacttagacccgcgttttttagagcgccacctagcgggcacaatgagttatttcagcccttatcagctcactgttctccacgtagacggggagctgtgtgcgagggatattaggtctttgatatttttaagcaaggacactatagggtctcgcagcacaccacagacattcttacactgggtgtactgtatggaaaacttagacctactgggtcccactgacgtggatgccctaatgtcaatgcttagatctttgtcaagagtagacctacagcgccaagtgcaaaccctaatgggccttcacctttccggcccatcacactcccaacactatcgccatacaccactcgagaccgatttctacgactacaaggacgacgatgacaagactagtggctccggcgagggcagaggaagtctactaacctgcggagatgtggaagaaaatcctggcccacatatgaccgagtacaagcccacggtgcgcctcgccacccgcgacgacgtccccagggccgtacgcaccctcgccgccgcgttcgccgactaccccgccacgcgccacaccgtcgatccggaccgccacatcgagcgggtcaccgagctgcaagaactcttcctcacgcgcgtcgggctcgacatcggcaaggtgtgggtcgcggacgacggcgccgcggtggcggtctggaccacgccggagagcgtcgaagcgggggcggtgttcgccgagatcggcccgcgcatggccgagttgagcggttcccggctggccgcgcagcaacagatggaaggcctcctggcgccgcaccggcccaaggagcccgcgtggttcctggccaccgtcggcgtctcgcccgaccaccagggcaagggtctgggcagcgccgtcgtgctccccggagtggaggcggccgagcgcgccggggtgcccgccttcctggagacctccgcgccccgcaacctccccttctacgagcggctcggcttcaccgtcaccgccgacgtcgaggtgcccgaaggaccgcgcacctggtgcatgacccgcaagcccggtgcctga

SEQ ID NO: 1312 - DNA, 2913 bp, Artificial Sequence
  Synthetic Polynucleotides
atggccttaccagtgaccgccttgctcctgccgctggccttgctgctccacgccgccaggccggacgaattcgaggtgcagctggtagaatccggcgggggacttgtacaggctggtggtagtctgagactgagctgtgtggcctccggcatcagcagcagcaagcggaacatgggatggtataggcaagcccctggtaagcagagggaatccgtggctacaatcagcagcggcggcaacaaggactacaccgacgccgtgaaggacaggttcaccatctccagggacaccaccaagaacaccgtgtacctgcagatgaactccctcaagcccgaggacaccgccgtgtactactgcaagatcgaggccggcacaggctgggccaccagaagaggctacacatactgggggcagggaacactggtgaccgtgagctccctcgagggcggaggcggaagtggaggcggaggatctggcggcggaggctctttcgaagttcaactggtggaatccggtggaggactggtgcaagcgggcggctcactgcgccttagctgtgctgccagcggcagtatcttcagcggcaatgtaatgggttggtacaggcgacaagccccaggcaaggagcgagagtgggtagccgcgattgcaagtgggggcagcatctactacagagattctgtgaaaggccgcttcactattagtcgggacaacgcaaaaaacacggtgtatctccaaatgaacagcttgaagccagaggacactgctgtctactattgtaacagtcatcccccaactctcccctattgggggctgggcactcaggtcaccgtgagttccacgcgtgagcagaaactgatctcggaagaggatctggcgaagcccaccacgacgccagcgccgcgaccaccaacaccggcgcccaccatcgcgtcgcagcccctgtccctgcgcccagaggcgtgccggccagcggcggggggcgcagtgcacacgagggggctggacttcgcctgtgacatctacatctgggcgcccttggccgggacttgtggggtccttctcctgtcactggttatcaccctttactgcaaacggggcagaaagaaactcctgtatatattcaaacaaccatttatgagaccagtacaaactactcaagaggaagatggctgtagctgccgatttccagaagaagaagaaggaggatgtgaactgagagtgaagttcagcaggagcgcagacgcccccgcgtaccagcagggccagaaccagctctataacgagctgaatctaggacgaagagaggagtacgatgttttggacaagagacgtggccgggaccctgagatggggggaaagccgagaaggaagaaccctcaggaaggcctgtacaatgaactgcagaaagataagatggcggaggcctacagtgagattgggatgaaaggcgagcgccggaggggcaaggggcacgatggcctttaccagggtctcagtacagccaccaaggacacctacgacgcccttcacatgcaggccctgccccctcgctctagaggatctggagcaacaaacttctcactactcaaacaagcaggtgacgtggaggagaatcccgggcctgggatccacatggccacttacgaggttctctgtgaggtggcgcggaaactgggcacggatgacagggaagtggtattgttcctcctaaacgtgttcatacctcaacccacactggcccaattaattggagctcttagagctttaaaggaggagggcaggttaacgtttcccctgttagcggaatgtctgtttcgtgcaggtcgcagagacctcttgcgcgacctgcttcacttagacccgcgttttttagagcgccacctagcgggcacaatgagttatttcagcccttatcagctcactgttctccacgtagacggggagctgtgtgcgagggatattaggtctttgatatttttaagcaaggacactatagggtctcgcagcacaccacagacattcttacactgggtgtactgtatggaaaacttagacctactgggtcccactgacgtggatgccctaatgtcaatgcttagatctttgtcaagagtagacctacagcgccaagtgcaaaccctaatgggccttcacctttccggcccatcacactcccaacactatcgccatacaccactcgagaccgatttctacgactacaaggacgacgatgacaagactagtggctccggcgagggcagaggaagtctactaacctgcggagatgtggaagaaaatcctggcccacatatgaccgagtacaagcccacggtgcgcctcgccacccgcgacgacgtccccagggccgtacgcaccctcgccgccgcgttcgccgactaccccgccacgcgccacaccgtcgatccggaccgccacatcgagcgggtcaccgagctgcaagaactcttcctcacgcgcgtcgggctcgacatcggcaaggtgtgggtcgcggacgacggcgccgcggtggcggtctggaccacgccggagagcgtcgaagcgggggcggtgttcgccgagatcggcccgcgcatggccgagttgagcggttcccggctggccgcgcagcaacagatggaaggcctcctggcgccgcaccggcccaaggagcccgcgtggttcctggccaccgtcggcgtctcgcccgaccaccagggcaagggtctgggcagcgccgtcgtgctccccggagtggaggcggccgagcgcgccggggtgcccgccttcctggagacctccgcgccccgcaacctccccttctacgagcggctcggcttcaccgtcaccgccgacgtcgaggtgcccgaaggaccgcgcacctggtgcatgacccgcaagcccggtgcctga

SEQ ID NO: 1313 - DNA, 3015 bp, Artificial Sequence
  Synthetic Polynucleotides
atggccttaccagtgaccgccttgctcctgccgctggccttgctgctccacgccgccaggccggacgaattcgaggtgcaactggtggaaagcggcggaggactggtgcaggctggcgatagcctgagactgagctgtgccgcctccggcagagccttcagcagatatgccatgggctggttcagacaggcccctggcaaagaacgcgagttcgtggccgccatcggctggggacctagcaagaccaactacgccgacagcgtgaagggccggttcaccatcagccgggacaacgccaagaacaccgtgtacctgcagatgaacaccctgaagcccgaggacaccgccgtgtactcttgcgccgccaagttcgtgaacaccgacagcacctggtcccgcagcgagatgtacacctattggggccagggcaccctcgtgaccgtgtctagtctcgagggaggaggcggctccgggggaggcggaagtggaggcggaggatctgggtctggaggaagcggatctggaggctcagggtcagggggctcaggcagtggaggctctttcgaagtgcaactggtggaatctggagggggaagcgtgcaggcaggcggatctctgagactgtcctgcaccacatctggcagagccctgaatatgtacgtgatgggatggtttcggcaggctcccggcaacgagcgggaatttgtggccgctacaagcagcagcggcggcagcacaagctaccccgattctgtgaagggcagattcacaatctcccgcgataatgccaagaatactgtgtacctgcagatgaatagtctgaagcctgaagatacagccgcctacagatgtgccgccagcccctacgtgtccacccccaccatgaacatcctggaagagtacagatactggggcctgggaacacaagtgacagtgtccagcacgcgtgagcagaaactgatctcggaagaggatctggcgaagcccaccacgacgccagcgccgcgaccaccaacaccggcgcccaccatcgcgtcgcagcccctgtccctgcgcccagaggcgtgccggccagcggcggggggcgcagtgcacacgagggggctggacttcgcctgtgacatctacatctgggcgcccttggccgggacttgtggggtccttctcctgtcactggttatcaccctttactgcaaacggggcagaaagaaactcctgtatatattcaaacaaccatttatgagaccagtacaaactactcaagaggaagatggctgtagctgccgatttccagaagaagaagaaggaggatgtgaactgagagtgaagttcagcaggagcgcagacgcccccgcgtaccagcagggccagaaccagctctataacgagctgaatctaggacgaagagaggagtacgatgttttggacaagagacgtggccgggaccctgagatggggggaaagccgagaaggaagaaccctcaggaaggcctgtacaatgaactgcagaaagataagatggcggaggcctacagtgagattgggatgaaaggcgagcgccggaggggcaaggggcacgatggcctttaccagggtctcagtacagccaccaaggacacctacgacgcccttcacatgcaggccctgccccctcgctctagaggatctggagcaacaaacttctcactactcaaacaagcaggtgacgtggaggagaatcccgggcctgggatccacatggccacttacgaggttctctgtgaggtggcgcggaaactgggcacggatgacagggaagtggtattgttcctcctaaacgtgttcatacctcaacccacactggcccaattaattggagctcttagagctttaaaggaggagggcaggttaacgtttcccctgttagcggaatgtctgtttcgtgcaggtcgcagagacctcttgcgcgacctgcttcacttagacccgcgttttttagagcgccacctagcgggcacaatgagttatttcagcccttatcagctcactgttctccacgtagacggggagctgtgtgcgagggatattaggtctttgatatttttaagcaaggacactatagggtctcgcagcacaccacagacattcttacactgggtgtactgtatggaaaacttagacctactgggtcccactgacgtggatgccctaatgtcaatgcttagatctttgtcaagagtagacctacagcgccaagtgcaaaccctaatgggccttcacctttccggcccatcacactcccaacactatcgccatacaccactcgagaccgatttctacgactacaaggacgacgatgacaagactagtggctccggcgagggcagaggaagtctactaacctgcggagatgtggaagaaaatcctggcccacatatgaccgagtacaagcccacggtgcgcctcgccacccgcgacgacgtccccagggccgtacgcaccctcgccgccgcgttcgccgactaccccgccacgcgccacaccgtcgatccggaccgccacatcgagcgggtcaccgagctgcaagaactcttcctcacgcgcgtcgggctcgacatcggcaaggtgtgggtcgcggacgacggcgccgcggtggcggtctggaccacgccggagagcgtcgaagcgggggcggtgttcgccgagatcggcccgcgcatggccgagttgagcggttcccggctggccgcgcagcaacagatggaaggcctcctggcgccgcaccggcccaaggagcccgcgtggttcctggccaccgtcggcgtctcgcccgaccaccagggcaagggtctgggcagcgccgtcgtgctccccggagtggaggcggccgagcgcgccggggtgcccgccttcctggagacctccgcgccccgcaacctccccttctacgagcggctcggcttcaccgtcaccgccgacgtcgaggtgcccgaaggaccgcgcacctggtgcatgacccgcaagcccggtgcctga

SEQ ID NO: 1314 - DNA, 2874 bp, Artificial Sequence
  Synthetic Polynucleotides
atggccttaccagtgaccgccttgctcctgccgctggccttgctgctccacgccgccaggccggacatccagatgacccagagccccagcagcctgtctgccagcgtgggcgacagagtgaccatcacctgtagcgccagcagcagcgtgtcctacatgtactggtatcagcagaagcccggcaaggcccccaagctgctgatctacctgaccagcaatctggcctccggcgtgcccagcagattttctggcagcggctccggcaccgacttcaccctgacaatcagctccctccagcccgaggacttcgccacctactactgtcagcagtggcggagcaaccccttcaccttcggccagggcaccaagctggaaatcaagagaggcggaggcggaagtggaggcggaggatctggcggcggaggctctcagatcaccctgaaagagtccggccccaccctcgtgaagcctacccagaccctgacactgacctgcaccttcagcggcttcagcctgagcacaagcggcatgggcgtgggctggatcagacagcctcctggaaaggccctggaatggctggcccacatttggtgggacgacgtgaagcggtacagccccagcctgaagtcccggctgaccattaccaaggacaccagcaagaaccaggtggtgctgaccatgacaaacatggaccccgtggacaccgccacatattactgcgcccggatcgtgtccttcgacaacgacgtggtgtccgctatggactactggggccagggaaccctcgtgaccgtgtctagtacgcgtgagcagaaactgatctcggaagaggatctggcgaagcccaccacgacgccagcgccgcgaccaccaacaccggcgcccaccatcgcgtcgcagcccctgtccctgcgcccagaggcgtgccggccagcggcggggggcgcagtgcacacgagggggctggacttcgcctgtgacatctacatctgggcgcccttggccgggacttgtggggtccttctcctgtcactggttatcaccctttactgcaaacggggcagaaagaaactcctgtatatattcaaacaaccatttatgagaccagtacaaactactcaagaggaagatggctgtagctgccgatttccagaagaagaagaaggaggatgtgaactgagagtgaagttcagcaggagcgcagacgcccccgcgtaccagcagggccagaaccagctctataacgagctgaatctaggacgaagagaggagtacgatgttttggacaagagacgtggccgggaccctgagatggggggaaagccgagaaggaagaaccctcaggaaggcctgtacaatgaactgcagaaagataagatggcggaggcctacagtgagattgggatgaaaggcgagcgccggaggggcaaggggcacgatggcctttaccagggtctcagtacagccaccaaggacacctacgacgcccttcacatgcaggccctgccccctcgctctagaggatctggagcaacaaacttctcactactcaaacaagcaggtgacgtggaggagaatcccgggcctgggatccacatggccacttacgaggttctctgtgaggtggcgcggaaactgggcacggatgacagggaagtggtattgttcctcctaaacgtgttcatacctcaacccacactggcccaattaattggagctcttagagctttaaaggaggagggcaggttaacgtttcccctgttagcggaatgtctgtttcgtgcaggtcgcagagacctcttgcgcgacctgcttcacttagacccgcgttttttagagcgccacctagcgggcacaatgagttatttcagcccttatcagctcactgttctccacgtagacggggagctgtgtgcgagggatattaggtctttgatatttttaagcaaggacactatagggtctcgcagcacaccacagacattcttacactgggtgtactgtatggaaaacttagacctactgggtcccactgacgtggatgccctaatgtcaatgcttagatctttgtcaagagtagacctacagcgccaagtgcaaaccctaatgggccttcacctttccggcccatcacactcccaacactatcgccatacaccactcgagaccgatttctacgactacaaggacgacgatgacaagactagtggctccggcgagggcagaggaagtctactaacctgcggagatgtggaagaaaatcctggcccacatatgaccgagtacaagcccacggtgcgcctcgccacccgcgacgacgtccccagggccgtacgcaccctcgccgccgcgttcgccgactaccccgccacgcgccacaccgtcgatccggaccgccacatcgagcgggtcaccgagctgcaagaactcttcctcacgcgcgtcgggctcgacatcggcaaggtgtgggtcgcggacgacggcgccgcggtggcggtctggaccacgccggagagcgtcgaagcgggggcggtgttcgccgagatcggcccgcgcatggccgagttgagcggttcccggctggccgcgcagcaacagatggaaggcctcctggcgccgcaccggcccaaggagcccgcgtggttcctggccaccgtcggcgtctcgcccgaccaccagggcaagggtctgggcagcgccgtcgtgctccccggagtggaggcggccgagcgcgccggggtgcccgccttcctggagacctccgcgccccgcaacctccccttctacgagcggctcggcttcaccgtcaccgccgacgtcgaggtgcccgaaggaccgcgcacctggtgcatgacccgcaagcccggtgcctga

SEQ ID NO: 1315 - DNA, 2859 bp, Artificial Sequence
  Synthetic Polynucleotides
atggccttaccagtgaccgccttgctcctgccgctggccttgctgctccacgccgccaggccggagatcgtgatgacccagagccctgccaccctgtccgtgtctccaggcgaaagagccaccctgagctgcaaggcttcccagagcgtgtccaacgacgtcgtgtggtatcagcagaagcccggccaggcccccagactgctgatctactacgccagcaacagatacaccggcatccccgccagattcagcggctctggcagcggcaccgagttcaccctgacaatcagcagcctccagagcgaggacttcgccgtgtactactgtcagcaggactacaccagcccctggaccttcggccagggcaccaagctggaaatcaagagaggcggaggcggaagtggaggcggaggatctggcggcggaggctctcaggtgcaactggtgcagagcggagccgaagtgaagaaacctggggccagcgtgaaggtgtcctgcaaggccagcggctacacctttaccaactacggcatgaactgggtgcgccaggctcctggacagggcctggaatggatgggctggatcaacacctacaccggcgagcccacctacgccgacgacttcaagggcagagtgaccatgaccaccgacaccagcacctccaccgcctacatggaactgcggagcctgagaagcgacgacaccgccgtgtattattgcgcccggatcggcgacagcagccccagcgattattggggccagggaaccctcgtgaccgtgtcctctacgcgtgagcagaaactgatctcggaagaggatctggcgaagcccaccacgacgccagcgccgcgaccaccaacaccggcgcccaccatcgcgtcgcagcccctgtccctgcgcccagaggcgtgccggccagcggcggggggcgcagtgcacacgagggggctggacttcgcctgtgacatctacatctgggcgcccttggccgggacttgtggggtccttctcctgtcactggttatcaccctttactgcaaacggggcagaaagaaactcctgtatatattcaaacaaccatttatgagaccagtacaaactactcaagaggaagatggctgtagctgccgatttccagaagaagaagaaggaggatgtgaactgagagtgaagttcagcaggagcgcagacgcccccgcgtaccagcagggccagaaccagctctataacgagctgaatctaggacgaagagaggagtacgatgttttggacaagagacgtggccgggaccctgagatggggggaaagccgagaaggaagaaccctcaggaaggcctgtacaatgaactgcagaaagataagatggcggaggcctacagtgagattgggatgaaaggcgagcgccggaggggcaaggggcacgatggcctttaccagggtctcagtacagccaccaaggacacctacgacgcccttcacatgcaggccctgccccctcgctctagaggatctggagcaacaaacttctcactactcaaacaagcaggtgacgtggaggagaatcccgggcctgggatccacatggccacttacgaggttctctgtgaggtggcgcggaaactgggcacggatgacagggaagtggtattgttcctcctaaacgtgttcatacctcaacccacactggcccaattaattggagctcttagagctttaaaggaggagggcaggttaacgtttcccctgttagcggaatgtctgtttcgtgcaggtcgcagagacctcttgcgcgacctgcttcacttagacccgcgttttttagagcgccacctagcgggcacaatgagttatttcagcccttatcagctcactgttctccacgtagacggggagctgtgtgcgagggatattaggtctttgatatttttaagcaaggacactatagggtctcgcagcacaccacagacattcttacactgggtgtactgtatggaaaacttagacctactgggtcccactgacgtggatgccctaatgtcaatgcttagatctttgtcaagagtagacctacagcgccaagtgcaaaccctaatgggccttcacctttccggcccatcacactcccaacactatcgccatacaccactcgagaccgatttctacgactacaaggacgacgatgacaagactagtggctccggcgagggcagaggaagtctactaacctgcggagatgtggaagaaaatcctggcccacatatgaccgagtacaagcccacggtgcgcctcgccacccgcgacgacgtccccagggccgtacgcaccctcgccgccgcgttcgccgactaccccgccacgcgccacaccgtcgatccggaccgccacatcgagcgggtcaccgagctgcaagaactcttcctcacgcgcgtcgggctcgacatcggcaaggtgtgggtcgcggacgacggcgccgcggtggcggtctggaccacgccggagagcgtcgaagcgggggcggtgttcgccgagatcggcccgcgcatggccgagttgagcggttcccggctggccgcgcagcaacagatggaaggcctcctggcgccgcaccggcccaaggagcccgcgtggttcctggccaccgtcggcgtctcgcccgaccaccagggcaagggtctgggcagcgccgtcgtgctccccggagtggaggcggccgagcgcgccggggtgcccgccttcctggagacctccgcgccccgcaacctccccttctacgagcggctcggcttcaccgtcaccgccgacgtcgaggtgcccgaaggaccgcgcacctggtgcatgacccgcaagcccggtgcctga

SEQ ID NO: 1316 - DNA, 2862 bp, Artificial Sequence
  Synthetic Polynucleotides
atggccttaccagtgaccgccttgctcctgccgctggccttgctgctccacgccgccaggccggacagcaccgacatccagatgacccagagccccagcagcctgtctgccagcgtgggcgacagagtgaccatcacctgtagagccagccagagcatcagcagctacctgaactggtatcagcagaagcccggcaaggcccccaaactgctgatctacctggccagcaacctgcagagcggcgtgcccagcagattttctggcagcggctccggcaccgacttcaccctgacaatcagctccctgcagcccgaggacttcgccacctactactgtcagcaggccgagtacatgcccctgaccttcggccagggaacaaaggtggaaatcaagagagccggcggaggcggaagtggaggcggaggatctggcggcggaggctctgaagtgcaactgctggaatctggcggcggactggtgcagcctggcggatctctgagactgagctgtgccgccagcggcttcacctttagcggctacgccatgagctgggtgcgccaggctcctggcaaaggcctggaatgggtgtccgagatcgcccctcccggcctgaataccagatacgccgatagcgtgaagggccggttcaccatcagccgggacaacagcaagaacaccctgtacctgcagatgaacagcctgcgggccgaggataccgccgtgtactactgcgccaagagcgacaccgccttcgactactggggacagggaacccttgtgaccgtgtccacgcgtgagcagaaactgatctcggaagaggatctggcgaagcccaccacgacgccagcgccgcgaccaccaacaccggcgcccaccatcgcgtcgcagcccctgtccctgcgcccagaggcgtgccggccagcggcggggggcgcagtgcacacgagggggctggacttcgcctgtgacatctacatctgggcgcccttggccgggacttgtggggtccttctcctgtcactggttatcaccctttactgcaaacggggcagaaagaaactcctgtatatattcaaacaaccatttatgagaccagtacaaactactcaagaggaagatggctgtagctgccgatttccagaagaagaagaaggaggatgtgaactgagagtgaagttcagcaggagcgcagacgcccccgcgtaccagcagggccagaaccagctctataacgagctgaatctaggacgaagagaggagtacgatgttttggacaagagacgtggccgggaccctgagatggggggaaagccgagaaggaagaaccctcaggaaggcctgtacaatgaactgcagaaagataagatggcggaggcctacagtgagattgggatgaaaggcgagcgccggaggggcaaggggcacgatggcctttaccagggtctcagtacagccaccaaggacacctacgacgcccttcacatgcaggccctgccccctcgctctagaggatctggagcaacaaacttctcactactcaaacaagcaggtgacgtggaggagaatcccgggcctgggatccacatggccacttacgaggttctctgtgaggtggcgcggaaactgggcacggatgacagggaagtggtattgttcctcctaaacgtgttcatacctcaacccacactggcccaattaattggagctcttagagctttaaaggaggagggcaggttaacgtttcccctgttagcggaatgtctgtttcgtgcaggtcgcagagacctcttgcgcgacctgcttcacttagacccgcgttttttagagcgccacctagcgggcacaatgagttatttcagcccttatcagctcactgttctccacgtagacggggagctgtgtgcgagggatattaggtctttgatatttttaagcaaggacactatagggtctcgcagcacaccacagacattcttacactgggtgtactgtatggaaaacttagacctactgggtcccactgacgtggatgccctaatgtcaatgcttagatctttgtcaagagtagacctacagcgccaagtgcaaaccctaatgggccttcacctttccggcccatcacactcccaacactatcgccatacaccactcgagaccgatttctacgactacaaggacgacgatgacaagactagtggctccggcgagggcagaggaagtctactaacctgcggagatgtggaagaaaatcctggcccacatatgaccgagtacaagcccacggtgcgcctcgccacccgcgacgacgtccccagggccgtacgcaccctcgccgccgcgttcgccgactaccccgccacgcgccacaccgtcgatccggaccgccacatcgagcgggtcaccgagctgcaagaactcttcctcacgcgcgtcgggctcgacatcggcaaggtgtgggtcgcggacgacggcgccgcggtggcggtctggaccacgccggagagcgtcgaagcgggggcggtgttcgccgagatcggcccgcgcatggccgagttgagcggttcccggctggccgcgcagcaacagatggaaggcctcctggcgccgcaccggcccaaggagcccgcgtggttcctggccaccgtcggcgtctcgcccgaccaccagggcaagggtctgggcagcgccgtcgtgctccccggagtggaggcggccgagcgcgccggggtgcccgccttcctggagacctccgcgccccgcaacctccccttctacgagcggctcggcttcaccgtcaccgccgacgtcgaggtgcccgaaggaccgcgcacctggtgcatgacccgcaagcccggtgcctga

SEQ ID NO: 1317 - DNA, 2871 bp, Artificial Sequence
  Synthetic Polynucleotides
atggccttaccagtgaccgccttgctcctgccgctggccttgctgctccacgccgccaggccggaccaggccgtgctgacccaggagagcgccctgaccaccagccccggcgagaccgtgaccctgacctgcagaagcagcaccggcgccgtgaccaccagcaactacgccaactgggtgcaggagaagcccgaccacctgttcaccggcctgatcggcggcaccaacaacagagtgcccggcgtgcccgccagattcagcggcagcctgatcggcgacaaggccgccctgaccatcaccggcgcccagaccgaggacgaggccatctacttctgcgtgctgtggcacagcaaccactgggtgttcggcggcggcaccaagctgaccgtgctgggcggaggcggaagtggaggcggaggatctggcggcggaggctctgacgtgcagctggtggagagcggcggcggcctggtgcagcccggcggcagcagaaagctgagctgcgccgccagcggcttcaccttcagcagcttcgggatgcactgggtgagacaggcccccgagaagggcctggagtgggtggcctacatcagcagcggcagcagcaccctgcactacgccgacaccgtgaagggcagattcaccatcagcagagacaaccccaagaacaccctgttcctgcagatgaccagcctgagaagcgaggacaccgccatgtactactgcgccagatggggcaactacccccactacgctatggactactggggccagggcaccagcgtgaccgtgagcagcacgcgtgagcagaaactgatctcggaagaggatctggcgaagcccaccacgacgccagcgccgcgaccaccaacaccggcgcccaccatcgcgtcgcagcccctgtccctgcgcccagaggcgtgccggccagcggcggggggcgcagtgcacacgagggggctggacttcgcctgtgacatctacatctgggcgcccttggccgggacttgtggggtccttctcctgtcactggttatcaccctttactgcaaacggggcagaaagaaactcctgtatatattcaaacaaccatttatgagaccagtacaaactactcaagaggaagatggctgtagctgccgatttccagaagaagaagaaggaggatgtgaactgagagtgaagttcagcaggagcgcagacgcccccgcgtaccagcagggccagaaccagctctataacgagctgaatctaggacgaagagaggagtacgatgttttggacaagagacgtggccgggaccctgagatggggggaaagccgagaaggaagaaccctcaggaaggcctgtacaatgaactgcagaaagataagatggcggaggcctacagtgagattgggatgaaaggcgagcgccggaggggcaaggggcacgatggcctttaccagggtctcagtacagccaccaaggacacctacgacgcccttcacatgcaggccctgccccctcgctctagaggatctggagcaacaaacttctcactactcaaacaagcaggtgacgtggaggagaatcccgggcctgggatccacatggccacttacgaggttctctgtgaggtggcgcggaaactgggcacggatgacagggaagtggtattgttcctcctaaacgtgttcatacctcaacccacactggcccaattaattggagctcttagagctttaaaggaggagggcaggttaacgtttcccctgttagcggaatgtctgtttcgtgcaggtcgcagagacctcttgcgcgacctgcttcacttagacccgcgttttttagagcgccacctagcgggcacaatgagttatttcagcccttatcagctcactgttctccacgtagacggggagctgtgtgcgagggatattaggtctttgatatttttaagcaaggacactatagggtctcgcagcacaccacagacattcttacactgggtgtactgtatggaaaacttagacctactgggtcccactgacgtggatgccctaatgtcaatgcttagatctttgtcaagagtagacctacagcgccaagtgcaaaccctaatgggccttcacctttccggcccatcacactcccaacactatcgccatacaccactcgagaccgatttctacgactacaaggacgacgatgacaagactagtggctccggcgagggcagaggaagtctactaacctgcggagatgtggaagaaaatcctggcccacatatgaccgagtacaagcccacggtgcgcctcgccacccgcgacgacgtccccagggccgtacgcaccctcgccgccgcgttcgccgactaccccgccacgcgccacaccgtcgatccggaccgccacatcgagcgggtcaccgagctgcaagaactcttcctcacgcgcgtcgggctcgacatcggcaaggtgtgggtcgcggacgacggcgccgcggtggcggtctggaccacgccggagagcgtcgaagcgggggcggtgttcgccgagatcggcccgcgcatggccgagttgagcggttcccggctggccgcgcagcaacagatggaaggcctcctggcgccgcaccggcccaaggagcccgcgtggttcctggccaccgtcggcgtctcgcccgaccaccagggcaagggtctgggcagcgccgtcgtgctccccggagtggaggcggccgagcgcgccggggtgcccgccttcctggagacctccgcgccccgcaacctccccttctacgagcggctcggcttcaccgtcaccgccgacgtcgaggtgcccgaaggaccgcgcacctggtgcatgacccgcaagcccggtgcctga

SEQ ID NO: 1318 - DNA, 2517 bp, Artificial Sequence
  Synthetic Polynucleotides
atggccctgcccgtgacagccctgctgctgcctctggctctgctgctgcacgccgccagacccgatgaattcgaggtgcaactggtggaaagcggcggaggctctgtgcagacaggcggctctctgagactgacctgtgccgccagcggcagaaccagcagatcctatggcatgggctggttcagacaggcccctggcaaagaacgcgagttcgtgtccggcatctcttggagaggcgacagcaccggctacgccgatagcgtgaagggccggttcaccatcagccgggacaacgccaagaacaccgtggacctgcagatgaacagcctgaagcccgaggacaccgccatctactactgtgccgctgccgccggatctgcttggtacggcacactgtacgagtacgactactggggccagggcacccttgtgaccgtgtcatctacgcgtgagcagaaactgatctcggaagaggatctggcgaagcccaccacgacgccagcgccgcgaccaccaacaccggcgcccaccatcgcgtcgcagcccctgtccctgcgcccagaggcgtgccggccagcggcggggggcgcagtgcacacgagggggctggacttcgcctgtgacatctacatctgggcgcccttggccgggacttgtggggtccttctcctgtcactggttatcaccctttactgcaaacggggcagaaagaaactcctgtatatattcaaacaaccatttatgagaccagtacaaactactcaagaggaagatggctgtagctgccgatttccagaagaagaagaaggaggatgtgaactgagagtgaagttcagcaggagcgcagacgcccccgcgtaccagcagggccagaaccagctctataacgagctgaatctaggacgaagagaggagtacgatgttttggacaagagacgtggccgggaccctgagatggggggaaagccgagaaggaagaaccctcaggaaggcctgtacaatgaactgcagaaagataagatggcggaggcctacagtgagattgggatgaaaggcgagcgccggaggggcaaggggcacgatggcctttaccagggtctcagtacagccaccaaggacacctacgacgcccttcacatgcaggccctgccccctcgctctagaggatctggagcaacaaacttctcactactcaaacaagcaggtgacgtggaggagaatcccgggcctgggatccacatggccacttacgaggttctctgtgaggtggcgcggaaactgggcacggatgacagggaagtggtattgttcctcctaaacgtgttcatacctcaacccacactggcccaattaattggagctcttagagctttaaaggaggagggcaggttaacgtttcccctgttagcggaatgtctgtttcgtgcaggtcgcagagacctcttgcgcgacctgcttcacttagacccgcgttttttagagcgccacctagcgggcacaatgagttatttcagcccttatcagctcactgttctccacgtagacggggagctgtgtgcgagggatattaggtctttgatatttttaagcaaggacactatagggtctcgcagcacaccacagacattcttacactgggtgtactgtatggaaaacttagacctactgggtcccactgacgtggatgccctaatgtcaatgcttagatctttgtcaagagtagacctacagcgccaagtgcaaaccctaatgggccttcacctttccggcccatcacactcccaacactatcgccatacaccactcgagaccgatttctacgactacaaggacgacgatgacaagactagtggctccggcgagggcagaggaagtctactaacctgcggagatgtggaagaaaatcctggcccacatatgaccgagtacaagcccacggtgcgcctcgccacccgcgacgacgtccccagggccgtacgcaccctcgccgccgcgttcgccgactaccccgccacgcgccacaccgtcgatccggaccgccacatcgagcgggtcaccgagctgcaagaactcttcctcacgcgcgtcgggctcgacatcggcaaggtgtgggtcgcggacgacggcgccgcggtggcggtctggaccacgccggagagcgtcgaagcgggggcggtgttcgccgagatcggcccgcgcatggccgagttgagcggttcccggctggccgcgcagcaacagatggaaggcctcctggcgccgcaccggcccaaggagcccgcgtggttcctggccaccgtcggcgtctcgcccgaccaccagggcaagggtctgggcagcgccgtcgtgctccccggagtggaggcggccgagcgcgccggggtgcccgccttcctggagacctccgcgccccgcaacctccccttctacgagcggctcggcttcaccgtcaccgccgacgtcgaggtgcccgaaggaccgcgcacctggtgcatgacccgcaagcccggtgcctga

SEQ ID NO: 1319 - DNA, 2943 bp, Artificial Sequence
  Synthetic Polynucleotides
atggccctgcccgtgacagccctgctgctgcctctggctctgctgctgcacgccgccagacccgatgaattcgaggtgcaactggtggaaagcggcggaggctctgtgcagacaggcggctctctgagactgacctgtgccgccagcggcagaaccagcagatcctatggcatgggctggttcagacaggcccctggcaaagaacgcgagttcgtgtccggcatctcttggagaggcgacagcaccggctacgccgatagcgtgaagggccggttcaccatcagccgggacaacgccaagaacaccgtggacctgcagatgaacagcctgaagcccgaggacaccgccatctactactgtgccgctgccgccggatctgcttggtacggcacactgtacgagtacgactactggggccagggcacccttgtgaccgtgtcatctctcgagggcggaggcggaagtggaggcggaggatctggcggcggaggctctttcgaagaggtgcaactggtggaatccgggggaggcagcgtgcaggctgggggatcactgagactgtcttgtgctgcctccggcgacacctacggcagctattggatgggatggtttcggcaggctcccggaaaagaacgggaaggcgtggccgccatcaacagaggcggcggatacaccgtgtacgccgactctgtgaagggcagattcacaatctccagagacacagccaagaatactgtgtacctgcagatgaactccctgcgccccgacgataccgccgactattattgcgccgcttccggcgtgctgggcggcctgcatgaggactggttcaattattggggacagggaacacttgtgacagtgtccagcacgcgtgagcagaaactgatctcggaagaggatctggcgaagcccaccacgacgccagcgccgcgaccaccaacaccggcgcccaccatcgcgtcgcagcccctgtccctgcgcccagaggcgtgccggccagcggcggggggcgcagtgcacacgagggggctggacttcgcctgtgacatctacatctgggcgcccttggccgggacttgtggggtccttctcctgtcactggttatcaccctttactgcaaacggggcagaaagaaactcctgtatatattcaaacaaccatttatgagaccagtacaaactactcaagaggaagatggctgtagctgccgatttccagaagaagaagaaggaggatgtgaactgagagtgaagttcagcaggagcgcagacgcccccgcgtaccagcagggccagaaccagctctataacgagctgaatctaggacgaagagaggagtacgatgttttggacaagagacgtggccgggaccctgagatggggggaaagccgagaaggaagaaccctcaggaaggcctgtacaatgaactgcagaaagataagatggcggaggcctacagtgagattgggatgaaaggcgagcgccggaggggcaaggggcacgatggcctttaccagggtctcagtacagccaccaaggacacctacgacgcccttcacatgcaggccctgccccctcgctctagaggatctggagcaacaaacttctcactactcaaacaagcaggtgacgtggaggagaatcccgggcctgggatccacatggccacttacgaggttctctgtgaggtggcgcggaaactgggcacggatgacagggaagtggtattgttcctcctaaacgtgttcatacctcaacccacactggcccaattaattggagctcttagagctttaaaggaggagggcaggttaacgtttcccctgttagcggaatgtctgtttcgtgcaggtcgcagagacctcttgcgcgacctgcttcacttagacccgcgttttttagagcgccacctagcgggcacaatgagttatttcagcccttatcagctcactgttctccacgtagacggggagctgtgtgcgagggatattaggtctttgatatttttaagcaaggacactatagggtctcgcagcacaccacagacattcttacactgggtgtactgtatggaaaacttagacctactgggtcccactgacgtggatgccctaatgtcaatgcttagatctttgtcaagagtagacctacagcgccaagtgcaaaccctaatgggccttcacctttccggcccatcacactcccaacactatcgccatacaccactcgagaccgatttctacgactacaaggacgacgatgacaagactagtggctccggcgagggcagaggaagtctactaacctgcggagatgtggaagaaaatcctggcccacatatgaccgagtacaagcccacggtgcgcctcgccacccgcgacgacgtccccagggccgtacgcaccctcgccgccgcgttcgccgactaccccgccacgcgccacaccgtcgatccggaccgccacatcgagcgggtcaccgagctgcaagaactcttcctcacgcgcgtcgggctcgacatcggcaaggtgtgggtcgcggacgacggcgccgcggtggcggtctggaccacgccggagagcgtcgaagcgggggcggtgttcgccgagatcggcccgcgcatggccgagttgagcggttcccggctggccgcgcagcaacagatggaaggcctcctggcgccgcaccggcccaaggagcccgcgtggttcctggccaccgtcggcgtctcgcccgaccaccagggcaagggtctgggcagcgccgtcgtgctccccggagtggaggcggccgagcgcgccggggtgcccgccttcctggagacctccgcgccccgcaacctccccttctacgagcggctcggcttcaccgtcaccgccgacgtcgaggtgcccgaaggaccgcgcacctggtgcatgacccgcaagcccggtgcctga

SEQ ID NO: 1320 - DNA, 3000 bp, Artificial Sequence
  Synthetic Polynucleotides
atggccctgcccgtgacagccctgctgctgcctctggctctgctgctgcacgccgccagacccgatgaattcgaggtgcagctcgtagaatctggaggtggttccgtgcaagccggaggatcattgcgactgacctgcgcagcgagcggatctacttctcgctcttacggtatgggatggttcagacaggctcctgggaaagagcgcgagttcgtttcaggcatctcctggaggggggacagcaccggctacgcagatagcgtgaagggcaggttcacgatcagccgagacaacgccaaaaacaccgtcgatctgcaaatgaatagtctgaagcccgaagatactgcgatctactactgtgccgccgcagcagggtccacctggtacggcacactctacgagtacgactactgggggcagggaaccctggtaaccgtgtcctctctcgagggaggaggcggctccgggggaggcggaagtggaggcggaggatctgggtctggaggaagcggatctggaggctcagggtcagggggctcaggcagtggaggctctttcgaagttcagctcgtggaaagcggtggcggaagtgtgcaggccggaggcagtttgcgcctgagctgcgctgcttccggcgatacatacgggtcttactggatgggctggtttaggcaggcacctggacaagaaagagaagctgtggccgctattaacaggggaggtggctataccgtttatgctgattccgtgaagggccgattcacaatctcccgggataacgccaaaaacactctgtacctgcagatgaactcccttaggcccgatgacacagccgattactattgtgcggcctccggcgtgctgggtggtctgcatgaggattggttcaactactgggggcaaggcaccctcgtaaccgtgagtagcacgcgtgagcagaaactgatctcggaagaggatctggcgaagcccaccacgacgccagcgccgcgaccaccaacaccggcgcccaccatcgcgtcgcagcccctgtccctgcgcccagaggcgtgccggccagcggcggggggcgcagtgcacacgagggggctggacttcgcctgtgacatctacatctgggcgcccttggccgggacttgtggggtccttctcctgtcactggttatcaccctttactgcaaacggggcagaaagaaactcctgtatatattcaaacaaccatttatgagaccagtacaaactactcaagaggaagatggctgtagctgccgatttccagaagaagaagaaggaggatgtgaactgagagtgaagttcagcaggagcgcagacgcccccgcgtaccagcagggccagaaccagctctataacgagctgaatctaggacgaagagaggagtacgatgttttggacaagagacgtggccgggaccctgagatggggggaaagccgagaaggaagaaccctcaggaaggcctgtacaatgaactgcagaaagataagatggcggaggcctacagtgagattgggatgaaaggcgagcgccggaggggcaaggggcacgatggcctttaccagggtctcagtacagccaccaaggacacctacgacgcccttcacatgcaggccctgccccctcgctctagaggatctggagcaacaaacttctcactactcaaacaagcaggtgacgtggaggagaatcccgggcctgggatccacatggccacttacgaggttctctgtgaggtggcgcggaaactgggcacggatgacagggaagtggtattgttcctcctaaacgtgttcatacctcaacccacactggcccaattaattggagctcttagagctttaaaggaggagggcaggttaacgtttcccctgttagcggaatgtctgtttcgtgcaggtcgcagagacctcttgcgcgacctgcttcacttagacccgcgttttttagagcgccacctagcgggcacaatgagttatttcagcccttatcagctcactgttctccacgtagacggggagctgtgtgcgagggatattaggtctttgatatttttaagcaaggacactatagggtctcgcagcacaccacagacattcttacactgggtgtactgtatggaaaacttagacctactgggtcccactgacgtggatgccctaatgtcaatgcttagatctttgtcaagagtagacctacagcgccaagtgcaaaccctaatgggccttcacctttccggcccatcacactcccaacactatcgccatacaccactcgagaccgatttctacgactacaaggacgacgatgacaagactagtggctccggcgagggcagaggaagtctactaacctgcggagatgtggaagaaaatcctggcccacatatgaccgagtacaagcccacggtgcgcctcgccacccgcgacgacgtccccagggccgtacgcaccctcgccgccgcgttcgccgactaccccgccacgcgccacaccgtcgatccggaccgccacatcgagcgggtcaccgagctgcaagaactcttcctcacgcgcgtcgggctcgacatcggcaaggtgtgggtcgcggacgacggcgccgcggtggcggtctggaccacgccggagagcgtcgaagcgggggcggtgttcgccgagatcggcccgcgcatggccgagttgagcggttcccggctggccgcgcagcaacagatggaaggcctcctggcgccgcaccggcccaaggagcccgcgtggttcctggccaccgtcggcgtctcgcccgaccaccagggcaagggtctgggcagcgccgtcgtgctccccggagtggaggcggccgagcgcgccggggtgcccgccttcctggagacctccgcgccccgcaacctccccttctacgagcggctcggcttcaccgtcaccgccgacgtcgaggtgcccgaaggaccgcgcacctggtgcatgacccgcaagcccggtgcctga

SEQ ID NO: 1321 - DNA, 2844 bp, Artificial Sequence
  Synthetic Polynucleotides
atggccttaccagtgaccgccttgctcctgccgctggccttgctgctccacgccgccaggccggacatccagatgacccagagccccagcagcctgtctgccagcgtgggcgacagagtgaccatcacctgtagagccagccagggcatcagaaacaacctggcctggtatcagcagaagcccggcaaggcccccaagcggctgatctacgccgccagcaatctccagagcggcgtgcccagcagattcacaggctctggcagcggcaccgagttcaccctgatcgtgtctagcctccagcccgaggacttcgccacctactactgcctccagcaccacagctaccccctgacatctggcggaggcaccaaggtggaaggcggaggcggaagtggaggcggaggatctggcggcggaggctctgaggtgcaggtgctggaaagtggcggaggactggtgcagcctggcggctctctgagactgtcttgtgccgccagcggcttcaccttcagcagctacgccatgagctgggtgcgccaggcccctggaaaaggactggaatgggtgtccgccatcagcggctctggcgggtctaccaactacgccgatagcgtgaagggccggttcaccatcagccgggacaacagcaagaacaccctgtacctccagatgaacagcctgcgggccgaggacaccgccgtgtattattgtgccggcagcagcgggtggagcgagtattggggacagggcaccctcgtgaccgtgtcctctacgcgtgagcagaaactgatctcggaagaggatctggcgaagcccaccacgacgccagcgccgcgaccaccaacaccggcgcccaccatcgcgtcgcagcccctgtccctgcgcccagaggcgtgccggccagcggcggggggcgcagtgcacacgagggggctggacttcgcctgtgacatctacatctgggcgcccttggccgggacttgtggggtccttctcctgtcactggttatcaccctttactgcaaacggggcagaaagaaactcctgtatatattcaaacaaccatttatgagaccagtacaaactactcaagaggaagatggctgtagctgccgatttccagaagaagaagaaggaggatgtgaactgagagtgaagttcagcaggagcgcagacgcccccgcgtaccagcagggccagaaccagctctataacgagctgaatctaggacgaagagaggagtacgatgttttggacaagagacgtggccgggaccctgagatggggggaaagccgagaaggaagaaccctcaggaaggcctgtacaatgaactgcagaaagataagatggcggaggcctacagtgagattgggatgaaaggcgagcgccggaggggcaaggggcacgatggcctttaccagggtctcagtacagccaccaaggacacctacgacgcccttcacatgcaggccctgccccctcgctctagaggatctggagcaacaaacttctcactactcaaacaagcaggtgacgtggaggagaatcccgggcctgggatccacatggccacttacgaggttctctgtgaggtggcgcggaaactgggcacggatgacagggaagtggtattgttcctcctaaacgtgttcatacctcaacccacactggcccaattaattggagctcttagagctttaaaggaggagggcaggttaacgtttcccctgttagcggaatgtctgtttcgtgcaggtcgcagagacctcttgcgcgacctgcttcacttagacccgcgttttttagagcgccacctagcgggcacaatgagttatttcagcccttatcagctcactgttctccacgtagacggggagctgtgtgcgagggatattaggtctttgatatttttaagcaaggacactatagggtctcgcagcacaccacagacattcttacactgggtgtactgtatggaaaacttagacctactgggtcccactgacgtggatgccctaatgtcaatgcttagatctttgtcaagagtagacctacagcgccaagtgcaaaccctaatgggccttcacctttccggcccatcacactcccaacactatcgccatacaccactcgagaccgatttctacgactacaaggacgacgatgacaagactagtggctccggcgagggcagaggaagtctactaacctgcggagatgtggaagaaaatcctggcccacatatgaccgagtacaagcccacggtgcgcctcgccacccgcgacgacgtccccagggccgtacgcaccctcgccgccgcgttcgccgactaccccgccacgcgccacaccgtcgatccggaccgccacatcgagcgggtcaccgagctgcaagaactcttcctcacgcgcgtcgggctcgacatcggcaaggtgtgggtcgcggacgacggcgccgcggtggcggtctggaccacgccggagagcgtcgaagcgggggcggtgttcgccgagatcggcccgcgcatggccgagttgagcggttcccggctggccgcgcagcaacagatggaaggcctcctggcgccgcaccggcccaaggagcccgcgtggttcctggccaccgtcggcgtctcgcccgaccaccagggcaagggtctgggcagcgccgtcgtgctccccggagtggaggcggccgagcgcgccggggtgcccgccttcctggagacctccgcgccccgcaacctccccttctacgagcggctcggcttcaccgtcaccgccgacgtcgaggtgcccgaaggaccgcgcacctggtgcatgacccgcaagcccggtgcctga

SEQ ID NO: 1322 - DNA, 2862 bp, Artificial Sequence
  Synthetic Polynucleotides
atggccttaccagtgaccgccttgctcctgccgctggccttgctgctccacgccgccaggccggacgagatccagctggtgcagagcggagccgaagtgaagaagcctggcgagagcctgcggatcagctgcaagggcagcggcttcaacatcgaggactactacatccactgggtgcgccagatgcccggcaagggcctggaatggatgggcagaatcgaccccgagaacgacgagactaagtacggccccatcttccagggccacgtgaccatcagcgccgacaccagcatcaacaccgtgtacctccagtggtccagcctgaaggccagcgacaccgccatgtactactgcgcctttagaggcggcgtgtactggggccagggcaccacagtgacagtgtctagcggcggaggcggaagtggaggcggaggatctggcggcggaggctctgatgtcgtgatgacccagagccccgacagcctggctgtgtctctgggagagagagccaccatcaactgcaagtccagccagtccctgctggacagcgacggcaagacctacctgaactggctccagcagaagcccggccagccccccaagagactgatctccctggtgtccaagctggactccggcgtgcccgatagattttccggctctggcagcggcaccgacttcaccctgacaatcagctcccttcaggccgaggacgtggccgtgtactattgctggcagggcacacacttccccggcacctttggcggaggcaccaaggtggaaatcaagacgcgtgagcagaaactgatctcggaagaggatctggcgaagcccaccacgacgccagcgccgcgaccaccaacaccggcgcccaccatcgcgtcgcagcccctgtccctgcgcccagaggcgtgccggccagcggcggggggcgcagtgcacacgagggggctggacttcgcctgtgacatctacatctgggcgcccttggccgggacttgtggggtccttctcctgtcactggttatcaccctttactgcaaacggggcagaaagaaactcctgtatatattcaaacaaccatttatgagaccagtacaaactactcaagaggaagatggctgtagctgccgatttccagaagaagaagaaggaggatgtgaactgagagtgaagttcagcaggagcgcagacgcccccgcgtaccagcagggccagaaccagctctataacgagctgaatctaggacgaagagaggagtacgatgttttggacaagagacgtggccgggaccctgagatggggggaaagccgagaaggaagaaccctcaggaaggcctgtacaatgaactgcagaaagataagatggcggaggcctacagtgagattgggatgaaaggcgagcgccggaggggcaaggggcacgatggcctttaccagggtctcagtacagccaccaaggacacctacgacgcccttcacatgcaggccctgccccctcgctctagaggatctggagcaacaaacttctcactactcaaacaagcaggtgacgtggaggagaatcccgggcctgggatccacatggccacttacgaggttctctgtgaggtggcgcggaaactgggcacggatgacagggaagtggtattgttcctcctaaacgtgttcatacctcaacccacactggcccaattaattggagctcttagagctttaaaggaggagggcaggttaacgtttcccctgttagcggaatgtctgtttcgtgcaggtcgcagagacctcttgcgcgacctgcttcacttagacccgcgttttttagagcgccacctagcgggcacaatgagttatttcagcccttatcagctcactgttctccacgtagacggggagctgtgtgcgagggatattaggtctttgatatttttaagcaaggacactatagggtctcgcagcacaccacagacattcttacactgggtgtactgtatggaaaacttagacctactgggtcccactgacgtggatgccctaatgtcaatgcttagatctttgtcaagagtagacctacagcgccaagtgcaaaccctaatgggccttcacctttccggcccatcacactcccaacactatcgccatacaccactcgagaccgatttctacgactacaaggacgacgatgacaagactagtggctccggcgagggcagaggaagtctactaacctgcggagatgtggaagaaaatcctggcccacatatgaccgagtacaagcccacggtgcgcctcgccacccgcgacgacgtccccagggccgtacgcaccctcgccgccgcgttcgccgactaccccgccacgcgccacaccgtcgatccggaccgccacatcgagcgggtcaccgagctgcaagaactcttcctcacgcgcgtcgggctcgacatcggcaaggtgtgggtcgcggacgacggcgccgcggtggcggtctggaccacgccggagagcgtcgaagcgggggcggtgttcgccgagatcggcccgcgcatggccgagttgagcggttcccggctggccgcgcagcaacagatggaaggcctcctggcgccgcaccggcccaaggagcccgcgtggttcctggccaccgtcggcgtctcgcccgaccaccagggcaagggtctgggcagcgccgtcgtgctccccggagtggaggcggccgagcgcgccggggtgcccgccttcctggagacctccgcgccccgcaacctccccttctacgagcggctcggcttcaccgtcaccgccgacgtcgaggtgcccgaaggaccgcgcacctggtgcatgacccgcaagcccggtgcctga

SEQ ID NO: 1323 - DNA, 2883 bp, Artificial Sequence
  Synthetic Polynucleotides
atggccttaccagtgaccgccttgctcctgccgctggccttgctgctccacgccgccaggccggacgagcttgtgatgacccagagccccagcagcctgacagtgacagccggcgagaaagtgaccatgagctgcaagagcagccagagcctgctgaacagcggcaaccagaagaactacctgacctggtatcagcagaagcccggccagccccccaagctgctgatctactgggccagcaccagagaaagcggcgtgcccgatagattcaccggctctggcagcggcaccgacttcaccctgacaatcagcagcgtgcaggccgaggacctggccgtgtactactgccagaacgactacagctaccccctgaccttcggagccggcaccaagctggaaatcaagggcggaggcggaagtggaggcggaggatctggcggcggaggctctgaagtgcagctgctggaacagtctggcgccgaacttgtgcggcctggcaccagcgtgaagatcagctgtaaagccagcggctacgccttcaccaactactggctgggctgggtcaagcagaggcctggacacggcctggaatggatcggcgacatctttcccggctccggcaacatccactacaacgagaagttcaagggcaaggccaccctgaccgccgacaagtctagcagcaccgcctacatgcagctgtccagcctgacctttgaggacagcgccgtgtatttctgtgcccggctgcggaactgggacgagcccatggattattggggccagggcaccaccgtgaccgtgtctagtacgcgtgagcagaaactgatctcggaagaggatctggcgaagcccaccacgacgccagcgccgcgaccaccaacaccggcgcccaccatcgcgtcgcagcccctgtccctgcgcccagaggcgtgccggccagcggcggggggcgcagtgcacacgagggggctggacttcgcctgtgacatctacatctgggcgcccttggccgggacttgtggggtccttctcctgtcactggttatcaccctttactgcaaacggggcagaaagaaactcctgtatatattcaaacaaccatttatgagaccagtacaaactactcaagaggaagatggctgtagctgccgatttccagaagaagaagaaggaggatgtgaactgagagtgaagttcagcaggagcgcagacgcccccgcgtaccagcagggccagaaccagctctataacgagctgaatctaggacgaagagaggagtacgatgttttggacaagagacgtggccgggaccctgagatggggggaaagccgagaaggaagaaccctcaggaaggcctgtacaatgaactgcagaaagataagatggcggaggcctacagtgagattgggatgaaaggcgagcgccggaggggcaaggggcacgatggcctttaccagggtctcagtacagccaccaaggacacctacgacgcccttcacatgcaggccctgccccctcgctctagaggatctggagcaacaaacttctcactactcaaacaagcaggtgacgtggaggagaatcccgggcctgggatccacatggccacttacgaggttctctgtgaggtggcgcggaaactgggcacggatgacagggaagtggtattgttcctcctaaacgtgttcatacctcaacccacactggcccaattaattggagctcttagagctttaaaggaggagggcaggttaacgtttcccctgttagcggaatgtctgtttcgtgcaggtcgcagagacctcttgcgcgacctgcttcacttagacccgcgttttttagagcgccacctagcgggcacaatgagttatttcagcccttatcagctcactgttctccacgtagacggggagctgtgtgcgagggatattaggtctttgatatttttaagcaaggacactatagggtctcgcagcacaccacagacattcttacactgggtgtactgtatggaaaacttagacctactgggtcccactgacgtggatgccctaatgtcaatgcttagatctttgtcaagagtagacctacagcgccaagtgcaaaccctaatgggccttcacctttccggcccatcacactcccaacactatcgccatacaccactcgagaccgatttctacgactacaaggacgacgatgacaagactagtggctccggcgagggcagaggaagtctactaacctgcggagatgtggaagaaaatcctggcccacatatgaccgagtacaagcccacggtgcgcctcgccacccgcgacgacgtccccagggccgtacgcaccctcgccgccgcgttcgccgactaccccgccacgcgccacaccgtcgatccggaccgccacatcgagcgggtcaccgagctgcaagaactcttcctcacgcgcgtcgggctcgacatcggcaaggtgtgggtcgcggacgacggcgccgcggtggcggtctggaccacgccggagagcgtcgaagcgggggcggtgttcgccgagatcggcccgcgcatggccgagttgagcggttcccggctggccgcgcagcaacagatggaaggcctcctggcgccgcaccggcccaaggagcccgcgtggttcctggccaccgtcggcgtctcgcccgaccaccagggcaagggtctgggcagcgccgtcgtgctccccggagtggaggcggccgagcgcgccggggtgcccgccttcctggagacctccgcgccccgcaacctccccttctacgagcggctcggcttcaccgtcaccgccgacgtcgaggtgcccgaaggaccgcgcacctggtgcatgacccgcaagcccggtgcctga

SEQ ID NO: 1324 - DNA, 2886 bp, Artificial Sequence
  Synthetic Polynucleotides
atggccttaccagtgaccgccttgctcctgccgctggccttgctgctccacgccgccaggccggacgagctgcagatgacccagagccctagcagcctgtctgccagcgtgggcgacagagtgaccatcacctgtagagccagccagagcatcagcagctacctgaactggtatcagcagaagcccggccagccccccaaactgctgatctactgggccagcaccagagaaagcggcgtgcccgatagattcagcggcagcgagagcggcaccaactacaccctgaccatcagctccctgcagcccgaggacttcgccacctacttttgccagcagagcgacagcctgcccatcacctttggacagggcacccggctggacattcagggcggaggcggaagtggaggcggaggatctggcggcggaggctctgaggtgcaactgctggaatctgggggcggagtggtgcagcctggcagaagcctgagactgagctgtgccgccagcggcttcaccttcagctcctacggaatgcactgggtgcgccaggcccctggcaaaggactggaatgggtggccgtgatctcctacgacggcagcaacaagtactacgccgacagcgtgaagggccggttcaccatcagccgggacaacagcaagaacaccctgtacctgcagatgaacagcctgcgggccgaggacaccgccgtgtactactgcgccaaggatatgggctggggcagcggctggcggccttactactactacggcatggacgtgtggggccagggcaccaccgtgacagtgtcatctacgcgtgagcagaaactgatctcggaagaggatctggcgaagcccaccacgacgccagcgccgcgaccaccaacaccggcgcccaccatcgcgtcgcagcccctgtccctgcgcccagaggcgtgccggccagcggcggggggcgcagtgcacacgagggggctggacttcgcctgtgacatctacatctgggcgcccttggccgggacttgtggggtccttctcctgtcactggttatcaccctttactgcaaacggggcagaaagaaactcctgtatatattcaaacaaccatttatgagaccagtacaaactactcaagaggaagatggctgtagctgccgatttccagaagaagaagaaggaggatgtgaactgagagtgaagttcagcaggagcgcagacgcccccgcgtaccagcagggccagaaccagctctataacgagctgaatctaggacgaagagaggagtacgatgttttggacaagagacgtggccgggaccctgagatggggggaaagccgagaaggaagaaccctcaggaaggcctgtacaatgaactgcagaaagataagatggcggaggcctacagtgagattgggatgaaaggcgagcgccggaggggcaaggggcacgatggcctttaccagggtctcagtacagccaccaaggacacctacgacgcccttcacatgcaggccctgccccctcgctctagaggatctggagcaacaaacttctcactactcaaacaagcaggtgacgtggaggagaatcccgggcctgggatccacatggccacttacgaggttctctgtgaggtggcgcggaaactgggcacggatgacagggaagtggtattgttcctcctaaacgtgttcatacctcaacccacactggcccaattaattggagctcttagagctttaaaggaggagggcaggttaacgtttcccctgttagcggaatgtctgtttcgtgcaggtcgcagagacctcttgcgcgacctgcttcacttagacccgcgttttttagagcgccacctagcgggcacaatgagttatttcagcccttatcagctcactgttctccacgtagacggggagctgtgtgcgagggatattaggtctttgatatttttaagcaaggacactatagggtctcgcagcacaccacagacattcttacactgggtgtactgtatggaaaacttagacctactgggtcccactgacgtggatgccctaatgtcaatgcttagatctttgtcaagagtagacctacagcgccaagtgcaaaccctaatgggccttcacctttccggcccatcacactcccaacactatcgccatacaccactcgagaccgatttctacgactacaaggacgacgatgacaagactagtggctccggcgagggcagaggaagtctactaacctgcggagatgtggaagaaaatcctggcccacatatgaccgagtacaagcccacggtgcgcctcgccacccgcgacgacgtccccagggccgtacgcaccctcgccgccgcgttcgccgactaccccgccacgcgccacaccgtcgatccggaccgccacatcgagcgggtcaccgagctgcaagaactcttcctcacgcgcgtcgggctcgacatcggcaaggtgtgggtcgcggacgacggcgccgcggtggcggtctggaccacgccggagagcgtcgaagcgggggcggtgttcgccgagatcggcccgcgcatggccgagttgagcggttcccggctggccgcgcagcaacagatggaaggcctcctggcgccgcaccggcccaaggagcccgcgtggttcctggccaccgtcggcgtctcgcccgaccaccagggcaagggtctgggcagcgccgtcgtgctccccggagtggaggcggccgagcgcgccggggtgcccgccttcctggagacctccgcgccccgcaacctccccttctacgagcggctcggcttcaccgtcaccgccgacgtcgaggtgcccgaaggaccgcgcacctggtgcatgacccgcaagcccggtgcctga

SEQ ID NO: 1325 - DNA, 2877 bp, Artificial Sequence
  Synthetic Polynucleotides
atggccttaccagtgaccgccttgctcctgccgctggccttgctgctccacgccgccaggccggacgacatccaaatgacacagagtccttctagtttgagtgcgagcgtgggggacagggtgaccattacctgcagggccagccagagcataagctcataccttaattggtaccagcaaaaaccaggtaaggcccctaagctcctgatctacgcggcctcttcacttcaatctggggtcccttcccgcttcagtggctccggcagcggcaccgacttcacgctcactatatcaagtctgcagcctgaggatctcgccacctattactgtcaacaaagttattccacccctttcacctttggaccgggcacgaaagtggatattaagggcggaggcggaagtggaggcggaggatctggcggcggaggctctgtgcacgaggtccagcttgtgcagtccggggcagaggtcaagaagcctggttctagcgtaaaagtgagttgcaaagcctcaggtgggacattttcatcctacgcgatcagttgggttagacaggctcctggtcaagggctggaatggatgggcggaattattccaatcttcggaacagcgaattacgcgcagaagttccagggtagagtaaccatcactgctgacaagtccacctccaccgcatacatggaattgtctagtctccggagcgaggatacggcggtgtattattgtgctacgttcgccctgtttggcttccgcgaacaggctttcgacatctgggggcagggcacgacagtcacggttagtagtacgcgtgagcagaaactgatctcggaagaggatctggcgaagcccaccacgacgccagcgccgcgaccaccaacaccggcgcccaccatcgcgtcgcagcccctgtccctgcgcccagaggcgtgccggccagcggcggggggcgcagtgcacacgagggggctggacttcgcctgtgacatctacatctgggcgcccttggccgggacttgtggggtccttctcctgtcactggttatcaccctttactgcaaacggggcagaaagaaactcctgtatatattcaaacaaccatttatgagaccagtacaaactactcaagaggaagatggctgtagctgccgatttccagaagaagaagaaggaggatgtgaactgagagtgaagttcagcaggagcgcagacgcccccgcgtaccagcagggccagaaccagctctataacgagctgaatctaggacgaagagaggagtacgatgttttggacaagagacgtggccgggaccctgagatggggggaaagccgagaaggaagaaccctcaggaaggcctgtacaatgaactgcagaaagataagatggcggaggcctacagtgagattgggatgaaaggcgagcgccggaggggcaaggggcacgatggcctttaccagggtctcagtacagccaccaaggacacctacgacgcccttcacatgcaggccctgccccctcgctctagaggatctggagcaacaaacttctcactactcaaacaagcaggtgacgtggaggagaatcccgggcctgggatccacatggccacttacgaggttctctgtgaggtggcgcggaaactgggcacggatgacagggaagtggtattgttcctcctaaacgtgttcatacctcaacccacactggcccaattaattggagctcttagagctttaaaggaggagggcaggttaacgtttcccctgttagcggaatgtctgtttcgtgcaggtcgcagagacctcttgcgcgacctgcttcacttagacccgcgttttttagagcgccacctagcgggcacaatgagttatttcagcccttatcagctcactgttctccacgtagacggggagctgtgtgcgagggatattaggtctttgatatttttaagcaaggacactatagggtctcgcagcacaccacagacattcttacactgggtgtactgtatggaaaacttagacctactgggtcccactgacgtggatgccctaatgtcaatgcttagatctttgtcaagagtagacctacagcgccaagtgcaaaccctaatgggccttcacctttccggcccatcacactcccaacactatcgccatacaccactcgagaccgatttctacgactacaaggacgacgatgacaagactagtggctccggcgagggcagaggaagtctactaacctgcggagatgtggaagaaaatcctggcccacatatgaccgagtacaagcccacggtgcgcctcgccacccgcgacgacgtccccagggccgtacgcaccctcgccgccgcgttcgccgactaccccgccacgcgccacaccgtcgatccggaccgccacatcgagcgggtcaccgagctgcaagaactcttcctcacgcgcgtcgggctcgacatcggcaaggtgtgggtcgcggacgacggcgccgcggtggcggtctggaccacgccggagagcgtcgaagcgggggcggtgttcgccgagatcggcccgcgcatggccgagttgagcggttcccggctggccgcgcagcaacagatggaaggcctcctggcgccgcaccggcccaaggagcccgcgtggttcctggccaccgtcggcgtctcgcccgaccaccagggcaagggtctgggcagcgccgtcgtgctccccggagtggaggcggccgagcgcgccggggtgcccgccttcctggagacctccgcgccccgcaacctccccttctacgagcggctcggcttcaccgtcaccgccgacgtcgaggtgcccgaaggaccgcgcacctggtgcatgacccgcaagcccggtgcctga

SEQ ID NO: 1326 - DNA, 2868 bp, Artificial Sequence
  Synthetic Polynucleotides
atggccttaccagtgaccgccttgctcctgccgctggccttgctgctccacgccgccaggccggacgtcgtgatgacccagacccctctgagcctgcctgtgtccctgggcgatcaggccagcatctcctgtagaagcagccagagcctggtgcacagcaacggcaacacctacctgcggtggtatctccagaagcccggccagagccccaaggtgctgatctacaaggtgtccaacagattcagcggcgtgcccgacagattctccggcagcggctctggcaccgacttcaccctgaagatcagccgggtggaagccgaggacctgggcgtgtacttctgtagccagagcacccacgtgccctggacctttggcggcggaacaaagctggaaatcaagggcggaggcggaagtggaggcggaggatctggcggcggaggctctgaagtgaagctggacgagacaggcggagggctggtgcagcctggcagacctatgaagctgagctgtgtggcctccggcttcaccttcagcgactactggatgaactgggtgcgccagtcccccgagaagggcctggaatgggtggcccagatcagaaacaagccctacaactacgaaacctactacagcgacagcgtgaagggccggttcaccatcagcagggacgacagcaagagcagcgtgtacctccagatgaacaacctgagggtggaagatatgggcatctactactgcaccggcagctactacggcatggactactggggccagggcaccagcgtgaccgtgtctacgcgtgagcagaaactgatctcggaagaggatctggcgaagcccaccacgacgccagcgccgcgaccaccaacaccggcgcccaccatcgcgtcgcagcccctgtccctgcgcccagaggcgtgccggccagcggcggggggcgcagtgcacacgagggggctggacttcgcctgtgacatctacatctgggcgcccttggccgggacttgtggggtccttctcctgtcactggttatcaccctttactgcaaacggggcagaaagaaactcctgtatatattcaaacaaccatttatgagaccagtacaaactactcaagaggaagatggctgtagctgccgatttccagaagaagaagaaggaggatgtgaactgagagtgaagttcagcaggagcgcagacgcccccgcgtaccagcagggccagaaccagctctataacgagctgaatctaggacgaagagaggagtacgatgttttggacaagagacgtggccgggaccctgagatggggggaaagccgagaaggaagaaccctcaggaaggcctgtacaatgaactgcagaaagataagatggcggaggcctacagtgagattgggatgaaaggcgagcgccggaggggcaaggggcacgatggcctttaccagggtctcagtacagccaccaaggacacctacgacgcccttcacatgcaggccctgccccctcgctctagaggatctggagcaacaaacttctcactactcaaacaagcaggtgacgtggaggagaatcccgggcctgggatccacatggccacttacgaggttctctgtgaggtggcgcggaaactgggcacggatgacagggaagtggtattgttcctcctaaacgtgttcatacctcaacccacactggcccaattaattggagctcttagagctttaaaggaggagggcaggttaacgtttcccctgttagcggaatgtctgtttcgtgcaggtcgcagagacctcttgcgcgacctgcttcacttagacccgcgttttttagagcgccacctagcgggcacaatgagttatttcagcccttatcagctcactgttctccacgtagacggggagctgtgtgcgagggatattaggtctttgatatttttaagcaaggacactatagggtctcgcagcacaccacagacattcttacactgggtgtactgtatggaaaacttagacctactgggtcccactgacgtggatgccctaatgtcaatgcttagatctttgtcaagagtagacctacagcgccaagtgcaaaccctaatgggccttcacctttccggcccatcacactcccaacactatcgccatacaccactcgagaccgatttctacgactacaaggacgacgatgacaagactagtggctccggcgagggcagaggaagtctactaacctgcggagatgtggaagaaaatcctggcccacatatgaccgagtacaagcccacggtgcgcctcgccacccgcgacgacgtccccagggccgtacgcaccctcgccgccgcgttcgccgactaccccgccacgcgccacaccgtcgatccggaccgccacatcgagcgggtcaccgagctgcaagaactcttcctcacgcgcgtcgggctcgacatcggcaaggtgtgggtcgcggacgacggcgccgcggtggcggtctggaccacgccggagagcgtcgaagcgggggcggtgttcgccgagatcggcccgcgcatggccgagttgagcggttcccggctggccgcgcagcaacagatggaaggcctcctggcgccgcaccggcccaaggagcccgcgtggttcctggccaccgtcggcgtctcgcccgaccaccagggcaagggtctgggcagcgccgtcgtgctccccggagtggaggcggccgagcgcgccggggtgcccgccttcctggagacctccgcgccccgcaacctccccttctacgagcggctcggcttcaccgtcaccgccgacgtcgaggtgcccgaaggaccgcgcacctggtgcatgacccgcaagcccggtgcctga

SEQ ID NO: 1327 - DNA, 2901 bp, Artificial Sequence
  Synthetic Polynucleotides
atggccttaccagtgaccgccttgctcctgccgctggccttgctgctccacgccgccaggccggacgtggtcatgacacagaccccactgagcctgcctgtgtctctgggagatcaggccagcatctcctgtagaagcagccagagcctggtgcacagcaacggcaacacctacctgcggtggtatctccagaagcctggacagagccccaaggtgctgatctacaaggtgtccaacagagtgtccggcgtgcccgatagattttctggcagcggctctggcaccgacttcaccctgaagatcaatagagtggaagccgaggacctgggcgtgtacttctgtagccagagcacccatgtgccttggacctttggcggaggcaccaagctggaaatcaagagcagcgccgacgacgccaagaaggacgccgccaaaaaggatgatgccaagaaagacgatgctaaaaaagacggcggcgtgaagctggacgagacaggcggaggacttgttcaacctggcggagccatgaagctgagctgtgtgaccagcggctttaccttcggccactactggatgaactgggtccgacagtcccctgagaaaggactggaatgggtcgcccagttcagaaacaagccctacaactacgaaacctactacagcgacagcgtgaagggcagattcaccatcagccgggacgacagcaagtccagcgtgtacctccagatgaacaacctgcgcgtggaagataccggcatctactactgtaccggggccagctacggcatggaatatctcggccagggcaccagcgtgaccgtgtctacaacgcgtgagcagaaactgatctcggaagaggatctggcgaagcccaccacgacgccagcgccgcgaccaccaacaccggcgcccaccatcgcgtcgcagcccctgtccctgcgcccagaggcgtgccggccagcggcggggggcgcagtgcacacgagggggctggacttcgcctgtgacatctacatctgggcgcccttggccgggacttgtggggtccttctcctgtcactggttatcaccctttactgcaaacggggcagaaagaaactcctgtatatattcaaacaaccatttatgagaccagtacaaactactcaagaggaagatggctgtagctgccgatttccagaagaagaagaaggaggatgtgaactgagagtgaagttcagcaggagcgcagacgcccccgcgtaccagcagggccagaaccagctctataacgagctgaatctaggacgaagagaggagtacgatgttttggacaagagacgtggccgggaccctgagatggggggaaagccgagaaggaagaaccctcaggaaggcctgtacaatgaactgcagaaagataagatggcggaggcctacagtgagattgggatgaaaggcgagcgccggaggggcaaggggcacgatggcctttaccagggtctcagtacagccaccaaggacacctacgacgcccttcacatgcaggccctgccccctcgctctagaggatctggagcaacaaacttctcactactcaaacaagcaggtgacgtggaggagaatcccgggcctgggatccacatggccacttacgaggttctctgtgaggtggcgcggaaactgggcacggatgacagggaagtggtattgttcctcctaaacgtgttcatacctcaacccacactggcccaattaattggagctcttagagctttaaaggaggagggcaggttaacgtttcccctgttagcggaatgtctgtttcgtgcaggtcgcagagacctcttgcgcgacctgcttcacttagacccgcgttttttagagcgccacctagcgggcacaatgagttatttcagcccttatcagctcactgttctccacgtagacggggagctgtgtgcgagggatattaggtctttgatatttttaagcaaggacactatagggtctcgcagcacaccacagacattcttacactgggtgtactgtatggaaaacttagacctactgggtcccactgacgtggatgccctaatgtcaatgcttagatctttgtcaagagtagacctacagcgccaagtgcaaaccctaatgggccttcacctttccggcccatcacactcccaacactatcgccatacaccactcgagaccgatttctacgactacaaggacgacgatgacaagactagtggctccggcgagggcagaggaagtctactaacctgcggagatgtggaagaaaatcctggcccacatatgaccgagtacaagcccacggtgcgcctcgccacccgcgacgacgtccccagggccgtacgcaccctcgccgccgcgttcgccgactaccccgccacgcgccacaccgtcgatccggaccgccacatcgagcgggtcaccgagctgcaagaactcttcctcacgcgcgtcgggctcgacatcggcaaggtgtgggtcgcggacgacggcgccgcggtggcggtctggaccacgccggagagcgtcgaagcgggggcggtgttcgccgagatcggcccgcgcatggccgagttgagcggttcccggctggccgcgcagcaacagatggaaggcctcctggcgccgcaccggcccaaggagcccgcgtggttcctggccaccgtcggcgtctcgcccgaccaccagggcaagggtctgggcagcgccgtcgtgctccccggagtggaggcggccgagcgcgccggggtgcccgccttcctggagacctccgcgccccgcaacctccccttctacgagcggctcggcttcaccgtcaccgccgacgtcgaggtgcccgaaggaccgcgcacctggtgcatgacccgcaagcccggtgcctga

SEQ ID NO: 1328 - DNA, 2889 bp, Artificial Sequence
  Synthetic Polynucleotides
atggccttaccagtgaccgccttgctcctgccgctggccttgctgctccacgccgccaggccgcaggtgcaactggtggaatctggcggcaatctggttcagcctggcggctctctgagactgtcttgtgccgccagcggcttcaccttcggcagcttttctatgagctgggtccgacaagctcctggcggaggacttgaatgggtggcaggactgtctgccagaagcagcctgacacactacgccgactctgtgaagggcagattcaccatcagccgggacaacgccaagaacagcgtgtacctccagatgaacagcctgagagtggaagataccgccgtgtactactgcgccagaagaagctacgacagcagcggctactggggccacttctacagctacatggatgtgtggggccagggcaccctggttacagtttctggcggaggcggaagtggaggcggaggatctggcggcggaggctcttctgtgctgacccagcctagctccgtgtctgctgctcctggacagaaagtgaccatctcctgtagcggcagcaccagcaacatcggcaacaactacgtgtcctggtatcagcagcaccccggcaaggcccctaagctgatgatctacgacgtgtccaagaggcccagcggcgtgccagatagattttccggcagcaagagcggcaacagcgccagcctggatattagcggactccagtctgaggacgaggccgactactattgcgccgcctgggatgatagcctgagcgagtttctgtttggcaccggcaccaagctgacagtgcttggaacgcgtgagcagaaactgatctcggaagaggatctggcgaagcccaccacgacgccagcgccgcgaccaccaacaccggcgcccaccatcgcgtcgcagcccctgtccctgcgcccagaggcgtgccggccagcggcggggggcgcagtgcacacgagggggctggacttcgcctgtgacatctacatctgggcgcccttggccgggacttgtggggtccttctcctgtcactggttatcaccctttactgcaaacggggcagaaagaaactcctgtatatattcaaacaaccatttatgagaccagtacaaactactcaagaggaagatggctgtagctgccgatttccagaagaagaagaaggaggatgtgaactgagagtgaagttcagcaggagcgcagacgcccccgcgtaccagcagggccagaaccagctctataacgagctgaatctaggacgaagagaggagtacgatgttttggacaagagacgtggccgggaccctgagatggggggaaagccgagaaggaagaaccctcaggaaggcctgtacaatgaactgcagaaagataagatggcggaggcctacagtgagattgggatgaaaggcgagcgccggaggggcaaggggcacgatggcctttaccagggtctcagtacagccaccaaggacacctacgacgcccttcacatgcaggccctgccccctcgctctagaggatctggagcaacaaacttctcactactcaaacaagcaggtgacgtggaggagaatcccgggcctgggatccacatggccacttacgaggttctctgtgaggtggcgcggaaactgggcacggatgacagggaagtggtattgttcctcctaaacgtgttcatacctcaacccacactggcccaattaattggagctcttagagctttaaaggaggagggcaggttaacgtttcccctgttagcggaatgtctgtttcgtgcaggtcgcagagacctcttgcgcgacctgcttcacttagacccgcgttttttagagcgccacctagcgggcacaatgagttatttcagcccttatcagctcactgttctccacgtagacggggagctgtgtgcgagggatattaggtctttgatatttttaagcaaggacactatagggtctcgcagcacaccacagacattcttacactgggtgtactgtatggaaaacttagacctactgggtcccactgacgtggatgccctaatgtcaatgcttagatctttgtcaagagtagacctacagcgccaagtgcaaaccctaatgggccttcacctttccggcccatcacactcccaacactatcgccatacaccactcgagaccgatttctacgactacaaggacgacgatgacaagactagtggctccggcgagggcagaggaagtctactaacctgcggagatgtggaagaaaatcctggcccacatatgaccgagtacaagcccacggtgcgcctcgccacccgcgacgacgtccccagggccgtacgcaccctcgccgccgcgttcgccgactaccccgccacgcgccacaccgtcgatccggaccgccacatcgagcgggtcaccgagctgcaagaactcttcctcacgcgcgtcgggctcgacatcggcaaggtgtgggtcgcggacgacggcgccgcggtggcggtctggaccacgccggagagcgtcgaagcgggggcggtgttcgccgagatcggcccgcgcatggccgagttgagcggttcccggctggccgcgcagcaacagatggaaggcctcctggcgccgcaccggcccaaggagcccgcgtggttcctggccaccgtcggcgtctcgcccgaccaccagggcaagggtctgggcagcgccgtcgtgctccccggagtggaggcggccgagcgcgccggggtgcccgccttcctggagacctccgcgccccgcaacctccccttctacgagcggctcggcttcaccgtcaccgccgacgtcgaggtgcccgaaggaccgcgcacctggtgcatgacccgcaagcccggtgcctga

SEQ ID NO: 1329 - DNA, 2874 bp, Artificial Sequence
  Synthetic Polynucleotides
atggccttaccagtgaccgccttgctcctgccgctggccttgctgctccacgccgccaggccggacatccagatgacacagagccctagcagcctgtctgccagcgtgggagacagagtgaccatcacctgtagaaccagccagagcctgagcagctacacccactggtatcagcagaagcctggcaaggcccctaagctgctgatctatgccgcttccagcagaggcagcggagtgcctagcagattttctggcagcggctccggcaccgatttcaccctgacaatatccagcctccagcctgaggacttcgccacctactactgccagcagagcagaacattcggccagggcaccaaggtggaaatcaaaggcggaggcggaagtggaggcggaggatctggcggcggaggctctcaagttcagctccagcagtctggccctggcctggttaagcctagccagacactgagcctgacctgtgccatcagcggcgatagcgtgtccagctacaacgccgtgtggaactggatcagacagagcccatccagaggactggaatggctgggcagaacctactacagaagcggctggtacaacgactacgccgagagcgtgaagtcccggatcaccatcaatcccgacaccagcaagaaccagttcagcctgcaactgaacagcgtgacccctgaggataccgccgtgtactactgtgctagaagcggccacatcaccgtgttcggcgtgaacgtggacgccttcgatatgtggggccagggaacaatggtcaccgtgtctagtacgcgtgagcagaaactgatctcggaagaggatctggcgaagcccaccacgacgccagcgccgcgaccaccaacaccggcgcccaccatcgcgtcgcagcccctgtccctgcgcccagaggcgtgccggccagcggcggggggcgcagtgcacacgagggggctggacttcgcctgtgacatctacatctgggcgcccttggccgggacttgtggggtccttctcctgtcactggttatcaccctttactgcaaacggggcagaaagaaactcctgtatatattcaaacaaccatttatgagaccagtacaaactactcaagaggaagatggctgtagctgccgatttccagaagaagaagaaggaggatgtgaactgagagtgaagttcagcaggagcgcagacgcccccgcgtaccagcagggccagaaccagctctataacgagctgaatctaggacgaagagaggagtacgatgttttggacaagagacgtggccgggaccctgagatggggggaaagccgagaaggaagaaccctcaggaaggcctgtacaatgaactgcagaaagataagatggcggaggcctacagtgagattgggatgaaaggcgagcgccggaggggcaaggggcacgatggcctttaccagggtctcagtacagccaccaaggacacctacgacgcccttcacatgcaggccctgccccctcgctctagaggatctggagcaacaaacttctcactactcaaacaagcaggtgacgtggaggagaatcccgggcctgggatccacatggccacttacgaggttctctgtgaggtggcgcggaaactgggcacggatgacagggaagtggtattgttcctcctaaacgtgttcatacctcaacccacactggcccaattaattggagctcttagagctttaaaggaggagggcaggttaacgtttcccctgttagcggaatgtctgtttcgtgcaggtcgcagagacctcttgcgcgacctgcttcacttagacccgcgttttttagagcgccacctagcgggcacaatgagttatttcagcccttatcagctcactgttctccacgtagacggggagctgtgtgcgagggatattaggtctttgatatttttaagcaaggacactatagggtctcgcagcacaccacagacattcttacactgggtgtactgtatggaaaacttagacctactgggtcccactgacgtggatgccctaatgtcaatgcttagatctttgtcaagagtagacctacagcgccaagtgcaaaccctaatgggccttcacctttccggcccatcacactcccaacactatcgccatacaccactcgagaccgatttctacgactacaaggacgacgatgacaagactagtggctccggcgagggcagaggaagtctactaacctgcggagatgtggaagaaaatcctggcccacatatgaccgagtacaagcccacggtgcgcctcgccacccgcgacgacgtccccagggccgtacgcaccctcgccgccgcgttcgccgactaccccgccacgcgccacaccgtcgatccggaccgccacatcgagcgggtcaccgagctgcaagaactcttcctcacgcgcgtcgggctcgacatcggcaaggtgtgggtcgcggacgacggcgccgcggtggcggtctggaccacgccggagagcgtcgaagcgggggcggtgttcgccgagatcggcccgcgcatggccgagttgagcggttcccggctggccgcgcagcaacagatggaaggcctcctggcgccgcaccggcccaaggagcccgcgtggttcctggccaccgtcggcgtctcgcccgaccaccagggcaagggtctgggcagcgccgtcgtgctccccggagtggaggcggccgagcgcgccggggtgcccgccttcctggagacctccgcgccccgcaacctccccttctacgagcggctcggcttcaccgtcaccgccgacgtcgaggtgcccgaaggaccgcgcacctggtgcatgacccgcaagcccggtgcctga

SEQ ID NO: 1330 - DNA, 2871 bp, Artificial Sequence
  Synthetic Polynucleotides
atggccttaccagtgaccgccttgctcctgccgctggccttgctgctccacgccgccaggccggacatcgtgctgacccagagccctctgagcctggccgtgtctctgggacagcctgccatcatcagctgcaaggccagccagagcgtgtcctttgccggcacctctctgatgcactggtatcaccagaagcccggccagcagcccagactgctgatctacagagccagcaacctggaagccggcgtgcccgatagattttccggcagcggcagcaagaccgacttcaccctgaccatcagccccgtggaagccgaagatgccgccacctactactgccagcagagcagagagtacccctacaccttcggcggaggcaccaagctggaaatcaagaggggcggaggcggaagtggaggcggaggatctggcggcggaggctctcaggtccaactggtgcagagcggagccgaggtcgtgaagcctggcgcttccgtgaagattagctgcaaagccagcggctacacctttaccggctactttatgaactgggtcaagcagagccctggccagagcctggaatggatcggcagaatccacccctacgacggcgacaccttctacaaccagaagttccagggcaaggccaccctgacagtggacaagagcagcaacaccgcccacatggaactgctgagcctgaccagcgaggacttcgccgtgtactactgcaccagatacgacggcagccgggctatggactattggggccagggcaccaccgtgaccgtgtctagtacgcgtgagcagaaactgatctcggaagaggatctggcgaagcccaccacgacgccagcgccgcgaccaccaacaccggcgcccaccatcgcgtcgcagcccctgtccctgcgcccagaggcgtgccggccagcggcggggggcgcagtgcacacgagggggctggacttcgcctgtgacatctacatctgggcgcccttggccgggacttgtggggtccttctcctgtcactggttatcaccctttactgcaaacggggcagaaagaaactcctgtatatattcaaacaaccatttatgagaccagtacaaactactcaagaggaagatggctgtagctgccgatttccagaagaagaagaaggaggatgtgaactgagagtgaagttcagcaggagcgcagacgcccccgcgtaccagcagggccagaaccagctctataacgagctgaatctaggacgaagagaggagtacgatgttttggacaagagacgtggccgggaccctgagatggggggaaagccgagaaggaagaaccctcaggaaggcctgtacaatgaactgcagaaagataagatggcggaggcctacagtgagattgggatgaaaggcgagcgccggaggggcaaggggcacgatggcctttaccagggtctcagtacagccaccaaggacacctacgacgcccttcacatgcaggccctgccccctcgctctagaggatctggagcaacaaacttctcactactcaaacaagcaggtgacgtggaggagaatcccgggcctgggatccacatggccacttacgaggttctctgtgaggtggcgcggaaactgggcacggatgacagggaagtggtattgttcctcctaaacgtgttcatacctcaacccacactggcccaattaattggagctcttagagctttaaaggaggagggcaggttaacgtttcccctgttagcggaatgtctgtttcgtgcaggtcgcagagacctcttgcgcgacctgcttcacttagacccgcgttttttagagcgccacctagcgggcacaatgagttatttcagcccttatcagctcactgttctccacgtagacggggagctgtgtgcgagggatattaggtctttgatatttttaagcaaggacactatagggtctcgcagcacaccacagacattcttacactgggtgtactgtatggaaaacttagacctactgggtcccactgacgtggatgccctaatgtcaatgcttagatctttgtcaagagtagacctacagcgccaagtgcaaaccctaatgggccttcacctttccggcccatcacactcccaacactatcgccatacaccactcgagaccgatttctacgactacaaggacgacgatgacaagactagtggctccggcgagggcagaggaagtctactaacctgcggagatgtggaagaaaatcctggcccacatatgaccgagtacaagcccacggtgcgcctcgccacccgcgacgacgtccccagggccgtacgcaccctcgccgccgcgttcgccgactaccccgccacgcgccacaccgtcgatccggaccgccacatcgagcgggtcaccgagctgcaagaactcttcctcacgcgcgtcgggctcgacatcggcaaggtgtgggtcgcggacgacggcgccgcggtggcggtctggaccacgccggagagcgtcgaagcgggggcggtgttcgccgagatcggcccgcgcatggccgagttgagcggttcccggctggccgcgcagcaacagatggaaggcctcctggcgccgcaccggcccaaggagcccgcgtggttcctggccaccgtcggcgtctcgcccgaccaccagggcaagggtctgggcagcgccgtcgtgctccccggagtggaggcggccgagcgcgccggggtgcccgccttcctggagacctccgcgccccgcaacctccccttctacgagcggctcggcttcaccgtcaccgccgacgtcgaggtgcccgaaggaccgcgcacctggtgcatgacccgcaagcccggtgcctga

SEQ ID NO: 1331 - DNA, 2790 bp, Artificial Sequence
  Synthetic Polynucleotides
atggccttaccagtgaccgccttgctcctgccgctggccttgctgctccacgccgccaggccgaacagctgcgagctgaccaacatcacaatcgccatcgagaaagaggaatgccggttctgcatcagcatcaacaccacttggtgcgccggctactgctacacccgcgatctggtgtataaggaccccgccagacctaagatccagaaaacctgcaccttcaaagagctggtctacgagacagtcagagtgcctggatgtgcccaccacgccgatagcctgtacacataccctgtggctacccagtgccactgcggcaagtgtgatagcgacagcaccgattgcaccgtcagaggactgggacccagctactgtagcttcggcgagatgaaggaaggcggaggcggaagtggaggcggaggatctggcggcggaggctctgctcctgatgtgcaggattgccctgagtgcaccctgcaagagaaccccttcttctcccaacctggcgctcctatcctccagtgcatgggctgctgcttcagccgggcttatcccacacctctgcggagcaagaaaaccatgctggtccagaaaaacgtgaccagcgagagcacctgttgtgtggctaagagctacaacagagtgaccgtgatgggcggcttcaaggtggaaaatcacaccgcctgccactgctccacctgttactaccacaagagcacgcgtgagcagaaactgatctcggaagaggatctggcgaagcccaccacgacgccagcgccgcgaccaccaacaccggcgcccaccatcgcgtcgcagcccctgtccctgcgcccagaggcgtgccggccagcggcggggggcgcagtgcacacgagggggctggacttcgcctgtgacatctacatctgggcgcccttggccgggacttgtggggtccttctcctgtcactggttatcaccctttactgcaaacggggcagaaagaaactcctgtatatattcaaacaaccatttatgagaccagtacaaactactcaagaggaagatggctgtagctgccgatttccagaagaagaagaaggaggatgtgaactgagagtgaagttcagcaggagcgcagacgcccccgcgtaccagcagggccagaaccagctctataacgagctgaatctaggacgaagagaggagtacgatgttttggacaagagacgtggccgggaccctgagatggggggaaagccgagaaggaagaaccctcaggaaggcctgtacaatgaactgcagaaagataagatggcggaggcctacagtgagattgggatgaaaggcgagcgccggaggggcaaggggcacgatggcctttaccagggtctcagtacagccaccaaggacacctacgacgcccttcacatgcaggccctgccccctcgctctagaggatctggagcaacaaacttctcactactcaaacaagcaggtgacgtggaggagaatcccgggcctgggatccacatggccacttacgaggttctctgtgaggtggcgcggaaactgggcacggatgacagggaagtggtattgttcctcctaaacgtgttcatacctcaacccacactggcccaattaattggagctcttagagctttaaaggaggagggcaggttaacgtttcccctgttagcggaatgtctgtttcgtgcaggtcgcagagacctcttgcgcgacctgcttcacttagacccgcgttttttagagcgccacctagcgggcacaatgagttatttcagcccttatcagctcactgttctccacgtagacggggagctgtgtgcgagggatattaggtctttgatatttttaagcaaggacactatagggtctcgcagcacaccacagacattcttacactgggtgtactgtatggaaaacttagacctactgggtcccactgacgtggatgccctaatgtcaatgcttagatctttgtcaagagtagacctacagcgccaagtgcaaaccctaatgggccttcacctttccggcccatcacactcccaacactatcgccatacaccactcgagaccgatttctacgactacaaggacgacgatgacaagactagtggctccggcgagggcagaggaagtctactaacctgcggagatgtggaagaaaatcctggcccacatatgaccgagtacaagcccacggtgcgcctcgccacccgcgacgacgtccccagggccgtacgcaccctcgccgccgcgttcgccgactaccccgccacgcgccacaccgtcgatccggaccgccacatcgagcgggtcaccgagctgcaagaactcttcctcacgcgcgtcgggctcgacatcggcaaggtgtgggtcgcggacgacggcgccgcggtggcggtctggaccacgccggagagcgtcgaagcgggggcggtgttcgccgagatcggcccgcgcatggccgagttgagcggttcccggctggccgcgcagcaacagatggaaggcctcctggcgccgcaccggcccaaggagcccgcgtggttcctggccaccgtcggcgtctcgcccgaccaccagggcaagggtctgggcagcgccgtcgtgctccccggagtggaggcggccgagcgcgccggggtgcccgccttcctggagacctccgcgccccgcaacctccccttctacgagcggctcggcttcaccgtcaccgccgacgtcgaggtgcccgaaggaccgcgcacctggtgcatgacccgcaagcccggtgcctga

SEQ ID NO: 1332 - DNA, 2883 bp, Artificial Sequence
  Synthetic Polynucleotides
atggccttaccagtgaccgccttgctcctgccgctggccttgctgctccacgccgccaggccggacctggaaaccaccctgacacagagccctgccaccctgagtgtgtccccaggcgagagagtgaccctgagctgtagagccagccagagcgtgggcagcaacctggcctggtatcagcagaagttcggccaggcccccagactgctgatctacgacgccagcacaagagccaccggcatccccgccagattttctggcagcggctccggcaccgagttcaccctgaccatcagcagactggaacccgaggacttcgccgtgtactactgccaccagtacggcagcagccccagaacctttggacagggcaccaaggtggacatcaagcggggcggaggcggaagtggaggcggaggatctggcggcggaggctctcaggtgcaactggtgcagagcggagccgaagtgaagaaacctggggccagcgtgaaggtgtcctgcaaggccagcggctacacctttaccacctacggcatctcttgggtgcgccaggctcctggacagggactggaatggatgggctggatcagcgcctacaacggccacaccaactacgcccagatgctccagggcagagtgaccatgaccaccgacaccagcacctccaccgcctacatggaactgcggggcctgagaagcgacgacaccgccgtgtattattgcgccagagaagcctacgcctcctacggcagcggcagctactggaccgattattggggccagggcaccctcgtgaccgtgtctagtacgcgtgagcagaaactgatctcggaagaggatctggcgaagcccaccacgacgccagcgccgcgaccaccaacaccggcgcccaccatcgcgtcgcagcccctgtccctgcgcccagaggcgtgccggccagcggcggggggcgcagtgcacacgagggggctggacttcgcctgtgacatctacatctgggcgcccttggccgggacttgtggggtccttctcctgtcactggttatcaccctttactgcaaacggggcagaaagaaactcctgtatatattcaaacaaccatttatgagaccagtacaaactactcaagaggaagatggctgtagctgccgatttccagaagaagaagaaggaggatgtgaactgagagtgaagttcagcaggagcgcagacgcccccgcgtaccagcagggccagaaccagctctataacgagctgaatctaggacgaagagaggagtacgatgttttggacaagagacgtggccgggaccctgagatggggggaaagccgagaaggaagaaccctcaggaaggcctgtacaatgaactgcagaaagataagatggcggaggcctacagtgagattgggatgaaaggcgagcgccggaggggcaaggggcacgatggcctttaccagggtctcagtacagccaccaaggacacctacgacgcccttcacatgcaggccctgccccctcgctctagaggatctggagcaacaaacttctcactactcaaacaagcaggtgacgtggaggagaatcccgggcctgggatccacatggccacttacgaggttctctgtgaggtggcgcggaaactgggcacggatgacagggaagtggtattgttcctcctaaacgtgttcatacctcaacccacactggcccaattaattggagctcttagagctttaaaggaggagggcaggttaacgtttcccctgttagcggaatgtctgtttcgtgcaggtcgcagagacctcttgcgcgacctgcttcacttagacccgcgttttttagagcgccacctagcgggcacaatgagttatttcagcccttatcagctcactgttctccacgtagacggggagctgtgtgcgagggatattaggtctttgatatttttaagcaaggacactatagggtctcgcagcacaccacagacattcttacactgggtgtactgtatggaaaacttagacctactgggtcccactgacgtggatgccctaatgtcaatgcttagatctttgtcaagagtagacctacagcgccaagtgcaaaccctaatgggccttcacctttccggcccatcacactcccaacactatcgccatacaccactcgagaccgatttctacgactacaaggacgacgatgacaagactagtggctccggcgagggcagaggaagtctactaacctgcggagatgtggaagaaaatcctggcccacatatgaccgagtacaagcccacggtgcgcctcgccacccgcgacgacgtccccagggccgtacgcaccctcgccgccgcgttcgccgactaccccgccacgcgccacaccgtcgatccggaccgccacatcgagcgggtcaccgagctgcaagaactcttcctcacgcgcgtcgggctcgacatcggcaaggtgtgggtcgcggacgacggcgccgcggtggcggtctggaccacgccggagagcgtcgaagcgggggcggtgttcgccgagatcggcccgcgcatggccgagttgagcggttcccggctggccgcgcagcaacagatggaaggcctcctggcgccgcaccggcccaaggagcccgcgtggttcctggccaccgtcggcgtctcgcccgaccaccagggcaagggtctgggcagcgccgtcgtgctccccggagtggaggcggccgagcgcgccggggtgcccgccttcctggagacctccgcgccccgcaacctccccttctacgagcggctcggcttcaccgtcaccgccgacgtcgaggtgcccgaaggaccgcgcacctggtgcatgacccgcaagcccggtgcctga

SEQ ID NO: 1333 - DNA, 2862 bp, Artificial Sequence
  Synthetic Polynucleotides
atggccttaccagtgaccgccttgctcctgccgctggccttgctgctccacgccgccaggccggacgacgttgtgatgacccagacccccctgagcctgcctgtgacacctggcgaacctgccagcatcagctgtcggagcagccagagcctggtgcacagaaacggcaacacctacctgcactggtatctccagaagcccggccagagccccaagctgctgatccacaaggtgtccaacagattcagcggcgtgcccgacagattctccggcagcggctctggcaccgacttcaccctgaagatcagccgggtggaagccgaggacctgggcgtgtacttctgtagccagagcacccatgtgccccccctgacatttggagccggcaccaagctggaactgaagggcggaggcggaagtggaggcggaggatctggcggcggaggctctgaagtgcagctggtgcagtctggcgctgaggtggaaaagcctggggccagcgtgaagattagctgcaaggccagcggcagcagcttcaccggctacaacatgaactgggtgcgccagaacatcggcaagagcctggaatggatcggagccatcgacccctactacggcggcaccagctacaaccagaagttcaagggcagagccaccctgaccgtggacaagagcaccagcaccgcctacatgcacctgaagtccctgcggagcgaggacaccgccgtgtactactgtgtgtccggcatggaatattggggccagggcaccagcgtgaccgtgtctagtacgcgtgagcagaaactgatctcggaagaggatctggcgaagcccaccacgacgccagcgccgcgaccaccaacaccggcgcccaccatcgcgtcgcagcccctgtccctgcgcccagaggcgtgccggccagcggcggggggcgcagtgcacacgagggggctggacttcgcctgtgacatctacatctgggcgcccttggccgggacttgtggggtccttctcctgtcactggttatcaccctttactgcaaacggggcagaaagaaactcctgtatatattcaaacaaccatttatgagaccagtacaaactactcaagaggaagatggctgtagctgccgatttccagaagaagaagaaggaggatgtgaactgagagtgaagttcagcaggagcgcagacgcccccgcgtaccagcagggccagaaccagctctataacgagctgaatctaggacgaagagaggagtacgatgttttggacaagagacgtggccgggaccctgagatggggggaaagccgagaaggaagaaccctcaggaaggcctgtacaatgaactgcagaaagataagatggcggaggcctacagtgagattgggatgaaaggcgagcgccggaggggcaaggggcacgatggcctttaccagggtctcagtacagccaccaaggacacctacgacgcccttcacatgcaggccctgccccctcgctctagaggatctggagcaacaaacttctcactactcaaacaagcaggtgacgtggaggagaatcccgggcctgggatccacatggccacttacgaggttctctgtgaggtggcgcggaaactgggcacggatgacagggaagtggtattgttcctcctaaacgtgttcatacctcaacccacactggcccaattaattggagctcttagagctttaaaggaggagggcaggttaacgtttcccctgttagcggaatgtctgtttcgtgcaggtcgcagagacctcttgcgcgacctgcttcacttagacccgcgttttttagagcgccacctagcgggcacaatgagttatttcagcccttatcagctcactgttctccacgtagacggggagctgtgtgcgagggatattaggtctttgatatttttaagcaaggacactatagggtctcgcagcacaccacagacattcttacactgggtgtactgtatggaaaacttagacctactgggtcccactgacgtggatgccctaatgtcaatgcttagatctttgtcaagagtagacctacagcgccaagtgcaaaccctaatgggccttcacctttccggcccatcacactcccaacactatcgccatacaccactcgagaccgatttctacgactacaaggacgacgatgacaagactagtggctccggcgagggcagaggaagtctactaacctgcggagatgtggaagaaaatcctggcccacatatgaccgagtacaagcccacggtgcgcctcgccacccgcgacgacgtccccagggccgtacgcaccctcgccgccgcgttcgccgactaccccgccacgcgccacaccgtcgatccggaccgccacatcgagcgggtcaccgagctgcaagaactcttcctcacgcgcgtcgggctcgacatcggcaaggtgtgggtcgcggacgacggcgccgcggtggcggtctggaccacgccggagagcgtcgaagcgggggcggtgttcgccgagatcggcccgcgcatggccgagttgagcggttcccggctggccgcgcagcaacagatggaaggcctcctggcgccgcaccggcccaaggagcccgcgtggttcctggccaccgtcggcgtctcgcccgaccaccagggcaagggtctgggcagcgccgtcgtgctccccggagtggaggcggccgagcgcgccggggtgcccgccttcctggagacctccgcgccccgcaacctccccttctacgagcggctcggcttcaccgtcaccgccgacgtcgaggtgcccgaaggaccgcgcacctggtgcatgacccgcaagcccggtgcctga

SEQ ID NO: 1334 - DNA, 2856 bp, Artificial Sequence
  Synthetic Polynucleotides
atggccttaccagtgaccgccttgctcctgccgctggccttgctgctccacgccgccaggccggacgagatcgtgatgacccagacccctgccaccctgtctgtgtctgccggcgagagagtgaccattacctgcaaggccagccagagcgtgtccaacgacgtgacctggtatcagcagaagcccggccaggcccccagactgctgatctacagcgccagcaacagatacagcggcgtgcccgccagattttccggcagcggctacggcaccgagttcaccttcaccatcagcagcgtgcagagcgaggacttcgccgtgtacttctgtcagcaagactacagcagcttcggccagggcaccaagctggaaatcaagaggggcggaggcggaagtggaggcggaggatctggcggcggaggctctcaggtgcagctggtggaatctggacctggcgtggtgcagcctggcagaagcctgagaatcagctgtgccgtgtccggcttcagcgtgaccaactacggcgtgcactgggtgcgccagccacctggaaaaggactggaatggctgggcgtgatctgggctggcggcatcaccaactacaacagcgccttcatgtcccggctgaccatctccaaggacaacagcaagaacaccgtgtacctccagatgaacagcctgcgggccgaggacaccgccatgtactactgtgcttccagaggcggccactacggctacgccctggattattggggccagggaaccctcgtgaccgtgtcctctacgcgtgagcagaaactgatctcggaagaggatctggcgaagcccaccacgacgccagcgccgcgaccaccaacaccggcgcccaccatcgcgtcgcagcccctgtccctgcgcccagaggcgtgccggccagcggcggggggcgcagtgcacacgagggggctggacttcgcctgtgacatctacatctgggcgcccttggccgggacttgtggggtccttctcctgtcactggttatcaccctttactgcaaacggggcagaaagaaactcctgtatatattcaaacaaccatttatgagaccagtacaaactactcaagaggaagatggctgtagctgccgatttccagaagaagaagaaggaggatgtgaactgagagtgaagttcagcaggagcgcagacgcccccgcgtaccagcagggccagaaccagctctataacgagctgaatctaggacgaagagaggagtacgatgttttggacaagagacgtggccgggaccctgagatggggggaaagccgagaaggaagaaccctcaggaaggcctgtacaatgaactgcagaaagataagatggcggaggcctacagtgagattgggatgaaaggcgagcgccggaggggcaaggggcacgatggcctttaccagggtctcagtacagccaccaaggacacctacgacgcccttcacatgcaggccctgccccctcgctctagaggatctggagcaacaaacttctcactactcaaacaagcaggtgacgtggaggagaatcccgggcctgggatccacatggccacttacgaggttctctgtgaggtggcgcggaaactgggcacggatgacagggaagtggtattgttcctcctaaacgtgttcatacctcaacccacactggcccaattaattggagctcttagagctttaaaggaggagggcaggttaacgtttcccctgttagcggaatgtctgtttcgtgcaggtcgcagagacctcttgcgcgacctgcttcacttagacccgcgttttttagagcgccacctagcgggcacaatgagttatttcagcccttatcagctcactgttctccacgtagacggggagctgtgtgcgagggatattaggtctttgatatttttaagcaaggacactatagggtctcgcagcacaccacagacattcttacactgggtgtactgtatggaaaacttagacctactgggtcccactgacgtggatgccctaatgtcaatgcttagatctttgtcaagagtagacctacagcgccaagtgcaaaccctaatgggccttcacctttccggcccatcacactcccaacactatcgccatacaccactcgagaccgatttctacgactacaaggacgacgatgacaagactagtggctccggcgagggcagaggaagtctactaacctgcggagatgtggaagaaaatcctggcccacatatgaccgagtacaagcccacggtgcgcctcgccacccgcgacgacgtccccagggccgtacgcaccctcgccgccgcgttcgccgactaccccgccacgcgccacaccgtcgatccggaccgccacatcgagcgggtcaccgagctgcaagaactcttcctcacgcgcgtcgggctcgacatcggcaaggtgtgggtcgcggacgacggcgccgcggtggcggtctggaccacgccggagagcgtcgaagcgggggcggtgttcgccgagatcggcccgcgcatggccgagttgagcggttcccggctggccgcgcagcaacagatggaaggcctcctggcgccgcaccggcccaaggagcccgcgtggttcctggccaccgtcggcgtctcgcccgaccaccagggcaagggtctgggcagcgccgtcgtgctccccggagtggaggcggccgagcgcgccggggtgcccgccttcctggagacctccgcgccccgcaacctccccttctacgagcggctcggcttcaccgtcaccgccgacgtcgaggtgcccgaaggaccgcgcacctggtgcatgacccgcaagcccggtgcctga

SEQ ID NO: 1335 - DNA, 2862 bp, Artificial Sequence
  Synthetic Polynucleotides
atggccttaccagtgaccgccttgctcctgccgctggccttgctgctccacgccgccaggccggacatccagatgacccagaccgccagcagcctgcctgcctctctgggcgacagagtgaccatctcctgtagcgccagccaggacatcagcaactacctgaactggtatcagcagaaacccgacggcaccgtgaagctgctgatcttctacagcagcaacctgcacagcggcgtgcccagcagattttctggcggcggaagcggcaccgactacagcctgaccatcagcaatctggaacccgaggacattgccacctacttttgccaccagtacagcaagctgccctggacctttggcggaggcaccaagctggaaatcaagagaggcggaggcggaagtggaggcggaggatctggcggcggaggctctgaagtgaccctggtggaaagcggcggagacttcgtgaagcctggcggctctctgaaggtgtcctgtgccgccagcggcttcgcctttagccactacgccatgagctgggtgcgccagacccctgccaagagactggaatgggtggcctacatcagcagcggcggctccggcacctactactccgatagcgtgaagggccggttcaccatcagccgggacaacgccaagaacaccctgtacctccagatgcggagcctgcggagcgaggacagcgccatgtatttctgcaccagagtgaagctgggcacctattacttcgactcttggggccagggcaccaccctgaccgtgtcatctacgcgtgagcagaaactgatctcggaagaggatctggcgaagcccaccacgacgccagcgccgcgaccaccaacaccggcgcccaccatcgcgtcgcagcccctgtccctgcgcccagaggcgtgccggccagcggcggggggcgcagtgcacacgagggggctggacttcgcctgtgacatctacatctgggcgcccttggccgggacttgtggggtccttctcctgtcactggttatcaccctttactgcaaacggggcagaaagaaactcctgtatatattcaaacaaccatttatgagaccagtacaaactactcaagaggaagatggctgtagctgccgatttccagaagaagaagaaggaggatgtgaactgagagtgaagttcagcaggagcgcagacgcccccgcgtaccagcagggccagaaccagctctataacgagctgaatctaggacgaagagaggagtacgatgttttggacaagagacgtggccgggaccctgagatggggggaaagccgagaaggaagaaccctcaggaaggcctgtacaatgaactgcagaaagataagatggcggaggcctacagtgagattgggatgaaaggcgagcgccggaggggcaaggggcacgatggcctttaccagggtctcagtacagccaccaaggacacctacgacgcccttcacatgcaggccctgccccctcgctctagaggatctggagcaacaaacttctcactactcaaacaagcaggtgacgtggaggagaatcccgggcctgggatccacatggccacttacgaggttctctgtgaggtggcgcggaaactgggcacggatgacagggaagtggtattgttcctcctaaacgtgttcatacctcaacccacactggcccaattaattggagctcttagagctttaaaggaggagggcaggttaacgtttcccctgttagcggaatgtctgtttcgtgcaggtcgcagagacctcttgcgcgacctgcttcacttagacccgcgttttttagagcgccacctagcgggcacaatgagttatttcagcccttatcagctcactgttctccacgtagacggggagctgtgtgcgagggatattaggtctttgatatttttaagcaaggacactatagggtctcgcagcacaccacagacattcttacactgggtgtactgtatggaaaacttagacctactgggtcccactgacgtggatgccctaatgtcaatgcttagatctttgtcaagagtagacctacagcgccaagtgcaaaccctaatgggccttcacctttccggcccatcacactcccaacactatcgccatacaccactcgagaccgatttctacgactacaaggacgacgatgacaagactagtggctccggcgagggcagaggaagtctactaacctgcggagatgtggaagaaaatcctggcccacatatgaccgagtacaagcccacggtgcgcctcgccacccgcgacgacgtccccagggccgtacgcaccctcgccgccgcgttcgccgactaccccgccacgcgccacaccgtcgatccggaccgccacatcgagcgggtcaccgagctgcaagaactcttcctcacgcgcgtcgggctcgacatcggcaaggtgtgggtcgcggacgacggcgccgcggtggcggtctggaccacgccggagagcgtcgaagcgggggcggtgttcgccgagatcggcccgcgcatggccgagttgagcggttcccggctggccgcgcagcaacagatggaaggcctcctggcgccgcaccggcccaaggagcccgcgtggttcctggccaccgtcggcgtctcgcccgaccaccagggcaagggtctgggcagcgccgtcgtgctccccggagtggaggcggccgagcgcgccggggtgcccgccttcctggagacctccgcgccccgcaacctccccttctacgagcggctcggcttcaccgtcaccgccgacgtcgaggtgcccgaaggaccgcgcacctggtgcatgacccgcaagcccggtgcctga

SEQ ID NO: 1336 - DNA, 2868 bp, Artificial Sequence
  Synthetic Polynucleotides
atggccttaccagtgaccgccttgctcctgccgctggccttgctgctccacgccgccaggccgcagttcgtgctgacccagagcccttctgcctctgctgccctgggagcctctgccaagctgacctgtacactgagcagcgcccacaagacctacaccatcgactggtatcagcagcagaagggaaaggcccccagatacctgatccaagtgaagtccgacggcacctacacaaaggccaccggcgtgcccgatagattcagcggcagtagcagcggagccgatagatacctgattatccccagcgtgcaggccgacgacgaggccgattactactgcggcaccgattacaccggcggctacgtgttcggcggaggcacacaactgaccgtgacaggcggaggcggaagtggaggcggaggatctggcggcggaggctctgagcaactgaaagagtctggcggcggactgttcaagcccaccgataccctgaccctgacctgcaccgtgtccggcttcagcctgagctactacggcgtgaactgggtgcgccaggcccctggcaatggcctggaatggatcggcacaatcggcggcagcggcgacacctactatgcctcttgggccaagtccagaagcaccatcatcagaaacaccaacgagaacaccgtgaccctgaagatgaccagcctgacagccgccgacaccgccacctacttttgcgtcagatacgccaacatcggctacgagtatttcaacgtgtggggacccggcaccctcgtgaccgtgtcatctacgcgtgagcagaaactgatctcggaagaggatctggcgaagcccaccacgacgccagcgccgcgaccaccaacaccggcgcccaccatcgcgtcgcagcccctgtccctgcgcccagaggcgtgccggccagcggcggggggcgcagtgcacacgagggggctggacttcgcctgtgacatctacatctgggcgcccttggccgggacttgtggggtccttctcctgtcactggttatcaccctttactgcaaacggggcagaaagaaactcctgtatatattcaaacaaccatttatgagaccagtacaaactactcaagaggaagatggctgtagctgccgatttccagaagaagaagaaggaggatgtgaactgagagtgaagttcagcaggagcgcagacgcccccgcgtaccagcagggccagaaccagctctataacgagctgaatctaggacgaagagaggagtacgatgttttggacaagagacgtggccgggaccctgagatggggggaaagccgagaaggaagaaccctcaggaaggcctgtacaatgaactgcagaaagataagatggcggaggcctacagtgagattgggatgaaaggcgagcgccggaggggcaaggggcacgatggcctttaccagggtctcagtacagccaccaaggacacctacgacgcccttcacatgcaggccctgccccctcgctctagaggatctggagcaacaaacttctcactactcaaacaagcaggtgacgtggaggagaatcccgggcctgggatccacatggccacttacgaggttctctgtgaggtggcgcggaaactgggcacggatgacagggaagtggtattgttcctcctaaacgtgttcatacctcaacccacactggcccaattaattggagctcttagagctttaaaggaggagggcaggttaacgtttcccctgttagcggaatgtctgtttcgtgcaggtcgcagagacctcttgcgcgacctgcttcacttagacccgcgttttttagagcgccacctagcgggcacaatgagttatttcagcccttatcagctcactgttctccacgtagacggggagctgtgtgcgagggatattaggtctttgatatttttaagcaaggacactatagggtctcgcagcacaccacagacattcttacactgggtgtactgtatggaaaacttagacctactgggtcccactgacgtggatgccctaatgtcaatgcttagatctttgtcaagagtagacctacagcgccaagtgcaaaccctaatgggccttcacctttccggcccatcacactcccaacactatcgccatacaccactcgagaccgatttctacgactacaaggacgacgatgacaagactagtggctccggcgagggcagaggaagtctactaacctgcggagatgtggaagaaaatcctggcccacatatgaccgagtacaagcccacggtgcgcctcgccacccgcgacgacgtccccagggccgtacgcaccctcgccgccgcgttcgccgactaccccgccacgcgccacaccgtcgatccggaccgccacatcgagcgggtcaccgagctgcaagaactcttcctcacgcgcgtcgggctcgacatcggcaaggtgtgggtcgcggacgacggcgccgcggtggcggtctggaccacgccggagagcgtcgaagcgggggcggtgttcgccgagatcggcccgcgcatggccgagttgagcggttcccggctggccgcgcagcaacagatggaaggcctcctggcgccgcaccggcccaaggagcccgcgtggttcctggccaccgtcggcgtctcgcccgaccaccagggcaagggtctgggcagcgccgtcgtgctccccggagtggaggcggccgagcgcgccggggtgcccgccttcctggagacctccgcgccccgcaacctccccttctacgagcggctcggcttcaccgtcaccgccgacgtcgaggtgcccgaaggaccgcgcacctggtgcatgacccgcaagcccggtgcctga

SEQ ID NO: 1337 - DNA, 2883 bp, Artificial Sequence
  Synthetic Polynucleotides
atggccttaccagtgaccgccttgctcctgccgctggccttgctgctccacgccgccaggccgcagttcgtgctgacccagagcccttctgtgtctgccgccctgggagcctctgccaagctgacctgtacactgagcagcgcccacaagacctacaccatcgactggtatcagcagcagcagggcgaggcccccagatacctgatgcaagtgaagtccgacggcagctacaccaagggcaccggcgtgcccgatagattcagcggcagtagcagcggagccgatagatacctgattatccccagcgtgcaggccgacgacgaggccggatatgtgtgcggcgctgacgacaatggcggctacgtgttcggcggaggcacccaactgacagtgacaggcggaggcggaagtggaggcggaggatctggcggcggaggctctcagagcgtgaaagagtctgagggcggcctgttcaagcccaccgataccctgaccctgacctgcaccgtgtccggcttcagcctgagcagacacgccctgacatgggtgcgccaggcccctggaaatggcctggaatggatcggagccatcgacaacgccggcaccacctactatgcctcttgggccaagtccagaagcaccatcacccggaacaccgacctgcacaccgtgaccctgaagatgaccagcctgaccgccagcgacaccgccacctacttttgcgccagagtgttctacgacatcaacagcggctactacctggacggcatggacctgtggggacctggcacacttgtgaccgtgtccagcacgcgtgagcagaaactgatctcggaagaggatctggcgaagcccaccacgacgccagcgccgcgaccaccaacaccggcgcccaccatcgcgtcgcagcccctgtccctgcgcccagaggcgtgccggccagcggcggggggcgcagtgcacacgagggggctggacttcgcctgtgacatctacatctgggcgcccttggccgggacttgtggggtccttctcctgtcactggttatcaccctttactgcaaacggggcagaaagaaactcctgtatatattcaaacaaccatttatgagaccagtacaaactactcaagaggaagatggctgtagctgccgatttccagaagaagaagaaggaggatgtgaactgagagtgaagttcagcaggagcgcagacgcccccgcgtaccagcagggccagaaccagctctataacgagctgaatctaggacgaagagaggagtacgatgttttggacaagagacgtggccgggaccctgagatggggggaaagccgagaaggaagaaccctcaggaaggcctgtacaatgaactgcagaaagataagatggcggaggcctacagtgagattgggatgaaaggcgagcgccggaggggcaaggggcacgatggcctttaccagggtctcagtacagccaccaaggacacctacgacgcccttcacatgcaggccctgccccctcgctctagaggatctggagcaacaaacttctcactactcaaacaagcaggtgacgtggaggagaatcccgggcctgggatccacatggccacttacgaggttctctgtgaggtggcgcggaaactgggcacggatgacagggaagtggtattgttcctcctaaacgtgttcatacctcaacccacactggcccaattaattggagctcttagagctttaaaggaggagggcaggttaacgtttcccctgttagcggaatgtctgtttcgtgcaggtcgcagagacctcttgcgcgacctgcttcacttagacccgcgttttttagagcgccacctagcgggcacaatgagttatttcagcccttatcagctcactgttctccacgtagacggggagctgtgtgcgagggatattaggtctttgatatttttaagcaaggacactatagggtctcgcagcacaccacagacattcttacactgggtgtactgtatggaaaacttagacctactgggtcccactgacgtggatgccctaatgtcaatgcttagatctttgtcaagagtagacctacagcgccaagtgcaaaccctaatgggccttcacctttccggcccatcacactcccaacactatcgccatacaccactcgagaccgatttctacgactacaaggacgacgatgacaagactagtggctccggcgagggcagaggaagtctactaacctgcggagatgtggaagaaaatcctggcccacatatgaccgagtacaagcccacggtgcgcctcgccacccgcgacgacgtccccagggccgtacgcaccctcgccgccgcgttcgccgactaccccgccacgcgccacaccgtcgatccggaccgccacatcgagcgggtcaccgagctgcaagaactcttcctcacgcgcgtcgggctcgacatcggcaaggtgtgggtcgcggacgacggcgccgcggtggcggtctggaccacgccggagagcgtcgaagcgggggcggtgttcgccgagatcggcccgcgcatggccgagttgagcggttcccggctggccgcgcagcaacagatggaaggcctcctggcgccgcaccggcccaaggagcccgcgtggttcctggccaccgtcggcgtctcgcccgaccaccagggcaagggtctgggcagcgccgtcgtgctccccggagtggaggcggccgagcgcgccggggtgcccgccttcctggagacctccgcgccccgcaacctccccttctacgagcggctcggcttcaccgtcaccgccgacgtcgaggtgcccgaaggaccgcgcacctggtgcatgacccgcaagcccggtgcctga

SEQ ID NO: 1338 - DNA, 2865 bp, Artificial Sequence
  Synthetic Polynucleotides
atggccttaccagtgaccgccttgctcctgccgctggccttgctgctccacgccgccaggccggacatccagatgacccagagccccagcagcctgtctgccagcgtgggcgacagagtgaccatcacctgtagagccagccagggcatcagctcttggctggcctggtatcagcagaagcccgagaaggcccccaagagcctgatctacgccgcctctagtctccagagcggcgtgcccagcagattttctggcagcggctccggcaccgacttcaccctgacaatcagctccctccagcccgaggacttcgccacctactactgccagcagtacaacagctacccccccacctttggcggaggcaccaaggtggaaatcaagggcggaggcggaagtggaggcggaggatctggcggcggaggctctgaagtgcaactggtggaatcaggcggcggactggtgcagcctggcgagtctctgagactgagctgtgtggcctccggcttcaccttcagccggtacaagatgaactgggtgcgccaggcccctggcaagggactggaatgggtgtcctacatcagccgcagcggcagagacatctactacgccgacagcgtgaagggccggttcaccatcagcagagacaacgccaagaacagcctgtacctccagatgaactccctgcgggacgaggacaccgccgtgtactactgtgccggaaccgtgaccacctattactacttcggcatggacgtgtggggccacggcaccaccgtgacagtgtcatctacgcgtgagcagaaactgatctcggaagaggatctggcgaagcccaccacgacgccagcgccgcgaccaccaacaccggcgcccaccatcgcgtcgcagcccctgtccctgcgcccagaggcgtgccggccagcggcggggggcgcagtgcacacgagggggctggacttcgcctgtgacatctacatctgggcgcccttggccgggacttgtggggtccttctcctgtcactggttatcaccctttactgcaaacggggcagaaagaaactcctgtatatattcaaacaaccatttatgagaccagtacaaactactcaagaggaagatggctgtagctgccgatttccagaagaagaagaaggaggatgtgaactgagagtgaagttcagcaggagcgcagacgcccccgcgtaccagcagggccagaaccagctctataacgagctgaatctaggacgaagagaggagtacgatgttttggacaagagacgtggccgggaccctgagatggggggaaagccgagaaggaagaaccctcaggaaggcctgtacaatgaactgcagaaagataagatggcggaggcctacagtgagattgggatgaaaggcgagcgccggaggggcaaggggcacgatggcctttaccagggtctcagtacagccaccaaggacacctacgacgcccttcacatgcaggccctgccccctcgctctagaggatctggagcaacaaacttctcactactcaaacaagcaggtgacgtggaggagaatcccgggcctgggatccacatggccacttacgaggttctctgtgaggtggcgcggaaactgggcacggatgacagggaagtggtattgttcctcctaaacgtgttcatacctcaacccacactggcccaattaattggagctcttagagctttaaaggaggagggcaggttaacgtttcccctgttagcggaatgtctgtttcgtgcaggtcgcagagacctcttgcgcgacctgcttcacttagacccgcgttttttagagcgccacctagcgggcacaatgagttatttcagcccttatcagctcactgttctccacgtagacggggagctgtgtgcgagggatattaggtctttgatatttttaagcaaggacactatagggtctcgcagcacaccacagacattcttacactgggtgtactgtatggaaaacttagacctactgggtcccactgacgtggatgccctaatgtcaatgcttagatctttgtcaagagtagacctacagcgccaagtgcaaaccctaatgggccttcacctttccggcccatcacactcccaacactatcgccatacaccactcgagaccgatttctacgactacaaggacgacgatgacaagactagtggctccggcgagggcagaggaagtctactaacctgcggagatgtggaagaaaatcctggcccacatatgaccgagtacaagcccacggtgcgcctcgccacccgcgacgacgtccccagggccgtacgcaccctcgccgccgcgttcgccgactaccccgccacgcgccacaccgtcgatccggaccgccacatcgagcgggtcaccgagctgcaagaactcttcctcacgcgcgtcgggctcgacatcggcaaggtgtgggtcgcggacgacggcgccgcggtggcggtctggaccacgccggagagcgtcgaagcgggggcggtgttcgccgagatcggcccgcgcatggccgagttgagcggttcccggctggccgcgcagcaacagatggaaggcctcctggcgccgcaccggcccaaggagcccgcgtggttcctggccaccgtcggcgtctcgcccgaccaccagggcaagggtctgggcagcgccgtcgtgctccccggagtggaggcggccgagcgcgccggggtgcccgccttcctggagacctccgcgccccgcaacctccccttctacgagcggctcggcttcaccgtcaccgccgacgtcgaggtgcccgaaggaccgcgcacctggtgcatgacccgcaagcccggtgcctga

SEQ ID NO: 1339 - DNA, 2868 bp, Artificial Sequence
  Synthetic Polynucleotides
atggccttaccagtgaccgccttgctcctgccgctggccttgctgctccacgccgccaggccggacatccagatgacccagagccccagcagcctgtctgccagcgtgggcgacagagtgaccatcacctgtagagccagccagggcatcagctcttggctggcctggtatcagcagaagcccgagaaggcccccaagagcctgatctacgccgcctctagtctccagagcggcgtgcccagcagattttctggcagcggctccggcaccgacttcaccctgacaatcagctccctccagcccgaggacttcgccacctactactgccagcagtacaacagctaccctcccacctttggcggaggcaccaaggtggaaatcaagggcggaggcggaagtggaggcggaggatctggcggcggaggctctgaagtgcaactggtggaatccgggggaggctctgtgcagcctggcgagtctctgagactgagctgtgtggcctccggcttcaccttcagccggtacaagatgaactgggtgcgccaggcccctggcaagggactggaatgggtgtcctacatcagccgcagcggcagagacatctactacgccgacagcgtgaagggccggttcaccatcagcagagacaacgccaagaacagcctgtacctccagatgaactccctgcgggacgaggacaccgccgtgtactactgtgccggaaccgtgaccacctattactacgacttcggcatggacgtgtggggccagggcacaaccgtgacagtgtctagcacgcgtgagcagaaactgatctcggaagaggatctggcgaagcccaccacgacgccagcgccgcgaccaccaacaccggcgcccaccatcgcgtcgcagcccctgtccctgcgcccagaggcgtgccggccagcggcggggggcgcagtgcacacgagggggctggacttcgcctgtgacatctacatctgggcgcccttggccgggacttgtggggtccttctcctgtcactggttatcaccctttactgcaaacggggcagaaagaaactcctgtatatattcaaacaaccatttatgagaccagtacaaactactcaagaggaagatggctgtagctgccgatttccagaagaagaagaaggaggatgtgaactgagagtgaagttcagcaggagcgcagacgcccccgcgtaccagcagggccagaaccagctctataacgagctgaatctaggacgaagagaggagtacgatgttttggacaagagacgtggccgggaccctgagatggggggaaagccgagaaggaagaaccctcaggaaggcctgtacaatgaactgcagaaagataagatggcggaggcctacagtgagattgggatgaaaggcgagcgccggaggggcaaggggcacgatggcctttaccagggtctcagtacagccaccaaggacacctacgacgcccttcacatgcaggccctgccccctcgctctagaggatctggagcaacaaacttctcactactcaaacaagcaggtgacgtggaggagaatcccgggcctgggatccacatggccacttacgaggttctctgtgaggtggcgcggaaactgggcacggatgacagggaagtggtattgttcctcctaaacgtgttcatacctcaacccacactggcccaattaattggagctcttagagctttaaaggaggagggcaggttaacgtttcccctgttagcggaatgtctgtttcgtgcaggtcgcagagacctcttgcgcgacctgcttcacttagacccgcgttttttagagcgccacctagcgggcacaatgagttatttcagcccttatcagctcactgttctccacgtagacggggagctgtgtgcgagggatattaggtctttgatatttttaagcaaggacactatagggtctcgcagcacaccacagacattcttacactgggtgtactgtatggaaaacttagacctactgggtcccactgacgtggatgccctaatgtcaatgcttagatctttgtcaagagtagacctacagcgccaagtgcaaaccctaatgggccttcacctttccggcccatcacactcccaacactatcgccatacaccactcgagaccgatttctacgactacaaggacgacgatgacaagactagtggctccggcgagggcagaggaagtctactaacctgcggagatgtggaagaaaatcctggcccacatatgaccgagtacaagcccacggtgcgcctcgccacccgcgacgacgtccccagggccgtacgcaccctcgccgccgcgttcgccgactaccccgccacgcgccacaccgtcgatccggaccgccacatcgagcgggtcaccgagctgcaagaactcttcctcacgcgcgtcgggctcgacatcggcaaggtgtgggtcgcggacgacggcgccgcggtggcggtctggaccacgccggagagcgtcgaagcgggggcggtgttcgccgagatcggcccgcgcatggccgagttgagcggttcccggctggccgcgcagcaacagatggaaggcctcctggcgccgcaccggcccaaggagcccgcgtggttcctggccaccgtcggcgtctcgcccgaccaccagggcaagggtctgggcagcgccgtcgtgctccccggagtggaggcggccgagcgcgccggggtgcccgccttcctggagacctccgcgccccgcaacctccccttctacgagcggctcggcttcaccgtcaccgccgacgtcgaggtgcccgaaggaccgcgcacctggtgcatgacccgcaagcccggtgcctga

SEQ ID NO: 1340 - DNA, 2865 bp, Artificial Sequence
  Synthetic Polynucleotides
atggccttaccagtgaccgccttgctcctgccgctggccttgctgctccacgccgccaggccgcagtctgtgctgacacagcctccatctgcctctggcacacctggacagagagtgaccatcagctgtagcggcagcagaagcaacgtcggcggcaactacgtgttctggtatcagcaggtcccaggcgctacccctaagctgctgatctacagaagcaatcagcggcctagcggcgtgcccgatagatttgccggaagcaagagcggcagctctgccagccttgccatctctggactgagaagcgaggacgaggccgactactactgtgccacctgggatgatagcctgagcggcttcgtgtttggcaccggcaccaaagtgacagtgcttggtggcggaggcggaagtggaggcggaggatctggcggcggaggctctgaagttcagctggttgaatctggcggcggactggttaagcctggcggatctctgagactgtcttgtgccgccagcggcttcaccttcagcgattactacatgagctggatcagacaggcccctggcaaaggactggaatgggtgtcctacatcagcagcagcggctccaccatctactacgccgatagcgtgaagggcagattcaccatcagccgggacaacgccaagaacagcctgtacctccagatgaactccctgagagccgaggacaccgccgtgtactattgcgccagaggctacggcaaagcctacgatcaatggggccagggcacactggtcaccgtttcttctacgcgtgagcagaaactgatctcggaagaggatctggcgaagcccaccacgacgccagcgccgcgaccaccaacaccggcgcccaccatcgcgtcgcagcccctgtccctgcgcccagaggcgtgccggccagcggcggggggcgcagtgcacacgagggggctggacttcgcctgtgacatctacatctgggcgcccttggccgggacttgtggggtccttctcctgtcactggttatcaccctttactgcaaacggggcagaaagaaactcctgtatatattcaaacaaccatttatgagaccagtacaaactactcaagaggaagatggctgtagctgccgatttccagaagaagaagaaggaggatgtgaactgagagtgaagttcagcaggagcgcagacgcccccgcgtaccagcagggccagaaccagctctataacgagctgaatctaggacgaagagaggagtacgatgttttggacaagagacgtggccgggaccctgagatggggggaaagccgagaaggaagaaccctcaggaaggcctgtacaatgaactgcagaaagataagatggcggaggcctacagtgagattgggatgaaaggcgagcgccggaggggcaaggggcacgatggcctttaccagggtctcagtacagccaccaaggacacctacgacgcccttcacatgcaggccctgccccctcgctctagaggatctggagcaacaaacttctcactactcaaacaagcaggtgacgtggaggagaatcccgggcctgggatccacatggccacttacgaggttctctgtgaggtggcgcggaaactgggcacggatgacagggaagtggtattgttcctcctaaacgtgttcatacctcaacccacactggcccaattaattggagctcttagagctttaaaggaggagggcaggttaacgtttcccctgttagcggaatgtctgtttcgtgcaggtcgcagagacctcttgcgcgacctgcttcacttagacccgcgttttttagagcgccacctagcgggcacaatgagttatttcagcccttatcagctcactgttctccacgtagacggggagctgtgtgcgagggatattaggtctttgatatttttaagcaaggacactatagggtctcgcagcacaccacagacattcttacactgggtgtactgtatggaaaacttagacctactgggtcccactgacgtggatgccctaatgtcaatgcttagatctttgtcaagagtagacctacagcgccaagtgcaaaccctaatgggccttcacctttccggcccatcacactcccaacactatcgccatacaccactcgagaccgatttctacgactacaaggacgacgatgacaagactagtggctccggcgagggcagaggaagtctactaacctgcggagatgtggaagaaaatcctggcccacatatgaccgagtacaagcccacggtgcgcctcgccacccgcgacgacgtccccagggccgtacgcaccctcgccgccgcgttcgccgactaccccgccacgcgccacaccgtcgatccggaccgccacatcgagcgggtcaccgagctgcaagaactcttcctcacgcgcgtcgggctcgacatcggcaaggtgtgggtcgcggacgacggcgccgcggtggcggtctggaccacgccggagagcgtcgaagcgggggcggtgttcgccgagatcggcccgcgcatggccgagttgagcggttcccggctggccgcgcagcaacagatggaaggcctcctggcgccgcaccggcccaaggagcccgcgtggttcctggccaccgtcggcgtctcgcccgaccaccagggcaagggtctgggcagcgccgtcgtgctccccggagtggaggcggccgagcgcgccggggtgcccgccttcctggagacctccgcgccccgcaacctccccttctacgagcggctcggcttcaccgtcaccgccgacgtcgaggtgcccgaaggaccgcgcacctggtgcatgacccgcaagcccggtgcctga

SEQ ID NO: 1341 - DNA, 2862 bp, Artificial Sequence
  Synthetic Polynucleotides
atggccttaccagtgaccgccttgctcctgccgctggccttgctgctccacgccgccaggccgcagtctgtggtcacacagccacctagcatgtctgccgctccaggccagcaagtgaccatctcttgtagcggcggcaacagcaacatcgagcggaactacgtgtcctggtatctgcaactgcctggcacagcccctaagctggtcatcttcgacaacgacagacggcccagcggcatccccgatagattttctggcagcaagagcggcaccagcgccacactgggaattaccggacttcagacaggcgacgaggccgactactactgtggcacatgggactctagcctgagaggctgggttttcggcggaggcacaaagctgacagtgcttggtggcggaggcggaagtggaggcggaggatctggcggcggaggctctgaagtgcagctcgttgagtctggcggcggactgattcaacctggcggaagcctgagactgagctgtgccgcttccggcttcaccttcagcaactacgccatgaactgggttcgacaggcccctggcaaaggactggaatgggtgtccaccatcaacggcagaggcagcagcaccatctacgccgattctgtgaagggcagattcaccatcagccgggacaacagcaagaacaccctgtacctccagatgaactccctgagagccgaggacaccgccacctattactgtgcccggtacatcagcagaggactgggcgattcttggggccagggcacactggttacagtgacgcgtgagcagaaactgatctcggaagaggatctggcgaagcccaccacgacgccagcgccgcgaccaccaacaccggcgcccaccatcgcgtcgcagcccctgtccctgcgcccagaggcgtgccggccagcggcggggggcgcagtgcacacgagggggctggacttcgcctgtgacatctacatctgggcgcccttggccgggacttgtggggtccttctcctgtcactggttatcaccctttactgcaaacggggcagaaagaaactcctgtatatattcaaacaaccatttatgagaccagtacaaactactcaagaggaagatggctgtagctgccgatttccagaagaagaagaaggaggatgtgaactgagagtgaagttcagcaggagcgcagacgcccccgcgtaccagcagggccagaaccagctctataacgagctgaatctaggacgaagagaggagtacgatgttttggacaagagacgtggccgggaccctgagatggggggaaagccgagaaggaagaaccctcaggaaggcctgtacaatgaactgcagaaagataagatggcggaggcctacagtgagattgggatgaaaggcgagcgccggaggggcaaggggcacgatggcctttaccagggtctcagtacagccaccaaggacacctacgacgcccttcacatgcaggccctgccccctcgctctagaggatctggagcaacaaacttctcactactcaaacaagcaggtgacgtggaggagaatcccgggcctgggatccacatggccacttacgaggttctctgtgaggtggcgcggaaactgggcacggatgacagggaagtggtattgttcctcctaaacgtgttcatacctcaacccacactggcccaattaattggagctcttagagctttaaaggaggagggcaggttaacgtttcccctgttagcggaatgtctgtttcgtgcaggtcgcagagacctcttgcgcgacctgcttcacttagacccgcgttttttagagcgccacctagcgggcacaatgagttatttcagcccttatcagctcactgttctccacgtagacggggagctgtgtgcgagggatattaggtctttgatatttttaagcaaggacactatagggtctcgcagcacaccacagacattcttacactgggtgtactgtatggaaaacttagacctactgggtcccactgacgtggatgccctaatgtcaatgcttagatctttgtcaagagtagacctacagcgccaagtgcaaaccctaatgggccttcacctttccggcccatcacactcccaacactatcgccatacaccactcgagaccgatttctacgactacaaggacgacgatgacaagactagtggctccggcgagggcagaggaagtctactaacctgcggagatgtggaagaaaatcctggcccacatatgaccgagtacaagcccacggtgcgcctcgccacccgcgacgacgtccccagggccgtacgcaccctcgccgccgcgttcgccgactaccccgccacgcgccacaccgtcgatccggaccgccacatcgagcgggtcaccgagctgcaagaactcttcctcacgcgcgtcgggctcgacatcggcaaggtgtgggtcgcggacgacggcgccgcggtggcggtctggaccacgccggagagcgtcgaagcgggggcggtgttcgccgagatcggcccgcgcatggccgagttgagcggttcccggctggccgcgcagcaacagatggaaggcctcctggcgccgcaccggcccaaggagcccgcgtggttcctggccaccgtcggcgtctcgcccgaccaccagggcaagggtctgggcagcgccgtcgtgctccccggagtggaggcggccgagcgcgccggggtgcccgccttcctggagacctccgcgccccgcaacctccccttctacgagcggctcggcttcaccgtcaccgccgacgtcgaggtgcccgaaggaccgcgcacctggtgcatgacccgcaagcccggtgcctga

SEQ ID NO: 1342 - DNA, 2862 bp, Artificial Sequence
  Synthetic Polynucleotides
atggccttaccagtgaccgccttgctcctgccgctggccttgctgctccacgccgccaggccgcagtctgtggtcacacagcctccatctgtgtctggcgctccaggccagagagtgaccatctcttgtaccggcagcagcagcaatatcggagccggctatgacgtgcactggtatcagcagctccctggcacagcccctaaactgctgatctacggcaacagcaacagacccagcggcgtgcccgatagattttccggctctaagagcggcacaagcgccagcctggctattactggactccaggccgaggacgaggccgactactactgtcagagctacgacagcagcctgagcggcagctatgtgtttggcaccggcaccaagctgacagtgcttggaggcggaggcggaagtggaggcggaggatctggcggcggaggctctgaagttcaactggtggaaaccggcggcaacctggttcaacctggcgcttctctgagactgagctgtgccgccagcggctttagctttagcggaacagccatgcactgggtccgacaggcacctggcaaaggactggaatgggtgtccaccatcagcagcacaggcagaagcacctactaccgggacagcgtgaagggcagattcaccatctccagagacaacagcaagaacaccctgtacctccagatgaacagcctgagaggcgaggacaccgccgtgtactattgtgccagagtgtccttcgactactggggccagggaaccctggtcacagtctcttctacgcgtgagcagaaactgatctcggaagaggatctggcgaagcccaccacgacgccagcgccgcgaccaccaacaccggcgcccaccatcgcgtcgcagcccctgtccctgcgcccagaggcgtgccggccagcggcggggggcgcagtgcacacgagggggctggacttcgcctgtgacatctacatctgggcgcccttggccgggacttgtggggtccttctcctgtcactggttatcaccctttactgcaaacggggcagaaagaaactcctgtatatattcaaacaaccatttatgagaccagtacaaactactcaagaggaagatggctgtagctgccgatttccagaagaagaagaaggaggatgtgaactgagagtgaagttcagcaggagcgcagacgcccccgcgtaccagcagggccagaaccagctctataacgagctgaatctaggacgaagagaggagtacgatgttttggacaagagacgtggccgggaccctgagatggggggaaagccgagaaggaagaaccctcaggaaggcctgtacaatgaactgcagaaagataagatggcggaggcctacagtgagattgggatgaaaggcgagcgccggaggggcaaggggcacgatggcctttaccagggtctcagtacagccaccaaggacacctacgacgcccttcacatgcaggccctgccccctcgctctagaggatctggagcaacaaacttctcactactcaaacaagcaggtgacgtggaggagaatcccgggcctgggatccacatggccacttacgaggttctctgtgaggtggcgcggaaactgggcacggatgacagggaagtggtattgttcctcctaaacgtgttcatacctcaacccacactggcccaattaattggagctcttagagctttaaaggaggagggcaggttaacgtttcccctgttagcggaatgtctgtttcgtgcaggtcgcagagacctcttgcgcgacctgcttcacttagacccgcgttttttagagcgccacctagcgggcacaatgagttatttcagcccttatcagctcactgttctccacgtagacggggagctgtgtgcgagggatattaggtctttgatatttttaagcaaggacactatagggtctcgcagcacaccacagacattcttacactgggtgtactgtatggaaaacttagacctactgggtcccactgacgtggatgccctaatgtcaatgcttagatctttgtcaagagtagacctacagcgccaagtgcaaaccctaatgggccttcacctttccggcccatcacactcccaacactatcgccatacaccactcgagaccgatttctacgactacaaggacgacgatgacaagactagtggctccggcgagggcagaggaagtctactaacctgcggagatgtggaagaaaatcctggcccacatatgaccgagtacaagcccacggtgcgcctcgccacccgcgacgacgtccccagggccgtacgcaccctcgccgccgcgttcgccgactaccccgccacgcgccacaccgtcgatccggaccgccacatcgagcgggtcaccgagctgcaagaactcttcctcacgcgcgtcgggctcgacatcggcaaggtgtgggtcgcggacgacggcgccgcggtggcggtctggaccacgccggagagcgtcgaagcgggggcggtgttcgccgagatcggcccgcgcatggccgagttgagcggttcccggctggccgcgcagcaacagatggaaggcctcctggcgccgcaccggcccaaggagcccgcgtggttcctggccaccgtcggcgtctcgcccgaccaccagggcaagggtctgggcagcgccgtcgtgctccccggagtggaggcggccgagcgcgccggggtgcccgccttcctggagacctccgcgccccgcaacctccccttctacgagcggctcggcttcaccgtcaccgccgacgtcgaggtgcccgaaggaccgcgcacctggtgcatgacccgcaagcccggtgcctga

SEQ ID NO: 1343 - DNA, 2868 bp, Artificial Sequence
  Synthetic Polynucleotides
atggccttaccagtgaccgccttgctcctgccgctggccttgctgctccacgccgccaggccgcagtctgtggttacacagcctgcctccgtgtctggctctcctggccagagcatcaccatcagctgtaccggcaccagctctgatgtcggcggctacaattacgtgtcctggtatcagcagcaccccggcaaggcccctaagctgatgatctacgacgtgtccaagaggcccagcggcgtgtccaatagattcagcggcagcaagagcggcaacaccgccagcctgacaatttctggactgcaagccgaggacgaggccgactactactgtagcagctacaccagcagcagcacactggtgtttggcggaggcaccaagctgacagttcttggaggcggaggcggaagtggaggcggaggatctggcggcggaggctctgaagttcagctggttgaaagcggcggagcctttgttcagcctggcggatctctgagactgagctgtgccgccagcggcttcacattttccagctacgccatgacctgggtccgacaggctcctggcaaaggactggaatgggtgtccaccatctccggcagaggcagaagcaccttctacgccgatagcgtgaagggcagattcacaatcagccgggacaacagcaagaacaccctgtacctccagatgaacagcctgagagccgaggataccgccgtgtactactgtgcccggtactatcacgctggcgcctttgatctttggggccagggaacactggtcaccgtgtcatctacgcgtgagcagaaactgatctcggaagaggatctggcgaagcccaccacgacgccagcgccgcgaccaccaacaccggcgcccaccatcgcgtcgcagcccctgtccctgcgcccagaggcgtgccggccagcggcggggggcgcagtgcacacgagggggctggacttcgcctgtgacatctacatctgggcgcccttggccgggacttgtggggtccttctcctgtcactggttatcaccctttactgcaaacggggcagaaagaaactcctgtatatattcaaacaaccatttatgagaccagtacaaactactcaagaggaagatggctgtagctgccgatttccagaagaagaagaaggaggatgtgaactgagagtgaagttcagcaggagcgcagacgcccccgcgtaccagcagggccagaaccagctctataacgagctgaatctaggacgaagagaggagtacgatgttttggacaagagacgtggccgggaccctgagatggggggaaagccgagaaggaagaaccctcaggaaggcctgtacaatgaactgcagaaagataagatggcggaggcctacagtgagattgggatgaaaggcgagcgccggaggggcaaggggcacgatggcctttaccagggtctcagtacagccaccaaggacacctacgacgcccttcacatgcaggccctgccccctcgctctagaggatctggagcaacaaacttctcactactcaaacaagcaggtgacgtggaggagaatcccgggcctgggatccacatggccacttacgaggttctctgtgaggtggcgcggaaactgggcacggatgacagggaagtggtattgttcctcctaaacgtgttcatacctcaacccacactggcccaattaattggagctcttagagctttaaaggaggagggcaggttaacgtttcccctgttagcggaatgtctgtttcgtgcaggtcgcagagacctcttgcgcgacctgcttcacttagacccgcgttttttagagcgccacctagcgggcacaatgagttatttcagcccttatcagctcactgttctccacgtagacggggagctgtgtgcgagggatattaggtctttgatatttttaagcaaggacactatagggtctcgcagcacaccacagacattcttacactgggtgtactgtatggaaaacttagacctactgggtcccactgacgtggatgccctaatgtcaatgcttagatctttgtcaagagtagacctacagcgccaagtgcaaaccctaatgggccttcacctttccggcccatcacactcccaacactatcgccatacaccactcgagaccgatttctacgactacaaggacgacgatgacaagactagtggctccggcgagggcagaggaagtctactaacctgcggagatgtggaagaaaatcctggcccacatatgaccgagtacaagcccacggtgcgcctcgccacccgcgacgacgtccccagggccgtacgcaccctcgccgccgcgttcgccgactaccccgccacgcgccacaccgtcgatccggaccgccacatcgagcgggtcaccgagctgcaagaactcttcctcacgcgcgtcgggctcgacatcggcaaggtgtgggtcgcggacgacggcgccgcggtggcggtctggaccacgccggagagcgtcgaagcgggggcggtgttcgccgagatcggcccgcgcatggccgagttgagcggttcccggctggccgcgcagcaacagatggaaggcctcctggcgccgcaccggcccaaggagcccgcgtggttcctggccaccgtcggcgtctcgcccgaccaccagggcaagggtctgggcagcgccgtcgtgctccccggagtggaggcggccgagcgcgccggggtgcccgccttcctggagacctccgcgccccgcaacctccccttctacgagcggctcggcttcaccgtcaccgccgacgtcgaggtgcccgaaggaccgcgcacctggtgcatgacccgcaagcccggtgcctga

SEQ ID NO: 1344 - DNA, 2862 bp, Artificial Sequence
  Synthetic Polynucleotides
atggccttaccagtgaccgccttgctcctgccgctggccttgctgctccacgccgccaggccggacaacatcgagctgacccagagccccgccatcatgagtgcctctccaggcgagcgcgtgaccatgacatgtagcgccagcagcagcatccggtacatctactggtatcagcagaagcccggcagcagccccagactgctgatctacgacaccagcaacgtggcccctggcgtgccctttagattttccggcagcggctccggcaccagctacagcctgaccatcaaccggatggaagccgaggacgccgccacctactattgtcaggaatggagcggctacccctacaccttcggcggaggcaccaagctggacatcaagagaggcggaggcggaagtggaggcggaggatctggcggcggaggctctcaagtgaagctccaggaatctggcggcggactcgtgaagcctggcggctctctgaagctgagctgtgccgccagcggcttcaccttcagcagctacggcatgagctgggtgcgccagacccccgacaagagactggaatgggtggcaaccatcagcagcggcggcagctacacctactaccccgatagcgtgaagggccggttcaccatctccagagacaacgccaagaacaccctgtacctccagatgagcagcctgaagtccgaggataccgccatgtactactgcgccagaggcaactgggagggctggtacttcgatgtgtggggccagggcaccaccgtgaccgtgtcatctacgcgtgagcagaaactgatctcggaagaggatctggcgaagcccaccacgacgccagcgccgcgaccaccaacaccggcgcccaccatcgcgtcgcagcccctgtccctgcgcccagaggcgtgccggccagcggcggggggcgcagtgcacacgagggggctggacttcgcctgtgacatctacatctgggcgcccttggccgggacttgtggggtccttctcctgtcactggttatcaccctttactgcaaacggggcagaaagaaactcctgtatatattcaaacaaccatttatgagaccagtacaaactactcaagaggaagatggctgtagctgccgatttccagaagaagaagaaggaggatgtgaactgagagtgaagttcagcaggagcgcagacgcccccgcgtaccagcagggccagaaccagctctataacgagctgaatctaggacgaagagaggagtacgatgttttggacaagagacgtggccgggaccctgagatggggggaaagccgagaaggaagaaccctcaggaaggcctgtacaatgaactgcagaaagataagatggcggaggcctacagtgagattgggatgaaaggcgagcgccggaggggcaaggggcacgatggcctttaccagggtctcagtacagccaccaaggacacctacgacgcccttcacatgcaggccctgccccctcgctctagaggatctggagcaacaaacttctcactactcaaacaagcaggtgacgtggaggagaatcccgggcctgggatccacatggccacttacgaggttctctgtgaggtggcgcggaaactgggcacggatgacagggaagtggtattgttcctcctaaacgtgttcatacctcaacccacactggcccaattaattggagctcttagagctttaaaggaggagggcaggttaacgtttcccctgttagcggaatgtctgtttcgtgcaggtcgcagagacctcttgcgcgacctgcttcacttagacccgcgttttttagagcgccacctagcgggcacaatgagttatttcagcccttatcagctcactgttctccacgtagacggggagctgtgtgcgagggatattaggtctttgatatttttaagcaaggacactatagggtctcgcagcacaccacagacattcttacactgggtgtactgtatggaaaacttagacctactgggtcccactgacgtggatgccctaatgtcaatgcttagatctttgtcaagagtagacctacagcgccaagtgcaaaccctaatgggccttcacctttccggcccatcacactcccaacactatcgccatacaccactcgagaccgatttctacgactacaaggacgacgatgacaagactagtggctccggcgagggcagaggaagtctactaacctgcggagatgtggaagaaaatcctggcccacatatgaccgagtacaagcccacggtgcgcctcgccacccgcgacgacgtccccagggccgtacgcaccctcgccgccgcgttcgccgactaccccgccacgcgccacaccgtcgatccggaccgccacatcgagcgggtcaccgagctgcaagaactcttcctcacgcgcgtcgggctcgacatcggcaaggtgtgggtcgcggacgacggcgccgcggtggcggtctggaccacgccggagagcgtcgaagcgggggcggtgttcgccgagatcggcccgcgcatggccgagttgagcggttcccggctggccgcgcagcaacagatggaaggcctcctggcgccgcaccggcccaaggagcccgcgtggttcctggccaccgtcggcgtctcgcccgaccaccagggcaagggtctgggcagcgccgtcgtgctccccggagtggaggcggccgagcgcgccggggtgcccgccttcctggagacctccgcgccccgcaacctccccttctacgagcggctcggcttcaccgtcaccgccgacgtcgaggtgcccgaaggaccgcgcacctggtgcatgacccgcaagcccggtgcctga

SEQ ID NO: 1345 - DNA, 2892 bp, Artificial Sequence
  Synthetic Polynucleotides
atggccttaccagtgaccgccttgctcctgccgctggccttgctgctccacgccgccaggccggacaacttcatgctgacccagccccacagcgtgtccgagagccctggcaagaccgtgaccatctcctgtaccggcagcggcggcagcatcgacaacaactacgtgcactggtatcagcagaggcccggcagcgcccctaccaccgtgatgttcgaggacaaccagaggcccagcggcgtgcccgatagattcagcggctctatcgacagcagcagcaacagcgccagcctcgtgatctccggcctgaaaaccgaggacgagggcgactactactgccagagcagcgacggctccaaggtggtgtttggcggaggcaccaagctgaccgtgctgggacagggcggaggcggaagtggaggcggaggatctggcggcggaggctctgaagtgcaactggtgcagagcggcggaggctctctgacactgtcttgtgctgcctccggcgtggtgcagcctggcagattcaccttcagcagctacggaatgcactgggtgcgccaggcccctggaaagggactggaatgggtgtccgtgatctcttacgacggcagcaacaagtattacgccgacagcgtgaagggccggttcaccatctccagagacaacagcaagaacaccctgtacctccagatgaacagcctgcggaccgaggacaccgccgtgtactactgtgccaagaccctgtccgctggcgagtggattggaggcggagccttcgatatctggggccacggcacaatggtcaccgtgtcctctacgcgtgagcagaaactgatctcggaagaggatctggcgaagcccaccacgacgccagcgccgcgaccaccaacaccggcgcccaccatcgcgtcgcagcccctgtccctgcgcccagaggcgtgccggccagcggcggggggcgcagtgcacacgagggggctggacttcgcctgtgacatctacatctgggcgcccttggccgggacttgtggggtccttctcctgtcactggttatcaccctttactgcaaacggggcagaaagaaactcctgtatatattcaaacaaccatttatgagaccagtacaaactactcaagaggaagatggctgtagctgccgatttccagaagaagaagaaggaggatgtgaactgagagtgaagttcagcaggagcgcagacgcccccgcgtaccagcagggccagaaccagctctataacgagctgaatctaggacgaagagaggagtacgatgttttggacaagagacgtggccgggaccctgagatggggggaaagccgagaaggaagaaccctcaggaaggcctgtacaatgaactgcagaaagataagatggcggaggcctacagtgagattgggatgaaaggcgagcgccggaggggcaaggggcacgatggcctttaccagggtctcagtacagccaccaaggacacctacgacgcccttcacatgcaggccctgccccctcgctctagaggatctggagcaacaaacttctcactactcaaacaagcaggtgacgtggaggagaatcccgggcctgggatccacatggccacttacgaggttctctgtgaggtggcgcggaaactgggcacggatgacagggaagtggtattgttcctcctaaacgtgttcatacctcaacccacactggcccaattaattggagctcttagagctttaaaggaggagggcaggttaacgtttcccctgttagcggaatgtctgtttcgtgcaggtcgcagagacctcttgcgcgacctgcttcacttagacccgcgttttttagagcgccacctagcgggcacaatgagttatttcagcccttatcagctcactgttctccacgtagacggggagctgtgtgcgagggatattaggtctttgatatttttaagcaaggacactatagggtctcgcagcacaccacagacattcttacactgggtgtactgtatggaaaacttagacctactgggtcccactgacgtggatgccctaatgtcaatgcttagatctttgtcaagagtagacctacagcgccaagtgcaaaccctaatgggccttcacctttccggcccatcacactcccaacactatcgccatacaccactcgagaccgatttctacgactacaaggacgacgatgacaagactagtggctccggcgagggcagaggaagtctactaacctgcggagatgtggaagaaaatcctggcccacatatgaccgagtacaagcccacggtgcgcctcgccacccgcgacgacgtccccagggccgtacgcaccctcgccgccgcgttcgccgactaccccgccacgcgccacaccgtcgatccggaccgccacatcgagcgggtcaccgagctgcaagaactcttcctcacgcgcgtcgggctcgacatcggcaaggtgtgggtcgcggacgacggcgccgcggtggcggtctggaccacgccggagagcgtcgaagcgggggcggtgttcgccgagatcggcccgcgcatggccgagttgagcggttcccggctggccgcgcagcaacagatggaaggcctcctggcgccgcaccggcccaaggagcccgcgtggttcctggccaccgtcggcgtctcgcccgaccaccagggcaagggtctgggcagcgccgtcgtgctccccggagtggaggcggccgagcgcgccggggtgcccgccttcctggagacctccgcgccccgcaacctccccttctacgagcggctcggcttcaccgtcaccgccgacgtcgaggtgcccgaaggaccgcgcacctggtgcatgacccgcaagcccggtgcctga

SEQ ID NO: 1346 - DNA, 2862 bp, Artificial Sequence
  Synthetic Polynucleotides
atggccttaccagtgaccgccttgctcctgccgctggccttgctgctccacgccgccaggccggacgtcgtgatgacccagacccctctgagcctgcctgtgtccctgggcgatcaggccagcatcagctgtagaagcagccagagcctggtgcacagcaacggcaacacctacctgcactggtatctccagaagcccggccagagccccaagctgctgatctacaaggtgtccaacagattcagcggcgtgcccgacagattctccggcagcggctctggcaccgacttcaccctgaagatcagccgggtggaagccgaggacctgggcgtgtacttctgtagccagaacacccccgtgccccccaagtttggcagcggcaccaagctggaaatcaagggcggaggcggaagtggaggcggaggatctggcggcggaggctctcaggtgcagctccagcagtctggcgctgaactcgtgcggcctggcgcttctgtgaagctgtcttgcaaggccagcggctacaccttcaacgactacgagatgcactgggtcaagcagacccctgtgcacggcctgaagtggatcggagccctggaacccaagaccggcgataccgcctacagccagaagttcaagggcaaggccaccctgaccgccgacaagagcagcagcacagcctacatggaactgcggagcctgaccagcgaggacagcgccgtgtactactgcaccagctgctactactacacctacagcggccagggcaccctcgtgacagtgtctgctacgcgtgagcagaaactgatctcggaagaggatctggcgaagcccaccacgacgccagcgccgcgaccaccaacaccggcgcccaccatcgcgtcgcagcccctgtccctgcgcccagaggcgtgccggccagcggcggggggcgcagtgcacacgagggggctggacttcgcctgtgacatctacatctgggcgcccttggccgggacttgtggggtccttctcctgtcactggttatcaccctttactgcaaacggggcagaaagaaactcctgtatatattcaaacaaccatttatgagaccagtacaaactactcaagaggaagatggctgtagctgccgatttccagaagaagaagaaggaggatgtgaactgagagtgaagttcagcaggagcgcagacgcccccgcgtaccagcagggccagaaccagctctataacgagctgaatctaggacgaagagaggagtacgatgttttggacaagagacgtggccgggaccctgagatggggggaaagccgagaaggaagaaccctcaggaaggcctgtacaatgaactgcagaaagataagatggcggaggcctacagtgagattgggatgaaaggcgagcgccggaggggcaaggggcacgatggcctttaccagggtctcagtacagccaccaaggacacctacgacgcccttcacatgcaggccctgccccctcgctctagaggatctggagcaacaaacttctcactactcaaacaagcaggtgacgtggaggagaatcccgggcctgggatccacatggccacttacgaggttctctgtgaggtggcgcggaaactgggcacggatgacagggaagtggtattgttcctcctaaacgtgttcatacctcaacccacactggcccaattaattggagctcttagagctttaaaggaggagggcaggttaacgtttcccctgttagcggaatgtctgtttcgtgcaggtcgcagagacctcttgcgcgacctgcttcacttagacccgcgttttttagagcgccacctagcgggcacaatgagttatttcagcccttatcagctcactgttctccacgtagacggggagctgtgtgcgagggatattaggtctttgatatttttaagcaaggacactatagggtctcgcagcacaccacagacattcttacactgggtgtactgtatggaaaacttagacctactgggtcccactgacgtggatgccctaatgtcaatgcttagatctttgtcaagagtagacctacagcgccaagtgcaaaccctaatgggccttcacctttccggcccatcacactcccaacactatcgccatacaccactcgagaccgatttctacgactacaaggacgacgatgacaagactagtggctccggcgagggcagaggaagtctactaacctgcggagatgtggaagaaaatcctggcccacatatgaccgagtacaagcccacggtgcgcctcgccacccgcgacgacgtccccagggccgtacgcaccctcgccgccgcgttcgccgactaccccgccacgcgccacaccgtcgatccggaccgccacatcgagcgggtcaccgagctgcaagaactcttcctcacgcgcgtcgggctcgacatcggcaaggtgtgggtcgcggacgacggcgccgcggtggcggtctggaccacgccggagagcgtcgaagcgggggcggtgttcgccgagatcggcccgcgcatggccgagttgagcggttcccggctggccgcgcagcaacagatggaaggcctcctggcgccgcaccggcccaaggagcccgcgtggttcctggccaccgtcggcgtctcgcccgaccaccagggcaagggtctgggcagcgccgtcgtgctccccggagtggaggcggccgagcgcgccggggtgcccgccttcctggagacctccgcgccccgcaacctccccttctacgagcggctcggcttcaccgtcaccgccgacgtcgaggtgcccgaaggaccgcgcacctggtgcatgacccgcaagcccggtgcctga

SEQ ID NO: 1347 - DNA, 2859 bp, Artificial Sequence
  Synthetic Polynucleotides
atggccttaccagtgaccgccttgctcctgccgctggccttgctgctccacgccgccaggccggacatccaactgacccagagccccagcagcctgtctgcctctgtgggcgacagagtgaccatcacctgtagagccagccagggcatcagaaacgacctgggctggtatcagcagaagcccggcaaggcccccaagcggctgatctatgctgccagctccctccagaatggcgtgcccagcagattttccggcagcggctctggcaccgagttcaccctgaccatcagctccctccagcccgaggacttcgccacctactactgcctccagcacaacacctaccccgccttcggccagggcaccaaggtggaaatcaagagaggcggaggcggaagtggaggcggaggatctggcggcggaggctctcaggtgcaactccaggaatctggccctggcctcgtgaagcctagccagaccctgagcctgacctgtaccgtgtctggcggcagcatcagcagcttcaactactactggtcctggatcagacaccaccctggcaagggcctggaatggatcggctacatctactacagcggcagcacctacagcaaccccagcctgaagtcccgcgtgaccatctccgtggacaccagcaagaaccagtttagcctgaccctgtccagcgtgacagccgccgataccgccgtgtactactgcgccagaggctacaactggaactacttcgactactggggccagggaaccctcgtgaccgtgtctagtacgcgtgagcagaaactgatctcggaagaggatctggcgaagcccaccacgacgccagcgccgcgaccaccaacaccggcgcccaccatcgcgtcgcagcccctgtccctgcgcccagaggcgtgccggccagcggcggggggcgcagtgcacacgagggggctggacttcgcctgtgacatctacatctgggcgcccttggccgggacttgtggggtccttctcctgtcactggttatcaccctttactgcaaacggggcagaaagaaactcctgtatatattcaaacaaccatttatgagaccagtacaaactactcaagaggaagatggctgtagctgccgatttccagaagaagaagaaggaggatgtgaactgagagtgaagttcagcaggagcgcagacgcccccgcgtaccagcagggccagaaccagctctataacgagctgaatctaggacgaagagaggagtacgatgttttggacaagagacgtggccgggaccctgagatggggggaaagccgagaaggaagaaccctcaggaaggcctgtacaatgaactgcagaaagataagatggcggaggcctacagtgagattgggatgaaaggcgagcgccggaggggcaaggggcacgatggcctttaccagggtctcagtacagccaccaaggacacctacgacgcccttcacatgcaggccctgccccctcgctctagaggatctggagcaacaaacttctcactactcaaacaagcaggtgacgtggaggagaatcccgggcctgggatccacatggccacttacgaggttctctgtgaggtggcgcggaaactgggcacggatgacagggaagtggtattgttcctcctaaacgtgttcatacctcaacccacactggcccaattaattggagctcttagagctttaaaggaggagggcaggttaacgtttcccctgttagcggaatgtctgtttcgtgcaggtcgcagagacctcttgcgcgacctgcttcacttagacccgcgttttttagagcgccacctagcgggcacaatgagttatttcagcccttatcagctcactgttctccacgtagacggggagctgtgtgcgagggatattaggtctttgatatttttaagcaaggacactatagggtctcgcagcacaccacagacattcttacactgggtgtactgtatggaaaacttagacctactgggtcccactgacgtggatgccctaatgtcaatgcttagatctttgtcaagagtagacctacagcgccaagtgcaaaccctaatgggccttcacctttccggcccatcacactcccaacactatcgccatacaccactcgagaccgatttctacgactacaaggacgacgatgacaagactagtggctccggcgagggcagaggaagtctactaacctgcggagatgtggaagaaaatcctggcccacatatgaccgagtacaagcccacggtgcgcctcgccacccgcgacgacgtccccagggccgtacgcaccctcgccgccgcgttcgccgactaccccgccacgcgccacaccgtcgatccggaccgccacatcgagcgggtcaccgagctgcaagaactcttcctcacgcgcgtcgggctcgacatcggcaaggtgtgggtcgcggacgacggcgccgcggtggcggtctggaccacgccggagagcgtcgaagcgggggcggtgttcgccgagatcggcccgcgcatggccgagttgagcggttcccggctggccgcgcagcaacagatggaaggcctcctggcgccgcaccggcccaaggagcccgcgtggttcctggccaccgtcggcgtctcgcccgaccaccagggcaagggtctgggcagcgccgtcgtgctccccggagtggaggcggccgagcgcgccggggtgcccgccttcctggagacctccgcgccccgcaacctccccttctacgagcggctcggcttcaccgtcaccgccgacgtcgaggtgcccgaaggaccgcgcacctggtgcatgacccgcaagcccggtgcctga

SEQ ID NO: 1348 - DNA, 2865 bp, Artificial Sequence
  Synthetic Polynucleotides
atggccttaccagtgaccgccttgctcctgccgctggccttgctgctccacgccgccaggccggacgacatcgtgctgacccagagccccgccagcctggccgtgagcctgggccagagcgtgaccatcagctgcagagccagcgagagcgtggagtactacggcaccagcctgatgcagtggtaccagcagaagcccggccagccccccaagctgctgatctacgccaccagcaacgtggagagcggcgtgcccgccagattcagcggcagcggcagcggcaccgacttcagcctgaacatccaccccgtggaggaggacgacatcgccatgtacttctgccagcagagcagaaagctgcccagcaccttcggcggcggcaccaagctggagatcaagggcggaggcggaagtggaggcggaggatctggcggcggaggctctgacgtgagactgcaggagagcggccccggccaggtgaagcccagccagaccgtgagcctgacctgcagcgtgaccggctacagcatcaccaacggcaaccactggtggaactggatcagacaggtgagcggcagcaagctggagtggatcggctacatcagcagcagcggcagcaccgacagcaaccccagcctgaagagcagaatcagcatcaccagagacaccagcaagaaccagctgttcctgcagctgaacagcgtgaccaccgaggacatcgccacctactactgcgccagaggctactacttcgactactggggccagggcaccaccctgaccgtgagcagcacgcgtgagcagaaactgatctcggaagaggatctggcgaagcccaccacgacgccagcgccgcgaccaccaacaccggcgcccaccatcgcgtcgcagcccctgtccctgcgcccagaggcgtgccggccagcggcggggggcgcagtgcacacgagggggctggacttcgcctgtgacatctacatctgggcgcccttggccgggacttgtggggtccttctcctgtcactggttatcaccctttactgcaaacggggcagaaagaaactcctgtatatattcaaacaaccatttatgagaccagtacaaactactcaagaggaagatggctgtagctgccgatttccagaagaagaagaaggaggatgtgaactgagagtgaagttcagcaggagcgcagacgcccccgcgtaccagcagggccagaaccagctctataacgagctgaatctaggacgaagagaggagtacgatgttttggacaagagacgtggccgggaccctgagatggggggaaagccgagaaggaagaaccctcaggaaggcctgtacaatgaactgcagaaagataagatggcggaggcctacagtgagattgggatgaaaggcgagcgccggaggggcaaggggcacgatggcctttaccagggtctcagtacagccaccaaggacacctacgacgcccttcacatgcaggccctgccccctcgctctagaggatctggagcaacaaacttctcactactcaaacaagcaggtgacgtggaggagaatcccgggcctgggatccacatggccacttacgaggttctctgtgaggtggcgcggaaactgggcacggatgacagggaagtggtattgttcctcctaaacgtgttcatacctcaacccacactggcccaattaattggagctcttagagctttaaaggaggagggcaggttaacgtttcccctgttagcggaatgtctgtttcgtgcaggtcgcagagacctcttgcgcgacctgcttcacttagacccgcgttttttagagcgccacctagcgggcacaatgagttatttcagcccttatcagctcactgttctccacgtagacggggagctgtgtgcgagggatattaggtctttgatatttttaagcaaggacactatagggtctcgcagcacaccacagacattcttacactgggtgtactgtatggaaaacttagacctactgggtcccactgacgtggatgccctaatgtcaatgcttagatctttgtcaagagtagacctacagcgccaagtgcaaaccctaatgggccttcacctttccggcccatcacactcccaacactatcgccatacaccactcgagaccgatttctacgactacaaggacgacgatgacaagactagtggctccggcgagggcagaggaagtctactaacctgcggagatgtggaagaaaatcctggcccacatatgaccgagtacaagcccacggtgcgcctcgccacccgcgacgacgtccccagggccgtacgcaccctcgccgccgcgttcgccgactaccccgccacgcgccacaccgtcgatccggaccgccacatcgagcgggtcaccgagctgcaagaactcttcctcacgcgcgtcgggctcgacatcggcaaggtgtgggtcgcggacgacggcgccgcggtggcggtctggaccacgccggagagcgtcgaagcgggggcggtgttcgccgagatcggcccgcgcatggccgagttgagcggttcccggctggccgcgcagcaacagatggaaggcctcctggcgccgcaccggcccaaggagcccgcgtggttcctggccaccgtcggcgtctcgcccgaccaccagggcaagggtctgggcagcgccgtcgtgctccccggagtggaggcggccgagcgcgccggggtgcccgccttcctggagacctccgcgccccgcaacctccccttctacgagcggctcggcttcaccgtcaccgccgacgtcgaggtgcccgaaggaccgcgcacctggtgcatgacccgcaagcccggtgcctga

SEQ ID NO: 1349 - DNA, 2499 bp, Artificial Sequence
  Synthetic Polynucleotides
atggccctgcccgtgacagccctgctgctgcctctggctctgctgctgcacgccgccagacccgatgaattcgaggtgcaactggtggaaagcggcggaggcctggtgcaggctggcggatctctgagactgagctgtgccgccagcggcatcaccttcagcatcaacacaatgggctggtacagacaggcccctggcaagcagagggaactggtggccctgatctccagcatcggcgacacctactacgccgacagcgtgaagggccggttcaccatcagccgggacaacgccaagaacaccgtgtacctccagatgaacagcctgaagcccgaggacaccgccgtgtactactgcaagcggttcagaacagccgcccagggcaccgattattggggccagggaacacaagtgaccgtgtcctctacgcgtgagcagaaactgatctcggaagaggatctggcgaagcccaccacgacgccagcgccgcgaccaccaacaccggcgcccaccatcgcgtcgcagcccctgtccctgcgcccagaggcgtgccggccagcggcggggggcgcagtgcacacgagggggctggacttcgcctgtgacatctacatctgggcgcccttggccgggacttgtggggtccttctcctgtcactggttatcaccctttactgcaaacggggcagaaagaaactcctgtatatattcaaacaaccatttatgagaccagtacaaactactcaagaggaagatggctgtagctgccgatttccagaagaagaagaaggaggatgtgaactgagagtgaagttcagcaggagcgcagacgcccccgcgtaccagcagggccagaaccagctctataacgagctgaatctaggacgaagagaggagtacgatgttttggacaagagacgtggccgggaccctgagatggggggaaagccgagaaggaagaaccctcaggaaggcctgtacaatgaactgcagaaagataagatggcggaggcctacagtgagattgggatgaaaggcgagcgccggaggggcaaggggcacgatggcctttaccagggtctcagtacagccaccaaggacacctacgacgcccttcacatgcaggccctgccccctcgctctagaggatctggagcaacaaacttctcactactcaaacaagcaggtgacgtggaggagaatcccgggcctgggatccacatggccacttacgaggttctctgtgaggtggcgcggaaactgggcacggatgacagggaagtggtattgttcctcctaaacgtgttcatacctcaacccacactggcccaattaattggagctcttagagctttaaaggaggagggcaggttaacgtttcccctgttagcggaatgtctgtttcgtgcaggtcgcagagacctcttgcgcgacctgcttcacttagacccgcgttttttagagcgccacctagcgggcacaatgagttatttcagcccttatcagctcactgttctccacgtagacggggagctgtgtgcgagggatattaggtctttgatatttttaagcaaggacactatagggtctcgcagcacaccacagacattcttacactgggtgtactgtatggaaaacttagacctactgggtcccactgacgtggatgccctaatgtcaatgcttagatctttgtcaagagtagacctacagcgccaagtgcaaaccctaatgggccttcacctttccggcccatcacactcccaacactatcgccatacaccactcgagaccgatttctacgactacaaggacgacgatgacaagactagtggctccggcgagggcagaggaagtctactaacctgcggagatgtggaagaaaatcctggcccacatatgaccgagtacaagcccacggtgcgcctcgccacccgcgacgacgtccccagggccgtacgcaccctcgccgccgcgttcgccgactaccccgccacgcgccacaccgtcgatccggaccgccacatcgagcgggtcaccgagctgcaagaactcttcctcacgcgcgtcgggctcgacatcggcaaggtgtgggtcgcggacgacggcgccgcggtggcggtctggaccacgccggagagcgtcgaagcgggggcggtgttcgccgagatcggcccgcgcatggccgagttgagcggttcccggctggccgcgcagcaacagatggaaggcctcctggcgccgcaccggcccaaggagcccgcgtggttcctggccaccgtcggcgtctcgcccgaccaccagggcaagggtctgggcagcgccgtcgtgctccccggagtggaggcggccgagcgcgccggggtgcccgccttcctggagacctccgcgccccgcaacctccccttctacgagcggctcggcttcaccgtcaccgccgacgtcgaggtgcccgaaggaccgcgcacctggtgcatgacccgcaagcccggtgcctga

SEQ ID NO: 1350 - DNA, 2304 bp, Artificial Sequence
  Synthetic Polynucleotides
atggactggatttggcgcatccttttccttgtcggcgctgctaccggcgcccattccttcgaaggcagcggattcgaatacgccaaagagatgcggaacgcctactgggagatcgccctgctgcccaatctgaccaaccagcagaagagagcccccatcagaaagctgtacgacgacccctcccagagcagcgagctgctgtctgaggctaaaaaactgaacgatagccagacgcgtgagcagaaactgatctcggaagaggatctggcgaagcccaccacgacgccagcgccgcgaccaccaacaccggcgcccaccatcgcgtcgcagcccctgtccctgcgcccagaggcgtgccggccagcggcggggggcgcagtgcacacgagggggctggacttcgcctgtgacatctacatctgggcgcccttggccgggacttgtggggtccttctcctgtcactggttatcaccctttactgcaaacggggcagaaagaaactcctgtatatattcaaacaaccatttatgagaccagtacaaactactcaagaggaagatggctgtagctgccgatttccagaagaagaagaaggaggatgtgaactgagagtgaagttcagcaggagcgcagacgcccccgcgtaccagcagggccagaaccagctctataacgagctgaatctaggacgaagagaggagtacgatgttttggacaagagacgtggccgggaccctgagatggggggaaagccgagaaggaagaaccctcaggaaggcctgtacaatgaactgcagaaagataagatggcggaggcctacagtgagattgggatgaaaggcgagcgccggaggggcaaggggcacgatggcctttaccagggtctcagtacagccaccaaggacacctacgacgcccttcacatgcaggccctgccccctcgctctagaggatctggagcaacaaacttctcactactcaaacaagcaggtgacgtggaggagaatcccgggcctgggatccacatggccacttacgaggttctctgtgaggtggcgcggaaactgggcacggatgacagggaagtggtattgttcctcctaaacgtgttcatacctcaacccacactggcccaattaattggagctcttagagctttaaaggaggagggcaggttaacgtttcccctgttagcggaatgtctgtttcgtgcaggtcgcagagacctcttgcgcgacctgcttcacttagacccgcgttttttagagcgccacctagcgggcacaatgagttatttcagcccttatcagctcactgttctccacgtagacggggagctgtgtgcgagggatattaggtctttgatatttttaagcaaggacactatagggtctcgcagcacaccacagacattcttacactgggtgtactgtatggaaaacttagacctactgggtcccactgacgtggatgccctaatgtcaatgcttagatctttgtcaagagtagacctacagcgccaagtgcaaaccctaatgggccttcacctttccggcccatcacactcccaacactatcgccatacaccactcgagaccgatttctacgactacaaggacgacgatgacaagactagtggctccggcgagggcagaggaagtctactaacctgcggagatgtggaagaaaatcctggcccacatatgaccgagtacaagcccacggtgcgcctcgccacccgcgacgacgtccccagggccgtacgcaccctcgccgccgcgttcgccgactaccccgccacgcgccacaccgtcgatccggaccgccacatcgagcgggtcaccgagctgcaagaactcttcctcacgcgcgtcgggctcgacatcggcaaggtgtgggtcgcggacgacggcgccgcggtggcggtctggaccacgccggagagcgtcgaagcgggggcggtgttcgccgagatcggcccgcgcatggccgagttgagcggttcccggctggccgcgcagcaacagatggaaggcctcctggcgccgcaccggcccaaggagcccgcgtggttcctggccaccgtcggcgtctcgcccgaccaccagggcaagggtctgggcagcgccgtcgtgctccccggagtggaggcggccgagcgcgccggggtgcccgccttcctggagacctccgcgccccgcaacctccccttctacgagcggctcggcttcaccgtcaccgccgacgtcgaggtgcccgaaggaccgcgcacctggtgcatgacccgcaagcccggtgcctga

SEQ ID NO: 1351 - DNA, 2517 bp, Artificial Sequence
  Synthetic Polynucleotides
atggccctgcccgtgacagccctgctgctgcctctggctctgctgctgcacgccgccagacccgatgaattcggctctgacctgggcatcaagctgctgttcgccgctgccaagggccaggacgacgaagtgcggattctgctggctgctggggccgacgtgaacgccaaggatttcgagggctacacccccctgcacgtggccgcctatgatggacacctggaaatcgtggaagtgctgctgaaggctggcgctgatgtgaatgccaaagacagccagggccggacccctctgcatgaagccgcctacagcggccatctggaaattgtggaagtgctgctgaaagccggggcagacgtgaacgctcaggacgacgctggcgagacaccagccgatctggctgcagcttggggccacgaagatatcgccgaggtgctgcagaagacgcgtgagcagaaactgatctcggaagaggatctggcgaagcccaccacgacgccagcgccgcgaccaccaacaccggcgcccaccatcgcgtcgcagcccctgtccctgcgcccagaggcgtgccggccagcggcggggggcgcagtgcacacgagggggctggacttcgcctgtgacatctacatctgggcgcccttggccgggacttgtggggtccttctcctgtcactggttatcaccctttactgcaaacggggcagaaagaaactcctgtatatattcaaacaaccatttatgagaccagtacaaactactcaagaggaagatggctgtagctgccgatttccagaagaagaagaaggaggatgtgaactgagagtgaagttcagcaggagcgcagacgcccccgcgtaccagcagggccagaaccagctctataacgagctgaatctaggacgaagagaggagtacgatgttttggacaagagacgtggccgggaccctgagatggggggaaagccgagaaggaagaaccctcaggaaggcctgtacaatgaactgcagaaagataagatggcggaggcctacagtgagattgggatgaaaggcgagcgccggaggggcaaggggcacgatggcctttaccagggtctcagtacagccaccaaggacacctacgacgcccttcacatgcaggccctgccccctcgctctagaggatctggagcaacaaacttctcactactcaaacaagcaggtgacgtggaggagaatcccgggcctgggatccacatggccacttacgaggttctctgtgaggtggcgcggaaactgggcacggatgacagggaagtggtattgttcctcctaaacgtgttcatacctcaacccacactggcccaattaattggagctcttagagctttaaaggaggagggcaggttaacgtttcccctgttagcggaatgtctgtttcgtgcaggtcgcagagacctcttgcgcgacctgcttcacttagacccgcgttttttagagcgccacctagcgggcacaatgagttatttcagcccttatcagctcactgttctccacgtagacggggagctgtgtgcgagggatattaggtctttgatatttttaagcaaggacactatagggtctcgcagcacaccacagacattcttacactgggtgtactgtatggaaaacttagacctactgggtcccactgacgtggatgccctaatgtcaatgcttagatctttgtcaagagtagacctacagcgccaagtgcaaaccctaatgggccttcacctttccggcccatcacactcccaacactatcgccatacaccactcgagaccgatttctacgactacaaggacgacgatgacaagactagtggctccggcgagggcagaggaagtctactaacctgcggagatgtggaagaaaatcctggcccacatatgaccgagtacaagcccacggtgcgcctcgccacccgcgacgacgtccccagggccgtacgcaccctcgccgccgcgttcgccgactaccccgccacgcgccacaccgtcgatccggaccgccacatcgagcgggtcaccgagctgcaagaactcttcctcacgcgcgtcgggctcgacatcggcaaggtgtgggtcgcggacgacggcgccgcggtggcggtctggaccacgccggagagcgtcgaagcgggggcggtgttcgccgagatcggcccgcgcatggccgagttgagcggttcccggctggccgcgcagcaacagatggaaggcctcctggcgccgcaccggcccaaggagcccgcgtggttcctggccaccgtcggcgtctcgcccgaccaccagggcaagggtctgggcagcgccgtcgtgctccccggagtggaggcggccgagcgcgccggggtgcccgccttcctggagacctccgcgccccgcaacctccccttctacgagcggctcggcttcaccgtcaccgccgacgtcgaggtgcccgaaggaccgcgcacctggtgcatgacccgcaagcccggtgcctga

SEQ ID NO: 1352 - DNA, 2514 bp, Artificial Sequence
  Synthetic Polynucleotides
atggactggatttggcgcatccttttccttgtcggcgctgctaccggcgcccattccttcgaaagaagcgatctgggaaagaagctgctggaagctgccagagccggacaggatgatgaagtgcgcatcctgatggcaaacggcgcagatgtgaacgcaaaggacgagtacggcctgacccccctgtacctggctacagcccacgggcacctggaaattgtggaagtgctgctgaagaacggcgctgacgtgaacgccgtggacgccatcggctttaccccactgcatctggccgctttcatcgggcatctcgaaatcgcagaggtgctgctgaaacacggggccgatgtgaatgcccaggacaagttcggcaagaccgccttcgacatcagcatcggcaacggcaacgaggacctggccgagatcctgcagaaactgaacacgcgtgagcagaaactgatctcggaagaggatctggcgaagcccaccacgacgccagcgccgcgaccaccaacaccggcgcccaccatcgcgtcgcagcccctgtccctgcgcccagaggcgtgccggccagcggcggggggcgcagtgcacacgagggggctggacttcgcctgtgacatctacatctgggcgcccttggccgggacttgtggggtccttctcctgtcactggttatcaccctttactgcaaacggggcagaaagaaactcctgtatatattcaaacaaccatttatgagaccagtacaaactactcaagaggaagatggctgtagctgccgatttccagaagaagaagaaggaggatgtgaactgagagtgaagttcagcaggagcgcagacgcccccgcgtaccagcagggccagaaccagctctataacgagctgaatctaggacgaagagaggagtacgatgttttggacaagagacgtggccgggaccctgagatggggggaaagccgagaaggaagaaccctcaggaaggcctgtacaatgaactgcagaaagataagatggcggaggcctacagtgagattgggatgaaaggcgagcgccggaggggcaaggggcacgatggcctttaccagggtctcagtacagccaccaaggacacctacgacgcccttcacatgcaggccctgccccctcgctctagaggatctggagcaacaaacttctcactactcaaacaagcaggtgacgtggaggagaatcccgggcctgggatccacatggccacttacgaggttctctgtgaggtggcgcggaaactgggcacggatgacagggaagtggtattgttcctcctaaacgtgttcatacctcaacccacactggcccaattaattggagctcttagagctttaaaggaggagggcaggttaacgtttcccctgttagcggaatgtctgtttcgtgcaggtcgcagagacctcttgcgcgacctgcttcacttagacccgcgttttttagagcgccacctagcgggcacaatgagttatttcagcccttatcagctcactgttctccacgtagacggggagctgtgtgcgagggatattaggtctttgatatttttaagcaaggacactatagggtctcgcagcacaccacagacattcttacactgggtgtactgtatggaaaacttagacctactgggtcccactgacgtggatgccctaatgtcaatgcttagatctttgtcaagagtagacctacagcgccaagtgcaaaccctaatgggccttcacctttccggcccatcacactcccaacactatcgccatacaccactcgagaccgatttctacgactacaaggacgacgatgacaagactagtggctccggcgagggcagaggaagtctactaacctgcggagatgtggaagaaaatcctggcccacatatgaccgagtacaagcccacggtgcgcctcgccacccgcgacgacgtccccagggccgtacgcaccctcgccgccgcgttcgccgactaccccgccacgcgccacaccgtcgatccggaccgccacatcgagcgggtcaccgagctgcaagaactcttcctcacgcgcgtcgggctcgacatcggcaaggtgtgggtcgcggacgacggcgccgcggtggcggtctggaccacgccggagagcgtcgaagcgggggcggtgttcgccgagatcggcccgcgcatggccgagttgagcggttcccggctggccgcgcagcaacagatggaaggcctcctggcgccgcaccggcccaaggagcccgcgtggttcctggccaccgtcggcgtctcgcccgaccaccagggcaagggtctgggcagcgccgtcgtgctccccggagtggaggcggccgagcgcgccggggtgcccgccttcctggagacctccgcgccccgcaacctccccttctacgagcggctcggcttcaccgtcaccgccgacgtcgaggtgcccgaaggaccgcgcacctggtgcatgacccgcaagcccggtgcctga

SEQ ID NO: 1353 - DNA, 2970 bp, Artificial Sequence
  Synthetic Polynucleotides
atggccctgcccgtgacagccctgctgctgcctctggctctgctgctgcacgccgccagacccgatgaattcgaggtgcaactggtggaaagcggcggaggcctggtgcaggctggcggatctctgagactgagctgtgccgccagcggcatcaccttcagcatcaacacaatgggctggtacagacaggcccctggcaagcagagggaactggtggccctgatctccagcatcggcgacacctactacgccgacagcgtgaagggccggttcaccatcagccgggacaacgccaagaacaccgtgtacctccagatgaacagcctgaagcccgaggacaccgccgtgtactactgcaagcggttcagaacagccgcccagggcaccgattattggggccagggaacacaagtgaccgtgtcctctctcgagggaggaggcggctccgggggaggcggaagtggaggcggaggatctgggtctggaggaagcggatctggaggctcagggtcagggggctcaggcagtggaggctctttcgaagtgcaactggtggaatctgggggcggactggtgcagccaggcggaagtctgaggctgtcttgtgccgcctccggcagcatcttcggcttcaacgacatggcctggtatcggcaggctcccggaaaacagcgcgagctggtggctctgattagcagagtgggcgtgaccagcagcgccgactctgtgaagggcagattcacaatctccagagtgaacgccaaggatacagtgtacctccagatgaactctctgaaacctgaggatacagcagtgtactattgctacatggaccagcggctggacggcagcacactggcctactggggacagggaactcaagtgacagtgtctagcacgcgtgagcagaaactgatctcggaagaggatctggcgaagcccaccacgacgccagcgccgcgaccaccaacaccggcgcccaccatcgcgtcgcagcccctgtccctgcgcccagaggcgtgccggccagcggcggggggcgcagtgcacacgagggggctggacttcgcctgtgacatctacatctgggcgcccttggccgggacttgtggggtccttctcctgtcactggttatcaccctttactgcaaacggggcagaaagaaactcctgtatatattcaaacaaccatttatgagaccagtacaaactactcaagaggaagatggctgtagctgccgatttccagaagaagaagaaggaggatgtgaactgagagtgaagttcagcaggagcgcagacgcccccgcgtaccagcagggccagaaccagctctataacgagctgaatctaggacgaagagaggagtacgatgttttggacaagagacgtggccgggaccctgagatggggggaaagccgagaaggaagaaccctcaggaaggcctgtacaatgaactgcagaaagataagatggcggaggcctacagtgagattgggatgaaaggcgagcgccggaggggcaaggggcacgatggcctttaccagggtctcagtacagccaccaaggacacctacgacgcccttcacatgcaggccctgccccctcgctctagaggatctggagcaacaaacttctcactactcaaacaagcaggtgacgtggaggagaatcccgggcctgggatccacatggccacttacgaggttctctgtgaggtggcgcggaaactgggcacggatgacagggaagtggtattgttcctcctaaacgtgttcatacctcaacccacactggcccaattaattggagctcttagagctttaaaggaggagggcaggttaacgtttcccctgttagcggaatgtctgtttcgtgcaggtcgcagagacctcttgcgcgacctgcttcacttagacccgcgttttttagagcgccacctagcgggcacaatgagttatttcagcccttatcagctcactgttctccacgtagacggggagctgtgtgcgagggatattaggtctttgatatttttaagcaaggacactatagggtctcgcagcacaccacagacattcttacactgggtgtactgtatggaaaacttagacctactgggtcccactgacgtggatgccctaatgtcaatgcttagatctttgtcaagagtagacctacagcgccaagtgcaaaccctaatgggccttcacctttccggcccatcacactcccaacactatcgccatacaccactcgagaccgatttctacgactacaaggacgacgatgacaagactagtggctccggcgagggcagaggaagtctactaacctgcggagatgtggaagaaaatcctggcccacatatgaccgagtacaagcccacggtgcgcctcgccacccgcgacgacgtccccagggccgtacgcaccctcgccgccgcgttcgccgactaccccgccacgcgccacaccgtcgatccggaccgccacatcgagcgggtcaccgagctgcaagaactcttcctcacgcgcgtcgggctcgacatcggcaaggtgtgggtcgcggacgacggcgccgcggtggcggtctggaccacgccggagagcgtcgaagcgggggcggtgttcgccgagatcggcccgcgcatggccgagttgagcggttcccggctggccgcgcagcaacagatggaaggcctcctggcgccgcaccggcccaaggagcccgcgtggttcctggccaccgtcggcgtctcgcccgaccaccagggcaagggtctgggcagcgccgtcgtgctccccggagtggaggcggccgagcgcgccggggtgcccgccttcctggagacctccgcgccccgcaacctccccttctacgagcggctcggcttcaccgtcaccgccgacgtcgaggtgcccgaaggaccgcgcacctggtgcatgacccgcaagcccggtgcctga

SEQ ID NO: 1354 - DNA, 2862 bp, Artificial Sequence
  Synthetic Polynucleotides
atggccttaccagtgaccgccttgctcctgccgctggccttgctgctccacgccgccaggccggacatccagatgacccagagccccagcagcctgtctgccagcgtgggcgacagagtgaccatcacctgtagagccagccaggacgtgaacaccgccgtggcctggtatcagcagaagcctggcaaggcccccaagctgctgatctacagcgccagcttcctggaaagcggcgtgcccagcagattcagcggaagcagaagcggcaccgacttcaccctgaccatcagctccctccagcccgaggacttcgccacctactactgccagcagcactacaccacccctcccaccttcggccagaccaaggtggaaatcaagagaggcggaggcggaagtggaggcggaggatctggcggcggaggctctgaagtgcaactggtggaatctggcggcggactggtgcagcctggcggatctctgagactgagctgtgccgccagcggcttcaacatcaaggacacctacatccactgggtgcgccaggcccctggaaagggactggaatgggtggcccggatctaccccaccaacggctacaccagatacgccgacagcgtgaagggccggttcaccatcagcgccgacaccagcaagaataccgcctacctccagatgaacagcctgcgggccgaggataccgccgtgtactactgctcaagatggggaggcgacggcttctacgctatggacgtgtggggccagggcacccttgtgaccgtgtcatctacgcgtgagcagaaactgatctcggaagaggatctggcgaagcccaccacgacgccagcgccgcgaccaccaacaccggcgcccaccatcgcgtcgcagcccctgtccctgcgcccagaggcgtgccggccagcggcggggggcgcagtgcacacgagggggctggacttcgcctgtgacatctacatctgggcgcccttggccgggacttgtggggtccttctcctgtcactggttatcaccctttactgcaaacggggcagaaagaaactcctgtatatattcaaacaaccatttatgagaccagtacaaactactcaagaggaagatggctgtagctgccgatttccagaagaagaagaaggaggatgtgaactgagagtgaagttcagcaggagcgcagacgcccccgcgtaccagcagggccagaaccagctctataacgagctgaatctaggacgaagagaggagtacgatgttttggacaagagacgtggccgggaccctgagatggggggaaagccgagaaggaagaaccctcaggaaggcctgtacaatgaactgcagaaagataagatggcggaggcctacagtgagattgggatgaaaggcgagcgccggaggggcaaggggcacgatggcctttaccagggtctcagtacagccaccaaggacacctacgacgcccttcacatgcaggccctgccccctcgctctagaggatctggagcaacaaacttctcactactcaaacaagcaggtgacgtggaggagaatcccgggcctgggatccacatggccacttacgaggttctctgtgaggtggcgcggaaactgggcacggatgacagggaagtggtattgttcctcctaaacgtgttcatacctcaacccacactggcccaattaattggagctcttagagctttaaaggaggagggcaggttaacgtttcccctgttagcggaatgtctgtttcgtgcaggtcgcagagacctcttgcgcgacctgcttcacttagacccgcgttttttagagcgccacctagcgggcacaatgagttatttcagcccttatcagctcactgttctccacgtagacggggagctgtgtgcgagggatattaggtctttgatatttttaagcaaggacactatagggtctcgcagcacaccacagacattcttacactgggtgtactgtatggaaaacttagacctactgggtcccactgacgtggatgccctaatgtcaatgcttagatctttgtcaagagtagacctacagcgccaagtgcaaaccctaatgggccttcacctttccggcccatcacactcccaacactatcgccatacaccactcgagaccgatttctacgactacaaggacgacgatgacaagactagtggctccggcgagggcagaggaagtctactaacctgcggagatgtggaagaaaatcctggcccacatatgaccgagtacaagcccacggtgcgcctcgccacccgcgacgacgtccccagggccgtacgcaccctcgccgccgcgttcgccgactaccccgccacgcgccacaccgtcgatccggaccgccacatcgagcgggtcaccgagctgcaagaactcttcctcacgcgcgtcgggctcgacatcggcaaggtgtgggtcgcggacgacggcgccgcggtggcggtctggaccacgccggagagcgtcgaagcgggggcggtgttcgccgagatcggcccgcgcatggccgagttgagcggttcccggctggccgcgcagcaacagatggaaggcctcctggcgccgcaccggcccaaggagcccgcgtggttcctggccaccgtcggcgtctcgcccgaccaccagggcaagggtctgggcagcgccgtcgtgctccccggagtggaggcggccgagcgcgccggggtgcccgccttcctggagacctccgcgccccgcaacctccccttctacgagcggctcggcttcaccgtcaccgccgacgtcgaggtgcccgaaggaccgcgcacctggtgcatgacccgcaagcccggtgcctga

SEQ ID NO: 1355 - DNA, 2499 bp, Artificial Sequence
  Synthetic Polynucleotides
atggccctgcccgtgacagccctgctgctgcctctggctctgctgctgcacgccgccagacccgatgaattcgacgtgcaactcgtggaatccggcggaggcctggtgcagcctggcggatctctgagactgagctgtgccgccagcggctctatcggcggactgaatgccatggcctggtacagacaggcccctggcaaagaacgggaactggtggccggcatctttggcgtgggcagcaccagatacgccgacagcgtgaagggccggttcaccatcagccgggacaacagcaagaacaccgtgtacctgcagatgaacagcctgcggcccgaggataccgccgtgtactactgcagaatgtccagcgtgaccagaggctccagcgactactggggccagggaacacttgtgaccgtgtccagtacgcgtgagcagaaactgatctcggaagaggatctggcgaagcccaccacgacgccagcgccgcgaccaccaacaccggcgcccaccatcgcgtcgcagcccctgtccctgcgcccagaggcgtgccggccagcggcggggggcgcagtgcacacgagggggctggacttcgcctgtgacatctacatctgggcgcccttggccgggacttgtggggtccttctcctgtcactggttatcaccctttactgcaaacggggcagaaagaaactcctgtatatattcaaacaaccatttatgagaccagtacaaactactcaagaggaagatggctgtagctgccgatttccagaagaagaagaaggaggatgtgaactgagagtgaagttcagcaggagcgcagacgcccccgcgtaccagcagggccagaaccagctctataacgagctgaatctaggacgaagagaggagtacgatgttttggacaagagacgtggccgggaccctgagatggggggaaagccgagaaggaagaaccctcaggaaggcctgtacaatgaactgcagaaagataagatggcggaggcctacagtgagattgggatgaaaggcgagcgccggaggggcaaggggcacgatggcctttaccagggtctcagtacagccaccaaggacacctacgacgcccttcacatgcaggccctgccccctcgctctagaggatctggagcaacaaacttctcactactcaaacaagcaggtgacgtggaggagaatcccgggcctgggatccacatggccacttacgaggttctctgtgaggtggcgcggaaactgggcacggatgacagggaagtggtattgttcctcctaaacgtgttcatacctcaacccacactggcccaattaattggagctcttagagctttaaaggaggagggcaggttaacgtttcccctgttagcggaatgtctgtttcgtgcaggtcgcagagacctcttgcgcgacctgcttcacttagacccgcgttttttagagcgccacctagcgggcacaatgagttatttcagcccttatcagctcactgttctccacgtagacggggagctgtgtgcgagggatattaggtctttgatatttttaagcaaggacactatagggtctcgcagcacaccacagacattcttacactgggtgtactgtatggaaaacttagacctactgggtcccactgacgtggatgccctaatgtcaatgcttagatctttgtcaagagtagacctacagcgccaagtgcaaaccctaatgggccttcacctttccggcccatcacactcccaacactatcgccatacaccactcgagaccgatttctacgactacaaggacgacgatgacaagactagtggctccggcgagggcagaggaagtctactaacctgcggagatgtggaagaaaatcctggcccacatatgaccgagtacaagcccacggtgcgcctcgccacccgcgacgacgtccccagggccgtacgcaccctcgccgccgcgttcgccgactaccccgccacgcgccacaccgtcgatccggaccgccacatcgagcgggtcaccgagctgcaagaactcttcctcacgcgcgtcgggctcgacatcggcaaggtgtgggtcgcggacgacggcgccgcggtggcggtctggaccacgccggagagcgtcgaagcgggggcggtgttcgccgagatcggcccgcgcatggccgagttgagcggttcccggctggccgcgcagcaacagatggaaggcctcctggcgccgcaccggcccaaggagcccgcgtggttcctggccaccgtcggcgtctcgcccgaccaccagggcaagggtctgggcagcgccgtcgtgctccccggagtggaggcggccgagcgcgccggggtgcccgccttcctggagacctccgcgccccgcaacctccccttctacgagcggctcggcttcaccgtcaccgccgacgtcgaggtgcccgaaggaccgcgcacctggtgcatgacccgcaagcccggtgcctga

SEQ ID NO: 1356 - DNA, 2319 bp, Artificial Sequence
  Synthetic Polynucleotides
atggccctgcccgtgacagccctgctgctgcctctggctctgctgctgcacgccgccagacccgatgaattcgtggacaacaagttcaacaaagagcggtacagcgcctactacgagatttggcaactgcccaacctgaacgtgcggcagaaggccgccttcatcggatctctgcaggacgaccctagccagagcgccaatctgctggccgaggccaagaagctgaacgacgcccaggcccctaaaacgcgtgagcagaaactgatctcggaagaggatctggcgaagcccaccacgacgccagcgccgcgaccaccaacaccggcgcccaccatcgcgtcgcagcccctgtccctgcgcccagaggcgtgccggccagcggcggggggcgcagtgcacacgagggggctggacttcgcctgtgacatctacatctgggcgcccttggccgggacttgtggggtccttctcctgtcactggttatcaccctttactgcaaacggggcagaaagaaactcctgtatatattcaaacaaccatttatgagaccagtacaaactactcaagaggaagatggctgtagctgccgatttccagaagaagaagaaggaggatgtgaactgagagtgaagttcagcaggagcgcagacgcccccgcgtaccagcagggccagaaccagctctataacgagctgaatctaggacgaagagaggagtacgatgttttggacaagagacgtggccgggaccctgagatggggggaaagccgagaaggaagaaccctcaggaaggcctgtacaatgaactgcagaaagataagatggcggaggcctacagtgagattgggatgaaaggcgagcgccggaggggcaaggggcacgatggcctttaccagggtctcagtacagccaccaaggacacctacgacgcccttcacatgcaggccctgccccctcgctctagaggatctggagcaacaaacttctcactactcaaacaagcaggtgacgtggaggagaatcccgggcctgggatccacatggccacttacgaggttctctgtgaggtggcgcggaaactgggcacggatgacagggaagtggtattgttcctcctaaacgtgttcatacctcaacccacactggcccaattaattggagctcttagagctttaaaggaggagggcaggttaacgtttcccctgttagcggaatgtctgtttcgtgcaggtcgcagagacctcttgcgcgacctgcttcacttagacccgcgttttttagagcgccacctagcgggcacaatgagttatttcagcccttatcagctcactgttctccacgtagacggggagctgtgtgcgagggatattaggtctttgatatttttaagcaaggacactatagggtctcgcagcacaccacagacattcttacactgggtgtactgtatggaaaacttagacctactgggtcccactgacgtggatgccctaatgtcaatgcttagatctttgtcaagagtagacctacagcgccaagtgcaaaccctaatgggccttcacctttccggcccatcacactcccaacactatcgccatacaccactcgagaccgatttctacgactacaaggacgacgatgacaagactagtggctccggcgagggcagaggaagtctactaacctgcggagatgtggaagaaaatcctggcccacatatgaccgagtacaagcccacggtgcgcctcgccacccgcgacgacgtccccagggccgtacgcaccctcgccgccgcgttcgccgactaccccgccacgcgccacaccgtcgatccggaccgccacatcgagcgggtcaccgagctgcaagaactcttcctcacgcgcgtcgggctcgacatcggcaaggtgtgggtcgcggacgacggcgccgcggtggcggtctggaccacgccggagagcgtcgaagcgggggcggtgttcgccgagatcggcccgcgcatggccgagttgagcggttcccggctggccgcgcagcaacagatggaaggcctcctggcgccgcaccggcccaaggagcccgcgtggttcctggccaccgtcggcgtctcgcccgaccaccagggcaagggtctgggcagcgccgtcgtgctccccggagtggaggcggccgagcgcgccggggtgcccgccttcctggagacctccgcgccccgcaacctccccttctacgagcggctcggcttcaccgtcaccgccgacgtcgaggtgcccgaaggaccgcgcacctggtgcatgacccgcaagcccggtgcctga

SEQ ID NO: 1357 - DNA, 2985 bp, Artificial Sequence
  Synthetic Polynucleotides
atggccctgcccgtgacagccctgctgctgcctctggctctgctgctgcacgccgccagacccgatgaattcgacgtgcaactcgtggaatccggcggaggcctggtgcagcctggcggatctctgagactgagctgtgccgccagcggctctatcggcggactgaatgccatggcctggtacagacaggcccctggcaaagaacgggaactggtggccggcatctttggcgtgggcagcaccagatacgccgacagcgtgaagggccggttcaccatcagccgggacaacagcaagaacaccgtgtacctgcagatgaacagcctgcggcccgaggataccgccgtgtactactgcagaatgtccagcgtgaccagaggctccagcgactactggggccagggaacacttgtgaccgtgtccagtctcgagggaggaggcggctccgggggaggcggaagtggaggcggaggatctgggtctggaggaagcggatctggaggctcagggtcagggggctcaggcagtggaggctctttcgaagtgcaactggtggaatctggaggctctctggtgcagccagggggaagcctgagactgtcttgtgccgcttccggcttcaccttcgacgactacgccatgagctgggtgcgccaggtgccaggcaaaggcctggaatgggtgtccagcatcaactggagcggcacccacaccgattacgccgactccgtgaaaggcagattcacaatcagcagaaacaacgccaacaataccctgtacctgcagatgaactccctgaagtctgaggatacagcagtgtattattgcgccaagaactggcgggacgccggcaccacttggtttgagaaaagcggctctgccggacagggaacccaagtgacagtgtcctccacgcgtgagcagaaactgatctcggaagaggatctggcgaagcccaccacgacgccagcgccgcgaccaccaacaccggcgcccaccatcgcgtcgcagcccctgtccctgcgcccagaggcgtgccggccagcggcggggggcgcagtgcacacgagggggctggacttcgcctgtgacatctacatctgggcgcccttggccgggacttgtggggtccttctcctgtcactggttatcaccctttactgcaaacggggcagaaagaaactcctgtatatattcaaacaaccatttatgagaccagtacaaactactcaagaggaagatggctgtagctgccgatttccagaagaagaagaaggaggatgtgaactgagagtgaagttcagcaggagcgcagacgcccccgcgtaccagcagggccagaaccagctctataacgagctgaatctaggacgaagagaggagtacgatgttttggacaagagacgtggccgggaccctgagatggggggaaagccgagaaggaagaaccctcaggaaggcctgtacaatgaactgcagaaagataagatggcggaggcctacagtgagattgggatgaaaggcgagcgccggaggggcaaggggcacgatggcctttaccagggtctcagtacagccaccaaggacacctacgacgcccttcacatgcaggccctgccccctcgctctagaggatctggagcaacaaacttctcactactcaaacaagcaggtgacgtggaggagaatcccgggcctgggatccacatggccacttacgaggttctctgtgaggtggcgcggaaactgggcacggatgacagggaagtggtattgttcctcctaaacgtgttcatacctcaacccacactggcccaattaattggagctcttagagctttaaaggaggagggcaggttaacgtttcccctgttagcggaatgtctgtttcgtgcaggtcgcagagacctcttgcgcgacctgcttcacttagacccgcgttttttagagcgccacctagcgggcacaatgagttatttcagcccttatcagctcactgttctccacgtagacggggagctgtgtgcgagggatattaggtctttgatatttttaagcaaggacactatagggtctcgcagcacaccacagacattcttacactgggtgtactgtatggaaaacttagacctactgggtcccactgacgtggatgccctaatgtcaatgcttagatctttgtcaagagtagacctacagcgccaagtgcaaaccctaatgggccttcacctttccggcccatcacactcccaacactatcgccatacaccactcgagaccgatttctacgactacaaggacgacgatgacaagactagtggctccggcgagggcagaggaagtctactaacctgcggagatgtggaagaaaatcctggcccacatatgaccgagtacaagcccacggtgcgcctcgccacccgcgacgacgtccccagggccgtacgcaccctcgccgccgcgttcgccgactaccccgccacgcgccacaccgtcgatccggaccgccacatcgagcgggtcaccgagctgcaagaactcttcctcacgcgcgtcgggctcgacatcggcaaggtgtgggtcgcggacgacggcgccgcggtggcggtctggaccacgccggagagcgtcgaagcgggggcggtgttcgccgagatcggcccgcgcatggccgagttgagcggttcccggctggccgcgcagcaacagatggaaggcctcctggcgccgcaccggcccaaggagcccgcgtggttcctggccaccgtcggcgtctcgcccgaccaccagggcaagggtctgggcagcgccgtcgtgctccccggagtggaggcggccgagcgcgccggggtgcccgccttcctggagacctccgcgccccgcaacctccccttctacgagcggctcggcttcaccgtcaccgccgacgtcgaggtgcccgaaggaccgcgcacctggtgcatgacccgcaagcccggtgcctga

SEQ ID NO: 1358 - DNA, 2859 bp, Artificial Sequence
  Synthetic Polynucleotides
atggccttaccagtgaccgccttgctcctgccgctggccttgctgctccacgccgccaggccggaccagagcgtgctgacacagcctcctagcgtgtcagtggcccctggcaagaccgccagaatcccctgcgagggcaactacatcggcagcagcaacgtgcactggtatcagcagaagcccggccaggctcccgtgctcgtgatccacttcgacagcgacagacccagcggcatccccgacagattcagcggcagcaacagcggcaacatggctaccctgaccatcagcagagtggaagccggggacgaggccgactactactgtcaagtgtgggagaaccacggctgggtgttcggcggaggcaccaagctgacagtgctgtctggcggaggcggaagtggaggcggaggatctggcggcggaggctctgaggtgcaactggtggaaacaggcggcggactggtgcagcctggcgagtctctgagactgagctgtgccgccagcggcttcaccttcagcgactacgagatgaactgggtgcgccaggcccctggaaagggcctggaatgggtgtcctacatcagcagctccggcagcaccatctactacgccgacagcgtgaagggccggtttaccatctaccgggacaacgccaagaacagcctgtacctccagatgaactccctgcgggccgaggacaccgccctgtactattgtgccagagcctggggcgtgggaccccctgattattggggacagggcaccctcgtgaccgtgtcctctacgcgtgagcagaaactgatctcggaagaggatctggcgaagcccaccacgacgccagcgccgcgaccaccaacaccggcgcccaccatcgcgtcgcagcccctgtccctgcgcccagaggcgtgccggccagcggcggggggcgcagtgcacacgagggggctggacttcgcctgtgacatctacatctgggcgcccttggccgggacttgtggggtccttctcctgtcactggttatcaccctttactgcaaacggggcagaaagaaactcctgtatatattcaaacaaccatttatgagaccagtacaaactactcaagaggaagatggctgtagctgccgatttccagaagaagaagaaggaggatgtgaactgagagtgaagttcagcaggagcgcagacgcccccgcgtaccagcagggccagaaccagctctataacgagctgaatctaggacgaagagaggagtacgatgttttggacaagagacgtggccgggaccctgagatggggggaaagccgagaaggaagaaccctcaggaaggcctgtacaatgaactgcagaaagataagatggcggaggcctacagtgagattgggatgaaaggcgagcgccggaggggcaaggggcacgatggcctttaccagggtctcagtacagccaccaaggacacctacgacgcccttcacatgcaggccctgccccctcgctctagaggatctggagcaacaaacttctcactactcaaacaagcaggtgacgtggaggagaatcccgggcctgggatccacatggccacttacgaggttctctgtgaggtggcgcggaaactgggcacggatgacagggaagtggtattgttcctcctaaacgtgttcatacctcaacccacactggcccaattaattggagctcttagagctttaaaggaggagggcaggttaacgtttcccctgttagcggaatgtctgtttcgtgcaggtcgcagagacctcttgcgcgacctgcttcacttagacccgcgttttttagagcgccacctagcgggcacaatgagttatttcagcccttatcagctcactgttctccacgtagacggggagctgtgtgcgagggatattaggtctttgatatttttaagcaaggacactatagggtctcgcagcacaccacagacattcttacactgggtgtactgtatggaaaacttagacctactgggtcccactgacgtggatgccctaatgtcaatgcttagatctttgtcaagagtagacctacagcgccaagtgcaaaccctaatgggccttcacctttccggcccatcacactcccaacactatcgccatacaccactcgagaccgatttctacgactacaaggacgacgatgacaagactagtggctccggcgagggcagaggaagtctactaacctgcggagatgtggaagaaaatcctggcccacatatgaccgagtacaagcccacggtgcgcctcgccacccgcgacgacgtccccagggccgtacgcaccctcgccgccgcgttcgccgactaccccgccacgcgccacaccgtcgatccggaccgccacatcgagcgggtcaccgagctgcaagaactcttcctcacgcgcgtcgggctcgacatcggcaaggtgtgggtcgcggacgacggcgccgcggtggcggtctggaccacgccggagagcgtcgaagcgggggcggtgttcgccgagatcggcccgcgcatggccgagttgagcggttcccggctggccgcgcagcaacagatggaaggcctcctggcgccgcaccggcccaaggagcccgcgtggttcctggccaccgtcggcgtctcgcccgaccaccagggcaagggtctgggcagcgccgtcgtgctccccggagtggaggcggccgagcgcgccggggtgcccgccttcctggagacctccgcgccccgcaacctccccttctacgagcggctcggcttcaccgtcaccgccgacgtcgaggtgcccgaaggaccgcgcacctggtgcatgacccgcaagcccggtgcctga

SEQ ID NO: 1359 - DNA, 2883 bp, Artificial Sequence
  Synthetic Polynucleotides
atggccttaccagtgaccgccttgctcctgccgctggccttgctgctccacgccgccaggccggacatccagatgacccagagccccagcagcctgtctgccagcgtgggcgataccgtgaccatcacctgtcaggccaacggctacctgaactggtatcagcagcggagaggcaaggcccccaagctgctgatctacgacggcagcaagctggaaagaggcgtgcccagcagattcagcggcagaagatggggccaggagtacaacctgaccatcaacaacctccagcccgaggatattgccacatacttttgccaggtgtacgagttcgtggtgcccggcacacggctggacctgaagagaacagtggctgctcctggcggaggcggaagtggaggcggaggatctggcggcggaggctctcaggtgcagctgctccagtctggcgctgccgtgacaaagcctggcgcttctgtgcgggtgtcctgtgaagccagcggctacaacatccgggactacttcatccactggtggcggcaggctccaggccagggactccagtgggtgggatggatcaaccccaagaccggccagcccaacaaccccagacagttccagggcagagtgtccctgaccagacacgccagctgggacttcgacaccttcagcttctacatggatctgaaggccctgcggagcgacgataccgccgtgtacttctgcgccagacagagaagcgactactgggatttcgacgtgtggggcagcggcacccaagtgacagtgtctagcgccagcaccaagggacccacgcgtgagcagaaactgatctcggaagaggatctggcgaagcccaccacgacgccagcgccgcgaccaccaacaccggcgcccaccatcgcgtcgcagcccctgtccctgcgcccagaggcgtgccggccagcggcggggggcgcagtgcacacgagggggctggacttcgcctgtgacatctacatctgggcgcccttggccgggacttgtggggtccttctcctgtcactggttatcaccctttactgcaaacggggcagaaagaaactcctgtatatattcaaacaaccatttatgagaccagtacaaactactcaagaggaagatggctgtagctgccgatttccagaagaagaagaaggaggatgtgaactgagagtgaagttcagcaggagcgcagacgcccccgcgtaccagcagggccagaaccagctctataacgagctgaatctaggacgaagagaggagtacgatgttttggacaagagacgtggccgggaccctgagatggggggaaagccgagaaggaagaaccctcaggaaggcctgtacaatgaactgcagaaagataagatggcggaggcctacagtgagattgggatgaaaggcgagcgccggaggggcaaggggcacgatggcctttaccagggtctcagtacagccaccaaggacacctacgacgcccttcacatgcaggccctgccccctcgctctagaggatctggagcaacaaacttctcactactcaaacaagcaggtgacgtggaggagaatcccgggcctgggatccacatggccacttacgaggttctctgtgaggtggcgcggaaactgggcacggatgacagggaagtggtattgttcctcctaaacgtgttcatacctcaacccacactggcccaattaattggagctcttagagctttaaaggaggagggcaggttaacgtttcccctgttagcggaatgtctgtttcgtgcaggtcgcagagacctcttgcgcgacctgcttcacttagacccgcgttttttagagcgccacctagcgggcacaatgagttatttcagcccttatcagctcactgttctccacgtagacggggagctgtgtgcgagggatattaggtctttgatatttttaagcaaggacactatagggtctcgcagcacaccacagacattcttacactgggtgtactgtatggaaaacttagacctactgggtcccactgacgtggatgccctaatgtcaatgcttagatctttgtcaagagtagacctacagcgccaagtgcaaaccctaatgggccttcacctttccggcccatcacactcccaacactatcgccatacaccactcgagaccgatttctacgactacaaggacgacgatgacaagactagtggctccggcgagggcagaggaagtctactaacctgcggagatgtggaagaaaatcctggcccacatatgaccgagtacaagcccacggtgcgcctcgccacccgcgacgacgtccccagggccgtacgcaccctcgccgccgcgttcgccgactaccccgccacgcgccacaccgtcgatccggaccgccacatcgagcgggtcaccgagctgcaagaactcttcctcacgcgcgtcgggctcgacatcggcaaggtgtgggtcgcggacgacggcgccgcggtggcggtctggaccacgccggagagcgtcgaagcgggggcggtgttcgccgagatcggcccgcgcatggccgagttgagcggttcccggctggccgcgcagcaacagatggaaggcctcctggcgccgcaccggcccaaggagcccgcgtggttcctggccaccgtcggcgtctcgcccgaccaccagggcaagggtctgggcagcgccgtcgtgctccccggagtggaggcggccgagcgcgccggggtgcccgccttcctggagacctccgcgccccgcaacctccccttctacgagcggctcggcttcaccgtcaccgccgacgtcgaggtgcccgaaggaccgcgcacctggtgcatgacccgcaagcccggtgcctga

SEQ ID NO: 1360 - DNA, 2901 bp, Artificial Sequence
  Synthetic Polynucleotides
atggccttaccagtgaccgccttgctcctgccgctggccttgctgctccacgccgccaggccgcagtctgccctgacacagcctcctagcgcctctggctctcccggccagagcatcaccatcagctgtaccggcaccagcaacaacttcgtgtcctggtatcagcagcacgccggcaaggcccccaagctcgtgatctacgacgtgaacaagcggcccagcggcgtgcccgatagattcagcggcagcaagagcggcaacaccgccagcctgacagtgtctggcctccagaccgatgacgaggccgtgtactactgcggcagcctcgtgggcaactgggacgtgatctttggcggaggcaccaagctgaccgtgctgggcggaggcggaagtggaggcggaggatctggcggcggaggctctcagccccagctccaggaatctggccccacactggtggaagccagcgagacactgagcctgacctgtgccgtgtccggcgattctaccgccgcctgcaatagcttctggggctgggtgcgccagcctcctggaaagggactggaatgggtgggaagcctgagccactgcgccagctattggaaccggggctggacctaccacaaccccagcctgaagtccagactgaccctggccctggacacccccaagaacctggtgttcctgaagctgaacagcgtgacagccgccgacaccgccacctactactgtgccagatttggcggcgaggtgctgcggtacaccgactggcctaaacctgcctgggtggacctgtggggcagaggaacactcgtgaccgtgtccagcacgcgtgagcagaaactgatctcggaagaggatctggcgaagcccaccacgacgccagcgccgcgaccaccaacaccggcgcccaccatcgcgtcgcagcccctgtccctgcgcccagaggcgtgccggccagcggcggggggcgcagtgcacacgagggggctggacttcgcctgtgacatctacatctgggcgcccttggccgggacttgtggggtccttctcctgtcactggttatcaccctttactgcaaacggggcagaaagaaactcctgtatatattcaaacaaccatttatgagaccagtacaaactactcaagaggaagatggctgtagctgccgatttccagaagaagaagaaggaggatgtgaactgagagtgaagttcagcaggagcgcagacgcccccgcgtaccagcagggccagaaccagctctataacgagctgaatctaggacgaagagaggagtacgatgttttggacaagagacgtggccgggaccctgagatggggggaaagccgagaaggaagaaccctcaggaaggcctgtacaatgaactgcagaaagataagatggcggaggcctacagtgagattgggatgaaaggcgagcgccggaggggcaaggggcacgatggcctttaccagggtctcagtacagccaccaaggacacctacgacgcccttcacatgcaggccctgccccctcgctctagaggatctggagcaacaaacttctcactactcaaacaagcaggtgacgtggaggagaatcccgggcctgggatccacatggccacttacgaggttctctgtgaggtggcgcggaaactgggcacggatgacagggaagtggtattgttcctcctaaacgtgttcatacctcaacccacactggcccaattaattggagctcttagagctttaaaggaggagggcaggttaacgtttcccctgttagcggaatgtctgtttcgtgcaggtcgcagagacctcttgcgcgacctgcttcacttagacccgcgttttttagagcgccacctagcgggcacaatgagttatttcagcccttatcagctcactgttctccacgtagacggggagctgtgtgcgagggatattaggtctttgatatttttaagcaaggacactatagggtctcgcagcacaccacagacattcttacactgggtgtactgtatggaaaacttagacctactgggtcccactgacgtggatgccctaatgtcaatgcttagatctttgtcaagagtagacctacagcgccaagtgcaaaccctaatgggccttcacctttccggcccatcacactcccaacactatcgccatacaccactcgagaccgatttctacgactacaaggacgacgatgacaagactagtggctccggcgagggcagaggaagtctactaacctgcggagatgtggaagaaaatcctggcccacatatgaccgagtacaagcccacggtgcgcctcgccacccgcgacgacgtccccagggccgtacgcaccctcgccgccgcgttcgccgactaccccgccacgcgccacaccgtcgatccggaccgccacatcgagcgggtcaccgagctgcaagaactcttcctcacgcgcgtcgggctcgacatcggcaaggtgtgggtcgcggacgacggcgccgcggtggcggtctggaccacgccggagagcgtcgaagcgggggcggtgttcgccgagatcggcccgcgcatggccgagttgagcggttcccggctggccgcgcagcaacagatggaaggcctcctggcgccgcaccggcccaaggagcccgcgtggttcctggccaccgtcggcgtctcgcccgaccaccagggcaagggtctgggcagcgccgtcgtgctccccggagtggaggcggccgagcgcgccggggtgcccgccttcctggagacctccgcgccccgcaacctccccttctacgagcggctcggcttcaccgtcaccgccgacgtcgaggtgcccgaaggaccgcgcacctggtgcatgacccgcaagcccggtgcctga

SEQ ID NO: 1361 - DNA, 2856 bp, Artificial Sequence
  Synthetic Polynucleotides
atggccttaccagtgaccgccttgctcctgccgctggccttgctgctccacgccgccaggccggagatcgtgctgacacagagccctggcaccctgagcctgtctccaggcgagacagccatcatcagctgccggacaagccagtacggcagcctggcctggtatcagcagaggccaggacaggcccccagactcgtgatctacagcggcagcacaagagccgccggaatccccgatagattcagcggctccagatggggacccgactacaacctgaccatcagcaacctggaaagcggcgacttcggcgtgtactactgccagcagtacgagttcttcggccagggcaccaaggtgcaggtggacatcaaaagaggcggaggcggaagtggaggcggaggatctggcggcggaggctctcaggtgcagctggtgcagtctggcggccagatgaagaaacccggcgagagcatgagaatcagctgtcgggcctccggctacgagttcatcgactgcaccctgaactggatcagactggcccctggcaagcggcctgagtggatgggatggctgaagcctagaggcggagccgtgaactacgccagacctctccagggcagagtgaccatgaccagggacgtgtacagcgataccgccttcctggaactgcggagcctgaccgtggatgataccgccgtgtacttctgcaccagaggcaagaactgcgattacaactgggacttcgagcactggggcagaggcacccctgtgatcgtgtctagcacgcgtgagcagaaactgatctcggaagaggatctggcgaagcccaccacgacgccagcgccgcgaccaccaacaccggcgcccaccatcgcgtcgcagcccctgtccctgcgcccagaggcgtgccggccagcggcggggggcgcagtgcacacgagggggctggacttcgcctgtgacatctacatctgggcgcccttggccgggacttgtggggtccttctcctgtcactggttatcaccctttactgcaaacggggcagaaagaaactcctgtatatattcaaacaaccatttatgagaccagtacaaactactcaagaggaagatggctgtagctgccgatttccagaagaagaagaaggaggatgtgaactgagagtgaagttcagcaggagcgcagacgcccccgcgtaccagcagggccagaaccagctctataacgagctgaatctaggacgaagagaggagtacgatgttttggacaagagacgtggccgggaccctgagatggggggaaagccgagaaggaagaaccctcaggaaggcctgtacaatgaactgcagaaagataagatggcggaggcctacagtgagattgggatgaaaggcgagcgccggaggggcaaggggcacgatggcctttaccagggtctcagtacagccaccaaggacacctacgacgcccttcacatgcaggccctgccccctcgctctagaggatctggagcaacaaacttctcactactcaaacaagcaggtgacgtggaggagaatcccgggcctgggatccacatggccacttacgaggttctctgtgaggtggcgcggaaactgggcacggatgacagggaagtggtattgttcctcctaaacgtgttcatacctcaacccacactggcccaattaattggagctcttagagctttaaaggaggagggcaggttaacgtttcccctgttagcggaatgtctgtttcgtgcaggtcgcagagacctcttgcgcgacctgcttcacttagacccgcgttttttagagcgccacctagcgggcacaatgagttatttcagcccttatcagctcactgttctccacgtagacggggagctgtgtgcgagggatattaggtctttgatatttttaagcaaggacactatagggtctcgcagcacaccacagacattcttacactgggtgtactgtatggaaaacttagacctactgggtcccactgacgtggatgccctaatgtcaatgcttagatctttgtcaagagtagacctacagcgccaagtgcaaaccctaatgggccttcacctttccggcccatcacactcccaacactatcgccatacaccactcgagaccgatttctacgactacaaggacgacgatgacaagactagtggctccggcgagggcagaggaagtctactaacctgcggagatgtggaagaaaatcctggcccacatatgaccgagtacaagcccacggtgcgcctcgccacccgcgacgacgtccccagggccgtacgcaccctcgccgccgcgttcgccgactaccccgccacgcgccacaccgtcgatccggaccgccacatcgagcgggtcaccgagctgcaagaactcttcctcacgcgcgtcgggctcgacatcggcaaggtgtgggtcgcggacgacggcgccgcggtggcggtctggaccacgccggagagcgtcgaagcgggggcggtgttcgccgagatcggcccgcgcatggccgagttgagcggttcccggctggccgcgcagcaacagatggaaggcctcctggcgccgcaccggcccaaggagcccgcgtggttcctggccaccgtcggcgtctcgcccgaccaccagggcaagggtctgggcagcgccgtcgtgctccccggagtggaggcggccgagcgcgccggggtgcccgccttcctggagacctccgcgccccgcaacctccccttctacgagcggctcggcttcaccgtcaccgccgacgtcgaggtgcccgaaggaccgcgcacctggtgcatgacccgcaagcccggtgcctga

SEQ ID NO: 1362 - DNA, 2886 bp, Artificial Sequence
  Synthetic Polynucleotides
atggccttaccagtgaccgccttgctcctgccgctggccttgctgctccacgccgccaggccggagctggtgctgacacagagccctggcaccctgtctctgtctgccggcgaaagagccaccctgagctgtagagccagccagagcgtgtcctctggcagcctggcttggtatcagcagaagccaggccaggcccccagactgctgatctacggcgcttctaccagagccaccggcatccccgatagattcagcggctctggctccggcaccgacttcaccctgacaatcggcagactggaacccgaggacctggccgtgtactactgccagcagtacggcaccagcccctacacattcggccagggcaccaagctggaaatcggcggaggcggaagtggaggcggaggatctggcggcggaggctctctggaacagagcggagccgaagtgaagaaacccggcagcagcgtgcaggtgtcctgcaaagcaagcggcggcaccttctctatgtacggcttcaactgggtgcgccaggctcctggacacggcctggaatggatgggcggcatcatccccatcttcggcacctccaactacgcccagaaattccggggcagagtgaccttcaccgccgaccaggccacaagcaccgcctacatggaactgaccaacctgcggagcgacgacaccgccgtgtattattgcgccagagacttcggccccgactgggaggatggcgacagctacgatggcagcggcagaggcttcttcgacttctggggccagggaacccttgtgaccgtgtcctcaacgcgtgagcagaaactgatctcggaagaggatctggcgaagcccaccacgacgccagcgccgcgaccaccaacaccggcgcccaccatcgcgtcgcagcccctgtccctgcgcccagaggcgtgccggccagcggcggggggcgcagtgcacacgagggggctggacttcgcctgtgacatctacatctgggcgcccttggccgggacttgtggggtccttctcctgtcactggttatcaccctttactgcaaacggggcagaaagaaactcctgtatatattcaaacaaccatttatgagaccagtacaaactactcaagaggaagatggctgtagctgccgatttccagaagaagaagaaggaggatgtgaactgagagtgaagttcagcaggagcgcagacgcccccgcgtaccagcagggccagaaccagctctataacgagctgaatctaggacgaagagaggagtacgatgttttggacaagagacgtggccgggaccctgagatggggggaaagccgagaaggaagaaccctcaggaaggcctgtacaatgaactgcagaaagataagatggcggaggcctacagtgagattgggatgaaaggcgagcgccggaggggcaaggggcacgatggcctttaccagggtctcagtacagccaccaaggacacctacgacgcccttcacatgcaggccctgccccctcgctctagaggatctggagcaacaaacttctcactactcaaacaagcaggtgacgtggaggagaatcccgggcctgggatccacatggccacttacgaggttctctgtgaggtggcgcggaaactgggcacggatgacagggaagtggtattgttcctcctaaacgtgttcatacctcaacccacactggcccaattaattggagctcttagagctttaaaggaggagggcaggttaacgtttcccctgttagcggaatgtctgtttcgtgcaggtcgcagagacctcttgcgcgacctgcttcacttagacccgcgttttttagagcgccacctagcgggcacaatgagttatttcagcccttatcagctcactgttctccacgtagacggggagctgtgtgcgagggatattaggtctttgatatttttaagcaaggacactatagggtctcgcagcacaccacagacattcttacactgggtgtactgtatggaaaacttagacctactgggtcccactgacgtggatgccctaatgtcaatgcttagatctttgtcaagagtagacctacagcgccaagtgcaaaccctaatgggccttcacctttccggcccatcacactcccaacactatcgccatacaccactcgagaccgatttctacgactacaaggacgacgatgacaagactagtggctccggcgagggcagaggaagtctactaacctgcggagatgtggaagaaaatcctggcccacatatgaccgagtacaagcccacggtgcgcctcgccacccgcgacgacgtccccagggccgtacgcaccctcgccgccgcgttcgccgactaccccgccacgcgccacaccgtcgatccggaccgccacatcgagcgggtcaccgagctgcaagaactcttcctcacgcgcgtcgggctcgacatcggcaaggtgtgggtcgcggacgacggcgccgcggtggcggtctggaccacgccggagagcgtcgaagcgggggcggtgttcgccgagatcggcccgcgcatggccgagttgagcggttcccggctggccgcgcagcaacagatggaaggcctcctggcgccgcaccggcccaaggagcccgcgtggttcctggccaccgtcggcgtctcgcccgaccaccagggcaagggtctgggcagcgccgtcgtgctccccggagtggaggcggccgagcgcgccggggtgcccgccttcctggagacctccgcgccccgcaacctccccttctacgagcggctcggcttcaccgtcaccgccgacgtcgaggtgcccgaaggaccgcgcacctggtgcatgacccgcaagcccggtgcctga

SEQ ID NO: 1363 - DNA, 2874 bp, Artificial Sequence
  Synthetic Polynucleotides
atggccttaccagtgaccgccttgctcctgccgctggccttgctgctccacgccgccaggccggacgtggtcatgacacagagcccttctagcctgtctgccagcgtgggcgacagagtgacaatcacctgtcagagcagcctggacatcagccactacctgaactggtatcagcagaagcccggcaaggcccctaagctgctgatctacgacgccagcaatctggaaaccggcgtgcccagcagattttctggcagcggaagcggcacccacttcaccttcacaatatccagcctccagcctgaggacttcgccacctactactgccagcagtacgacaacctgcctctgacctttggcggaggcaccaagctggaaatcaagagaggcggaggcggaagtggaggcggaggatctggcggcggaggctctcaagttcaactggttcaatcaggcggaggcgtggtgcaacctggtggctctctgagagtgtcttgtgctgcctctggcgtgaccctgagcgactatggaatgcactgggtccgacaggcccctggcaaaggacttgagtgggtcgccttcatcagaaacgacggcagcgacaagtattacgccgacagcgtgaagggcagattcaccatcagccgggacaacagcgagaaaaccgtgtctctccagatgtctagcctgagagccgaggacaccgccgtgtactactgtgccaagaatggcgagagcggccctctggactactggtatctggatctgtggggcagaggcaccctggtcacagtctcttctacgcgtgagcagaaactgatctcggaagaggatctggcgaagcccaccacgacgccagcgccgcgaccaccaacaccggcgcccaccatcgcgtcgcagcccctgtccctgcgcccagaggcgtgccggccagcggcggggggcgcagtgcacacgagggggctggacttcgcctgtgacatctacatctgggcgcccttggccgggacttgtggggtccttctcctgtcactggttatcaccctttactgcaaacggggcagaaagaaactcctgtatatattcaaacaaccatttatgagaccagtacaaactactcaagaggaagatggctgtagctgccgatttccagaagaagaagaaggaggatgtgaactgagagtgaagttcagcaggagcgcagacgcccccgcgtaccagcagggccagaaccagctctataacgagctgaatctaggacgaagagaggagtacgatgttttggacaagagacgtggccgggaccctgagatggggggaaagccgagaaggaagaaccctcaggaaggcctgtacaatgaactgcagaaagataagatggcggaggcctacagtgagattgggatgaaaggcgagcgccggaggggcaaggggcacgatggcctttaccagggtctcagtacagccaccaaggacacctacgacgcccttcacatgcaggccctgccccctcgctctagaggatctggagcaacaaacttctcactactcaaacaagcaggtgacgtggaggagaatcccgggcctgggatccacatggccacttacgaggttctctgtgaggtggcgcggaaactgggcacggatgacagggaagtggtattgttcctcctaaacgtgttcatacctcaacccacactggcccaattaattggagctcttagagctttaaaggaggagggcaggttaacgtttcccctgttagcggaatgtctgtttcgtgcaggtcgcagagacctcttgcgcgacctgcttcacttagacccgcgttttttagagcgccacctagcgggcacaatgagttatttcagcccttatcagctcactgttctccacgtagacggggagctgtgtgcgagggatattaggtctttgatatttttaagcaaggacactatagggtctcgcagcacaccacagacattcttacactgggtgtactgtatggaaaacttagacctactgggtcccactgacgtggatgccctaatgtcaatgcttagatctttgtcaagagtagacctacagcgccaagtgcaaaccctaatgggccttcacctttccggcccatcacactcccaacactatcgccatacaccactcgagaccgatttctacgactacaaggacgacgatgacaagactagtggctccggcgagggcagaggaagtctactaacctgcggagatgtggaagaaaatcctggcccacatatgaccgagtacaagcccacggtgcgcctcgccacccgcgacgacgtccccagggccgtacgcaccctcgccgccgcgttcgccgactaccccgccacgcgccacaccgtcgatccggaccgccacatcgagcgggtcaccgagctgcaagaactcttcctcacgcgcgtcgggctcgacatcggcaaggtgtgggtcgcggacgacggcgccgcggtggcggtctggaccacgccggagagcgtcgaagcgggggcggtgttcgccgagatcggcccgcgcatggccgagttgagcggttcccggctggccgcgcagcaacagatggaaggcctcctggcgccgcaccggcccaaggagcccgcgtggttcctggccaccgtcggcgtctcgcccgaccaccagggcaagggtctgggcagcgccgtcgtgctccccggagtggaggcggccgagcgcgccggggtgcccgccttcctggagacctccgcgccccgcaacctccccttctacgagcggctcggcttcaccgtcaccgccgacgtcgaggtgcccgaaggaccgcgcacctggtgcatgacccgcaagcccggtgcctga

SEQ ID NO: 1364 - DNA, 2874 bp, Artificial Sequence
  Synthetic Polynucleotides
atggccttaccagtgaccgccttgctcctgccgctggccttgctgctccacgccgccaggccggacgacatcgtgatgacccagagccaggacagcatggctaccagcgtgggcgagcgcgtgaccgtgaattgcaaggccagccagaacgtggacaccaacgtggcctggtatcagcagaagcccggccagtctcctgagcccctgctgttcagcgccagctacagatacaccggcgtgcccgacagattcagcggcagcggctctggcaccgacttcaccctgacaatcagcagcgtgcaggccgaggacgtggccgagtatttctgccagcagtacaacagctaccccctgaccttcggccagggcaccaagctggaaatcaagagaggcggaggcggaagtggaggcggaggatctggcggcggaggctctgaagtgcaggtggaagtgtctggcggcggactggtgcagcctggcggatctatgagactgagctgtgccgtgtccggcttcaccttcagcaactactggatgaactgggtgcgccagtcccccgagaagggcctggaatggatcgccgagatccggctgaagtccaacaacttcgcccggtactacgccgagagcgtgaagggcagattcaccatcagccgggacaacagcaagaacagcctgtacctccagatgatctccctgagagccgaggacaccgccatctactactgcaccagctacggcaactacgtgggccactacttcgaccactggggccagggaacactgctgaccgtgtctagcacgcgtgagcagaaactgatctcggaagaggatctggcgaagcccaccacgacgccagcgccgcgaccaccaacaccggcgcccaccatcgcgtcgcagcccctgtccctgcgcccagaggcgtgccggccagcggcggggggcgcagtgcacacgagggggctggacttcgcctgtgacatctacatctgggcgcccttggccgggacttgtggggtccttctcctgtcactggttatcaccctttactgcaaacggggcagaaagaaactcctgtatatattcaaacaaccatttatgagaccagtacaaactactcaagaggaagatggctgtagctgccgatttccagaagaagaagaaggaggatgtgaactgagagtgaagttcagcaggagcgcagacgcccccgcgtaccagcagggccagaaccagctctataacgagctgaatctaggacgaagagaggagtacgatgttttggacaagagacgtggccgggaccctgagatggggggaaagccgagaaggaagaaccctcaggaaggcctgtacaatgaactgcagaaagataagatggcggaggcctacagtgagattgggatgaaaggcgagcgccggaggggcaaggggcacgatggcctttaccagggtctcagtacagccaccaaggacacctacgacgcccttcacatgcaggccctgccccctcgctctagaggatctggagcaacaaacttctcactactcaaacaagcaggtgacgtggaggagaatcccgggcctgggatccacatggccacttacgaggttctctgtgaggtggcgcggaaactgggcacggatgacagggaagtggtattgttcctcctaaacgtgttcatacctcaacccacactggcccaattaattggagctcttagagctttaaaggaggagggcaggttaacgtttcccctgttagcggaatgtctgtttcgtgcaggtcgcagagacctcttgcgcgacctgcttcacttagacccgcgttttttagagcgccacctagcgggcacaatgagttatttcagcccttatcagctcactgttctccacgtagacggggagctgtgtgcgagggatattaggtctttgatatttttaagcaaggacactatagggtctcgcagcacaccacagacattcttacactgggtgtactgtatggaaaacttagacctactgggtcccactgacgtggatgccctaatgtcaatgcttagatctttgtcaagagtagacctacagcgccaagtgcaaaccctaatgggccttcacctttccggcccatcacactcccaacactatcgccatacaccactcgagaccgatttctacgactacaaggacgacgatgacaagactagtggctccggcgagggcagaggaagtctactaacctgcggagatgtggaagaaaatcctggcccacatatgaccgagtacaagcccacggtgcgcctcgccacccgcgacgacgtccccagggccgtacgcaccctcgccgccgcgttcgccgactaccccgccacgcgccacaccgtcgatccggaccgccacatcgagcgggtcaccgagctgcaagaactcttcctcacgcgcgtcgggctcgacatcggcaaggtgtgggtcgcggacgacggcgccgcggtggcggtctggaccacgccggagagcgtcgaagcgggggcggtgttcgccgagatcggcccgcgcatggccgagttgagcggttcccggctggccgcgcagcaacagatggaaggcctcctggcgccgcaccggcccaaggagcccgcgtggttcctggccaccgtcggcgtctcgcccgaccaccagggcaagggtctgggcagcgccgtcgtgctccccggagtggaggcggccgagcgcgccggggtgcccgccttcctggagacctccgcgccccgcaacctccccttctacgagcggctcggcttcaccgtcaccgccgacgtcgaggtgcccgaaggaccgcgcacctggtgcatgacccgcaagcccggtgcctga

SEQ ID NO: 1365 - DNA, 2886 bp, Artificial Sequence
  Synthetic Polynucleotides
atggccttaccagtgaccgccttgctcctgccgctggccttgctgctccacgccgccaggccgagctacgagctgacacagcctccatccgtgtctggcacacctggacagagagtggctatctcctgtagcggcagcagcagcaacatcggcaccagaatggtcacctggtatcagcacgtgccaggcacagcccctaagctgctgatcttcaacaacaaccagcggcctagcggcgtgcccgatagattttctgccagcaagagcggcacaagcgccagcctggctatcatcggactccagtctgacgacgaggccgactactactgtgccacctgggacgacaacgtgaagtcctacgtgttcggcaccggcaccaaagtgacagtgcttggaagtagaggcggaggcggaagtggaggcggaggatctggcggcggaggctctcttgaaatggcccaggttcagctccagcagtggggagctggactgctgaagcctagcgagacactgagcctgacctgtgctgtgtacggcggcagcttcagcggctactactggtcctggatcagacagcctcctggcaaaggactggaatggatcggcgagatcaaccacagcggctccaccaactacaaccccagcctgaagtccagagtgaccatcagcgtggacaccagcaagaaccagttctccctgaagctgagcagcgtgacagccgctgataccgccgtgtactattgcgctagagcccctcagtcttggtacgtgggagatgtgtggggccagggcacactggttacagtgtcatctacgcgtgagcagaaactgatctcggaagaggatctggcgaagcccaccacgacgccagcgccgcgaccaccaacaccggcgcccaccatcgcgtcgcagcccctgtccctgcgcccagaggcgtgccggccagcggcggggggcgcagtgcacacgagggggctggacttcgcctgtgacatctacatctgggcgcccttggccgggacttgtggggtccttctcctgtcactggttatcaccctttactgcaaacggggcagaaagaaactcctgtatatattcaaacaaccatttatgagaccagtacaaactactcaagaggaagatggctgtagctgccgatttccagaagaagaagaaggaggatgtgaactgagagtgaagttcagcaggagcgcagacgcccccgcgtaccagcagggccagaaccagctctataacgagctgaatctaggacgaagagaggagtacgatgttttggacaagagacgtggccgggaccctgagatggggggaaagccgagaaggaagaaccctcaggaaggcctgtacaatgaactgcagaaagataagatggcggaggcctacagtgagattgggatgaaaggcgagcgccggaggggcaaggggcacgatggcctttaccagggtctcagtacagccaccaaggacacctacgacgcccttcacatgcaggccctgccccctcgctctagaggatctggagcaacaaacttctcactactcaaacaagcaggtgacgtggaggagaatcccgggcctgggatccacatggccacttacgaggttctctgtgaggtggcgcggaaactgggcacggatgacagggaagtggtattgttcctcctaaacgtgttcatacctcaacccacactggcccaattaattggagctcttagagctttaaaggaggagggcaggttaacgtttcccctgttagcggaatgtctgtttcgtgcaggtcgcagagacctcttgcgcgacctgcttcacttagacccgcgttttttagagcgccacctagcgggcacaatgagttatttcagcccttatcagctcactgttctccacgtagacggggagctgtgtgcgagggatattaggtctttgatatttttaagcaaggacactatagggtctcgcagcacaccacagacattcttacactgggtgtactgtatggaaaacttagacctactgggtcccactgacgtggatgccctaatgtcaatgcttagatctttgtcaagagtagacctacagcgccaagtgcaaaccctaatgggccttcacctttccggcccatcacactcccaacactatcgccatacaccactcgagaccgatttctacgactacaaggacgacgatgacaagactagtggctccggcgagggcagaggaagtctactaacctgcggagatgtggaagaaaatcctggcccacatatgaccgagtacaagcccacggtgcgcctcgccacccgcgacgacgtccccagggccgtacgcaccctcgccgccgcgttcgccgactaccccgccacgcgccacaccgtcgatccggaccgccacatcgagcgggtcaccgagctgcaagaactcttcctcacgcgcgtcgggctcgacatcggcaaggtgtgggtcgcggacgacggcgccgcggtggcggtctggaccacgccggagagcgtcgaagcgggggcggtgttcgccgagatcggcccgcgcatggccgagttgagcggttcccggctggccgcgcagcaacagatggaaggcctcctggcgccgcaccggcccaaggagcccgcgtggttcctggccaccgtcggcgtctcgcccgaccaccagggcaagggtctgggcagcgccgtcgtgctccccggagtggaggcggccgagcgcgccggggtgcccgccttcctggagacctccgcgccccgcaacctccccttctacgagcggctcggcttcaccgtcaccgccgacgtcgaggtgcccgaaggaccgcgcacctggtgcatgacccgcaagcccggtgcctga

SEQ ID NO: 1366 - DNA, 2877 bp, Artificial Sequence
  Synthetic Polynucleotides
atggccttaccagtgaccgccttgctcctgccgctggccttgctgctccacgccgccaggccgcagtctgtgctgacacagcctcctagcctgtctgtggcccctggaaagacagccagcatcacatgcggcggcaacaacatcggcatgaagtccgtgcactggtatcagcagaggccaggacaggctcctgtgctggtcatctactacgacagcgacagaccctctggcatccccggcagattttccggcagcaactctggcaataccgccacactgaccatctccagagtggaagctggcgacgaggccgactactactgccaagtgtgggataccaccggcgatcaccctggctatgtgtttggcaccggcaccaaagtgacagtgcttggcggaggcggaagtggaggcggaggatctggcggcggaggctctcaagttcaactggttcagagcggagccgaagtgaagaaacctggcagcagcgtgaaggtgtcctgcaaagcaagcggcggcacctttagcagctacgccatctcttgggtccgacaggcacctggacaaggactggaatggatgggcggcatcatccccatcttcggcacagccaattacgcccagaaattccagggcagagtgaccatcaccgccgacgagtctacaagcaccgcctacatggaactgagcagcctgagaagcgaggacaccgccgtgtactattgtgccagaggcgtgtacggctacagcggctctgccccttatgatgagtggggccagggaaccctggtcaccgtttcttctacgcgtgagcagaaactgatctcggaagaggatctggcgaagcccaccacgacgccagcgccgcgaccaccaacaccggcgcccaccatcgcgtcgcagcccctgtccctgcgcccagaggcgtgccggccagcggcggggggcgcagtgcacacgagggggctggacttcgcctgtgacatctacatctgggcgcccttggccgggacttgtggggtccttctcctgtcactggttatcaccctttactgcaaacggggcagaaagaaactcctgtatatattcaaacaaccatttatgagaccagtacaaactactcaagaggaagatggctgtagctgccgatttccagaagaagaagaaggaggatgtgaactgagagtgaagttcagcaggagcgcagacgcccccgcgtaccagcagggccagaaccagctctataacgagctgaatctaggacgaagagaggagtacgatgttttggacaagagacgtggccgggaccctgagatggggggaaagccgagaaggaagaaccctcaggaaggcctgtacaatgaactgcagaaagataagatggcggaggcctacagtgagattgggatgaaaggcgagcgccggaggggcaaggggcacgatggcctttaccagggtctcagtacagccaccaaggacacctacgacgcccttcacatgcaggccctgccccctcgctctagaggatctggagcaacaaacttctcactactcaaacaagcaggtgacgtggaggagaatcccgggcctgggatccacatggccacttacgaggttctctgtgaggtggcgcggaaactgggcacggatgacagggaagtggtattgttcctcctaaacgtgttcatacctcaacccacactggcccaattaattggagctcttagagctttaaaggaggagggcaggttaacgtttcccctgttagcggaatgtctgtttcgtgcaggtcgcagagacctcttgcgcgacctgcttcacttagacccgcgttttttagagcgccacctagcgggcacaatgagttatttcagcccttatcagctcactgttctccacgtagacggggagctgtgtgcgagggatattaggtctttgatatttttaagcaaggacactatagggtctcgcagcacaccacagacattcttacactgggtgtactgtatggaaaacttagacctactgggtcccactgacgtggatgccctaatgtcaatgcttagatctttgtcaagagtagacctacagcgccaagtgcaaaccctaatgggccttcacctttccggcccatcacactcccaacactatcgccatacaccactcgagaccgatttctacgactacaaggacgacgatgacaagactagtggctccggcgagggcagaggaagtctactaacctgcggagatgtggaagaaaatcctggcccacatatgaccgagtacaagcccacggtgcgcctcgccacccgcgacgacgtccccagggccgtacgcaccctcgccgccgcgttcgccgactaccccgccacgcgccacaccgtcgatccggaccgccacatcgagcgggtcaccgagctgcaagaactcttcctcacgcgcgtcgggctcgacatcggcaaggtgtgggtcgcggacgacggcgccgcggtggcggtctggaccacgccggagagcgtcgaagcgggggcggtgttcgccgagatcggcccgcgcatggccgagttgagcggttcccggctggccgcgcagcaacagatggaaggcctcctggcgccgcaccggcccaaggagcccgcgtggttcctggccaccgtcggcgtctcgcccgaccaccagggcaagggtctgggcagcgccgtcgtgctccccggagtggaggcggccgagcgcgccggggtgcccgccttcctggagacctccgcgccccgcaacctccccttctacgagcggctcggcttcaccgtcaccgccgacgtcgaggtgcccgaaggaccgcgcacctggtgcatgacccgcaagcccggtgcctga

SEQ ID NO: 1367 - DNA, 2895 bp, Artificial Sequence
  Synthetic Polynucleotides
atggccttaccagtgaccgccttgctcctgccgctggccttgctgctccacgccgccaggccggacgagatcgtgctgacccagagccctctgagcctgcctgtgacacctggcgagcctgccagcatctcctgtagaagcagccagagcctgctgcacagcaacggctacaactacctggactggtatctccagaagcccggccagagcccccaactgctgatctacctgggcagcaacagagccagcggcgtgcccgatagattttccggcagcggctccggcaccgacttcaccctgaagatcagccgggtggaagccgaggacgtgggcgtgtactactgtatgcaggccctccagaccccccggacctttggacagggcaccaaggtggaaatcaagcggggcggaggcggaagtggaggcggaggatctggcggcggaggctctcaggtgcaactggtgcagtctggcggcggagtggtgcagcctggaagaagcctgagactgagctgtgccgccagcggcttcaccttcagcagctacggaatgcactgggtgcgccaggcccctggcaaaggactggaatgggtggccgtgatctcctacgacggctccaacaagtattacgccgacagcgtgaagggccggttcaccatctccagagacaacagcaagaacaccctgtacctccagatgaacagcctgcgggccgaggacaccgccgtgtactattgcgccagagacttcgactacggcgacagctactactactatggcatggacgtgtggggccagggcacaaccgtgaccgtgtcatctacgcgtgagcagaaactgatctcggaagaggatctggcgaagcccaccacgacgccagcgccgcgaccaccaacaccggcgcccaccatcgcgtcgcagcccctgtccctgcgcccagaggcgtgccggccagcggcggggggcgcagtgcacacgagggggctggacttcgcctgtgacatctacatctgggcgcccttggccgggacttgtggggtccttctcctgtcactggttatcaccctttactgcaaacggggcagaaagaaactcctgtatatattcaaacaaccatttatgagaccagtacaaactactcaagaggaagatggctgtagctgccgatttccagaagaagaagaaggaggatgtgaactgagagtgaagttcagcaggagcgcagacgcccccgcgtaccagcagggccagaaccagctctataacgagctgaatctaggacgaagagaggagtacgatgttttggacaagagacgtggccgggaccctgagatggggggaaagccgagaaggaagaaccctcaggaaggcctgtacaatgaactgcagaaagataagatggcggaggcctacagtgagattgggatgaaaggcgagcgccggaggggcaaggggcacgatggcctttaccagggtctcagtacagccaccaaggacacctacgacgcccttcacatgcaggccctgccccctcgctctagaggatctggagcaacaaacttctcactactcaaacaagcaggtgacgtggaggagaatcccgggcctgggatccacatggccacttacgaggttctctgtgaggtggcgcggaaactgggcacggatgacagggaagtggtattgttcctcctaaacgtgttcatacctcaacccacactggcccaattaattggagctcttagagctttaaaggaggagggcaggttaacgtttcccctgttagcggaatgtctgtttcgtgcaggtcgcagagacctcttgcgcgacctgcttcacttagacccgcgttttttagagcgccacctagcgggcacaatgagttatttcagcccttatcagctcactgttctccacgtagacggggagctgtgtgcgagggatattaggtctttgatatttttaagcaaggacactatagggtctcgcagcacaccacagacattcttacactgggtgtactgtatggaaaacttagacctactgggtcccactgacgtggatgccctaatgtcaatgcttagatctttgtcaagagtagacctacagcgccaagtgcaaaccctaatgggccttcacctttccggcccatcacactcccaacactatcgccatacaccactcgagaccgatttctacgactacaaggacgacgatgacaagactagtggctccggcgagggcagaggaagtctactaacctgcggagatgtggaagaaaatcctggcccacatatgaccgagtacaagcccacggtgcgcctcgccacccgcgacgacgtccccagggccgtacgcaccctcgccgccgcgttcgccgactaccccgccacgcgccacaccgtcgatccggaccgccacatcgagcgggtcaccgagctgcaagaactcttcctcacgcgcgtcgggctcgacatcggcaaggtgtgggtcgcggacgacggcgccgcggtggcggtctggaccacgccggagagcgtcgaagcgggggcggtgttcgccgagatcggcccgcgcatggccgagttgagcggttcccggctggccgcgcagcaacagatggaaggcctcctggcgccgcaccggcccaaggagcccgcgtggttcctggccaccgtcggcgtctcgcccgaccaccagggcaagggtctgggcagcgccgtcgtgctccccggagtggaggcggccgagcgcgccggggtgcccgccttcctggagacctccgcgccccgcaacctccccttctacgagcggctcggcttcaccgtcaccgccgacgtcgaggtgcccgaaggaccgcgcacctggtgcatgacccgcaagcccggtgcctga

SEQ ID NO: 1368 - DNA, 2877 bp, Artificial Sequence
  Synthetic Polynucleotides
atggccttaccagtgaccgccttgctcctgccgctggccttgctgctccacgccgccaggccggacgagatcgtgctgacacagagccctgccaccctgtctctgagccctggcgaaagagccaccctgagctgtagagccagccagagcgtgggcagctacctggcctggtatcagcagaagcctggcgctccccggctgctgatctacgatgcctctcacagagccaccggcatccccgccagattttctggcagcggctccggcaccgacttcaccctgacaatcagctccctggaacccgaggacttcgccgtgtactactgccagcagcggagcaactggccccccatgtataccttcggccagggcaccaagctggaaatcaagagaggcggaggcggaagtggaggcggaggatctggcggcggaggctctgaagtgcagctggtgcagtctggcgctgaggtgtccgtgaaggtgtcctgcaaagccagcggcggcaagaagcccggcagcacctttagcagctacaccatcagctgggtgcgccaggcacctggacagggcctggaatggatgggcggcatcatccccatcttcggcaccgccaactacgcccagaaattccagggcagagtgaccatcaccgccgacaagagcaccagcaccgcctacatggaactgagcagcctgcggagcgaggacacagccgtgtattattgtgccggcgacaccgacagcagcggctactatggcgctgtggactattggggccagggaaccctcgtgaccgtgtcctctacgcgtgagcagaaactgatctcggaagaggatctggcgaagcccaccacgacgccagcgccgcgaccaccaacaccggcgcccaccatcgcgtcgcagcccctgtccctgcgcccagaggcgtgccggccagcggcggggggcgcagtgcacacgagggggctggacttcgcctgtgacatctacatctgggcgcccttggccgggacttgtggggtccttctcctgtcactggttatcaccctttactgcaaacggggcagaaagaaactcctgtatatattcaaacaaccatttatgagaccagtacaaactactcaagaggaagatggctgtagctgccgatttccagaagaagaagaaggaggatgtgaactgagagtgaagttcagcaggagcgcagacgcccccgcgtaccagcagggccagaaccagctctataacgagctgaatctaggacgaagagaggagtacgatgttttggacaagagacgtggccgggaccctgagatggggggaaagccgagaaggaagaaccctcaggaaggcctgtacaatgaactgcagaaagataagatggcggaggcctacagtgagattgggatgaaaggcgagcgccggaggggcaaggggcacgatggcctttaccagggtctcagtacagccaccaaggacacctacgacgcccttcacatgcaggccctgccccctcgctctagaggatctggagcaacaaacttctcactactcaaacaagcaggtgacgtggaggagaatcccgggcctgggatccacatggccacttacgaggttctctgtgaggtggcgcggaaactgggcacggatgacagggaagtggtattgttcctcctaaacgtgttcatacctcaacccacactggcccaattaattggagctcttagagctttaaaggaggagggcaggttaacgtttcccctgttagcggaatgtctgtttcgtgcaggtcgcagagacctcttgcgcgacctgcttcacttagacccgcgttttttagagcgccacctagcgggcacaatgagttatttcagcccttatcagctcactgttctccacgtagacggggagctgtgtgcgagggatattaggtctttgatatttttaagcaaggacactatagggtctcgcagcacaccacagacattcttacactgggtgtactgtatggaaaacttagacctactgggtcccactgacgtggatgccctaatgtcaatgcttagatctttgtcaagagtagacctacagcgccaagtgcaaaccctaatgggccttcacctttccggcccatcacactcccaacactatcgccatacaccactcgagaccgatttctacgactacaaggacgacgatgacaagactagtggctccggcgagggcagaggaagtctactaacctgcggagatgtggaagaaaatcctggcccacatatgaccgagtacaagcccacggtgcgcctcgccacccgcgacgacgtccccagggccgtacgcaccctcgccgccgcgttcgccgactaccccgccacgcgccacaccgtcgatccggaccgccacatcgagcgggtcaccgagctgcaagaactcttcctcacgcgcgtcgggctcgacatcggcaaggtgtgggtcgcggacgacggcgccgcggtggcggtctggaccacgccggagagcgtcgaagcgggggcggtgttcgccgagatcggcccgcgcatggccgagttgagcggttcccggctggccgcgcagcaacagatggaaggcctcctggcgccgcaccggcccaaggagcccgcgtggttcctggccaccgtcggcgtctcgcccgaccaccagggcaagggtctgggcagcgccgtcgtgctccccggagtggaggcggccgagcgcgccggggtgcccgccttcctggagacctccgcgccccgcaacctccccttctacgagcggctcggcttcaccgtcaccgccgacgtcgaggtgcccgaaggaccgcgcacctggtgcatgacccgcaagcccggtgcctga

SEQ ID NO: 1369 - DNA, 2826 bp, Artificial Sequence
  Synthetic Polynucleotides
atggccttaccagtgaccgccttgctcctgccgctggccttgctgctccacgccgccaggccggacatccagatgacccagagccccagcagcctgtctgccagcgtgggcgacagagtgaccatcacctgtcaggccagccaggacatcaacaactacctgaactggtatcagcagaagcccggcaaggcccccaagctgctgatctacgacgccagcaatctgcagaccggcgtgcccagcagattttccggctctggcagcggcaccgacttcaccttcaccatcgaggacattgccacctactactgccagcagtacaccttcggccctggcaccaaggtggacatcaaaggcggaggcggaagtggaggcggaggatctggcggcggaggctctgaagtgcaactgctggaatctggcggcggactggtgcagcctggcggatctctgagactgagctgtgccgccagcggcttcacctttagctggtacagcatgacctgggtgcgccaggcccctggcaaaggactggaatgggtgtccagcatcgtgccctggggcgatttcacccagtacgccgatagcgtgaagggccggttcaccatcagccgggacaacagcaagaacaccctgtacctgcagatgaacagcctgcgggccgaggacaccgccgtgtactattgtgccaagggacctggctggggcagcttcgatctgtggggcagaggaacccttgtgaccgtgtccagcacgcgtgagcagaaactgatctcggaagaggatctggcgaagcccaccacgacgccagcgccgcgaccaccaacaccggcgcccaccatcgcgtcgcagcccctgtccctgcgcccagaggcgtgccggccagcggcggggggcgcagtgcacacgagggggctggacttcgcctgtgacatctacatctgggcgcccttggccgggacttgtggggtccttctcctgtcactggttatcaccctttactgcaaacggggcagaaagaaactcctgtatatattcaaacaaccatttatgagaccagtacaaactactcaagaggaagatggctgtagctgccgatttccagaagaagaagaaggaggatgtgaactgagagtgaagttcagcaggagcgcagacgcccccgcgtaccagcagggccagaaccagctctataacgagctgaatctaggacgaagagaggagtacgatgttttggacaagagacgtggccgggaccctgagatggggggaaagccgagaaggaagaaccctcaggaaggcctgtacaatgaactgcagaaagataagatggcggaggcctacagtgagattgggatgaaaggcgagcgccggaggggcaaggggcacgatggcctttaccagggtctcagtacagccaccaaggacacctacgacgcccttcacatgcaggccctgccccctcgctctagaggatctggagcaacaaacttctcactactcaaacaagcaggtgacgtggaggagaatcccgggcctgggatccacatggccacttacgaggttctctgtgaggtggcgcggaaactgggcacggatgacagggaagtggtattgttcctcctaaacgtgttcatacctcaacccacactggcccaattaattggagctcttagagctttaaaggaggagggcaggttaacgtttcccctgttagcggaatgtctgtttcgtgcaggtcgcagagacctcttgcgcgacctgcttcacttagacccgcgttttttagagcgccacctagcgggcacaatgagttatttcagcccttatcagctcactgttctccacgtagacggggagctgtgtgcgagggatattaggtctttgatatttttaagcaaggacactatagggtctcgcagcacaccacagacattcttacactgggtgtactgtatggaaaacttagacctactgggtcccactgacgtggatgccctaatgtcaatgcttagatctttgtcaagagtagacctacagcgccaagtgcaaaccctaatgggccttcacctttccggcccatcacactcccaacactatcgccatacaccactcgagaccgatttctacgactacaaggacgacgatgacaagactagtggctccggcgagggcagaggaagtctactaacctgcggagatgtggaagaaaatcctggcccacatatgaccgagtacaagcccacggtgcgcctcgccacccgcgacgacgtccccagggccgtacgcaccctcgccgccgcgttcgccgactaccccgccacgcgccacaccgtcgatccggaccgccacatcgagcgggtcaccgagctgcaagaactcttcctcacgcgcgtcgggctcgacatcggcaaggtgtgggtcgcggacgacggcgccgcggtggcggtctggaccacgccggagagcgtcgaagcgggggcggtgttcgccgagatcggcccgcgcatggccgagttgagcggttcccggctggccgcgcagcaacagatggaaggcctcctggcgccgcaccggcccaaggagcccgcgtggttcctggccaccgtcggcgtctcgcccgaccaccagggcaagggtctgggcagcgccgtcgtgctccccggagtggaggcggccgagcgcgccggggtgcccgccttcctggagacctccgcgccccgcaacctccccttctacgagcggctcggcttcaccgtcaccgccgacgtcgaggtgcccgaaggaccgcgcacctggtgcatgacccgcaagcccggtgcctga

SEQ ID NO: 1370 - DNA, 2493 bp, Artificial Sequence
  Synthetic Polynucleotides
atggactggatttggcgcatccttttccttgtcggcgctgctaccggcgcccattccgaggttcagttggtcgaatcaggcgggggcctcgtccaacccggcggaagcctgcggctgtcttgcgcagcaagtggtagtgtgttcaagatcaacgttatggcctggtatcgccaggctccgggaaaagggagagagctggttgcggggatcattagcggtggctccaccagctacgctgacagtgtgaagggaaggttcactatatcacgcgacaacgcaaagaatacattgtacctccagatgaatagcttgcggcccgaagacacggcagtctactattgtgcctttatcacaacagagagcgactatgacctgggccgccggtattgggggcagggaacccttgtgaccgtttcatccacgcgtgagcagaaactgatctcggaagaggatctggcgaagcccaccacgacgccagcgccgcgaccaccaacaccggcgcccaccatcgcgtcgcagcccctgtccctgcgcccagaggcgtgccggccagcggcggggggcgcagtgcacacgagggggctggacttcgcctgtgacatctacatctgggcgcccttggccgggacttgtggggtccttctcctgtcactggttatcaccctttactgcaaacggggcagaaagaaactcctgtatatattcaaacaaccatttatgagaccagtacaaactactcaagaggaagatggctgtagctgccgatttccagaagaagaagaaggaggatgtgaactgagagtgaagttcagcaggagcgcagacgcccccgcgtaccagcagggccagaaccagctctataacgagctgaatctaggacgaagagaggagtacgatgttttggacaagagacgtggccgggaccctgagatggggggaaagccgagaaggaagaaccctcaggaaggcctgtacaatgaactgcagaaagataagatggcggaggcctacagtgagattgggatgaaaggcgagcgccggaggggcaaggggcacgatggcctttaccagggtctcagtacagccaccaaggacacctacgacgcccttcacatgcaggccctgccccctcgctctagaggatctggagcaacaaacttctcactactcaaacaagcaggtgacgtggaggagaatcccgggcctgggatccacatggccacttacgaggttctctgtgaggtggcgcggaaactgggcacggatgacagggaagtggtattgttcctcctaaacgtgttcatacctcaacccacactggcccaattaattggagctcttagagctttaaaggaggagggcaggttaacgtttcccctgttagcggaatgtctgtttcgtgcaggtcgcagagacctcttgcgcgacctgcttcacttagacccgcgttttttagagcgccacctagcgggcacaatgagttatttcagcccttatcagctcactgttctccacgtagacggggagctgtgtgcgagggatattaggtctttgatatttttaagcaaggacactatagggtctcgcagcacaccacagacattcttacactgggtgtactgtatggaaaacttagacctactgggtcccactgacgtggatgccctaatgtcaatgcttagatctttgtcaagagtagacctacagcgccaagtgcaaaccctaatgggccttcacctttccggcccatcacactcccaacactatcgccatacaccactcgagaccgatttctacgactacaaggacgacgatgacaagactagtggctccggcgagggcagaggaagtctactaacctgcggagatgtggaagaaaatcctggcccacatatgaccgagtacaagcccacggtgcgcctcgccacccgcgacgacgtccccagggccgtacgcaccctcgccgccgcgttcgccgactaccccgccacgcgccacaccgtcgatccggaccgccacatcgagcgggtcaccgagctgcaagaactcttcctcacgcgcgtcgggctcgacatcggcaaggtgtgggtcgcggacgacggcgccgcggtggcggtctggaccacgccggagagcgtcgaagcgggggcggtgttcgccgagatcggcccgcgcatggccgagttgagcggttcccggctggccgcgcagcaacagatggaaggcctcctggcgccgcaccggcccaaggagcccgcgtggttcctggccaccgtcggcgtctcgcccgaccaccagggcaagggtctgggcagcgccgtcgtgctccccggagtggaggcggccgagcgcgccggggtgcccgccttcctggagacctccgcgccccgcaacctccccttctacgagcggctcggcttcaccgtcaccgccgacgtcgaggtgcccgaaggaccgcgcacctggtgcatgacccgcaagcccggtgcctga

SEQ ID NO: 1371 - DNA, 2856 bp, Artificial Sequence
  Synthetic Polynucleotides
atggccttaccagtgaccgccttgctcctgccgctggccttgctgctccacgccgccaggccggacatccagatgacccagagccccagcagcctgtctgccagcgtgggcgacagagtgaccatcacctgtaccgccagcctgagcgtgtccagcacctacctgcactggtatcagcagaagcccggcagcagccccaagctgtggatctacagcaccagcaacctggcctccggcgtgcccagcagattttctggcagcggctctggcaccagctacaccctgaccatcagctccctccagcccgaggacttcgccacctactactgccaccagtaccacagaagccccctgacctttggcggaggcaccaaggtggaaatcaagagaggcggaggcggaagtggaggcggaggatctggcggcggaggctctgaagtgcaactggtggaatctggcggcggactggtgcagcctggcggatctctgagactgagctgtgccgccagcggcttcagcctgaccaaatacggcgtgcactgggtgcgccaggcccctggaaaaggactggaatgggtgggagtgaagtgggctggcggctccaccgactacaacagcgccctgatgagccggttcaccatcagcaaggacaacgccaagaacagcctgtacctccagatgaactccctgcgggccgaggacaccgccgtgtactactgtgccagagatcaccgggacgctatggactactggggccagggaacactcgtgaccgtgtcctctacgcgtgagcagaaactgatctcggaagaggatctggcgaagcccaccacgacgccagcgccgcgaccaccaacaccggcgcccaccatcgcgtcgcagcccctgtccctgcgcccagaggcgtgccggccagcggcggggggcgcagtgcacacgagggggctggacttcgcctgtgacatctacatctgggcgcccttggccgggacttgtggggtccttctcctgtcactggttatcaccctttactgcaaacggggcagaaagaaactcctgtatatattcaaacaaccatttatgagaccagtacaaactactcaagaggaagatggctgtagctgccgatttccagaagaagaagaaggaggatgtgaactgagagtgaagttcagcaggagcgcagacgcccccgcgtaccagcagggccagaaccagctctataacgagctgaatctaggacgaagagaggagtacgatgttttggacaagagacgtggccgggaccctgagatggggggaaagccgagaaggaagaaccctcaggaaggcctgtacaatgaactgcagaaagataagatggcggaggcctacagtgagattgggatgaaaggcgagcgccggaggggcaaggggcacgatggcctttaccagggtctcagtacagccaccaaggacacctacgacgcccttcacatgcaggccctgccccctcgctctagaggatctggagcaacaaacttctcactactcaaacaagcaggtgacgtggaggagaatcccgggcctgggatccacatggccacttacgaggttctctgtgaggtggcgcggaaactgggcacggatgacagggaagtggtattgttcctcctaaacgtgttcatacctcaacccacactggcccaattaattggagctcttagagctttaaaggaggagggcaggttaacgtttcccctgttagcggaatgtctgtttcgtgcaggtcgcagagacctcttgcgcgacctgcttcacttagacccgcgttttttagagcgccacctagcgggcacaatgagttatttcagcccttatcagctcactgttctccacgtagacggggagctgtgtgcgagggatattaggtctttgatatttttaagcaaggacactatagggtctcgcagcacaccacagacattcttacactgggtgtactgtatggaaaacttagacctactgggtcccactgacgtggatgccctaatgtcaatgcttagatctttgtcaagagtagacctacagcgccaagtgcaaaccctaatgggccttcacctttccggcccatcacactcccaacactatcgccatacaccactcgagaccgatttctacgactacaaggacgacgatgacaagactagtggctccggcgagggcagaggaagtctactaacctgcggagatgtggaagaaaatcctggcccacatatgaccgagtacaagcccacggtgcgcctcgccacccgcgacgacgtccccagggccgtacgcaccctcgccgccgcgttcgccgactaccccgccacgcgccacaccgtcgatccggaccgccacatcgagcgggtcaccgagctgcaagaactcttcctcacgcgcgtcgggctcgacatcggcaaggtgtgggtcgcggacgacggcgccgcggtggcggtctggaccacgccggagagcgtcgaagcgggggcggtgttcgccgagatcggcccgcgcatggccgagttgagcggttcccggctggccgcgcagcaacagatggaaggcctcctggcgccgcaccggcccaaggagcccgcgtggttcctggccaccgtcggcgtctcgcccgaccaccagggcaagggtctgggcagcgccgtcgtgctccccggagtggaggcggccgagcgcgccggggtgcccgccttcctggagacctccgcgccccgcaacctccccttctacgagcggctcggcttcaccgtcaccgccgacgtcgaggtgcccgaaggaccgcgcacctggtgcatgacccgcaagcccggtgcctga

SEQ ID NO: 1372 - DNA, 2868 bp, Artificial Sequence
  Synthetic Polynucleotides
atggccttaccagtgaccgccttgctcctgccgctggccttgctgctccacgccgccaggccggacatccagatgacccagagccccagcagcctgtctgccagcgtgggcgacagagtgaccatcacatgcaaggccagccaggacgtgggaacagccgtggcctggtatcagcagaagcctggcaaggcccccaagctgctgatctacagcgccagctacagatccaccggcgtgcccagcagattttccggctctggcagcggcaccgacttcaccctgaccatctctagcctccagcccgaggacttcgccacctactactgccagcaccactactccgccccctggacatttggcggaggcaccaaggtggaaatcaagggcggaggcggaagtggaggcggaggatctggcggcggaggctctgaagtgcaactggtggaatcaggcggcggactggtgcagcctggcggatctctgagactgagctgtgccgccagcggcttcaccttcagcagaaacggcatgagctgggtgcgccaggcccctggaaaaggactggaatgggtggcaaccgtgtccagcggcggcagctacatctactacgccgacagcgtgaagggccggttcaccatctccagagacaacgccaagaacagcctgtacctccagatgaactccctgcgggccgaggacaccgccgtgtactattgtgccagacagggcaccaccgccctggctaccagattcttcgatgtgtggggccagggcaccctcgtgaccgtgtcatctacgcgtgagcagaaactgatctcggaagaggatctggcgaagcccaccacgacgccagcgccgcgaccaccaacaccggcgcccaccatcgcgtcgcagcccctgtccctgcgcccagaggcgtgccggccagcggcggggggcgcagtgcacacgagggggctggacttcgcctgtgacatctacatctgggcgcccttggccgggacttgtggggtccttctcctgtcactggttatcaccctttactgcaaacggggcagaaagaaactcctgtatatattcaaacaaccatttatgagaccagtacaaactactcaagaggaagatggctgtagctgccgatttccagaagaagaagaaggaggatgtgaactgagagtgaagttcagcaggagcgcagacgcccccgcgtaccagcagggccagaaccagctctataacgagctgaatctaggacgaagagaggagtacgatgttttggacaagagacgtggccgggaccctgagatggggggaaagccgagaaggaagaaccctcaggaaggcctgtacaatgaactgcagaaagataagatggcggaggcctacagtgagattgggatgaaaggcgagcgccggaggggcaaggggcacgatggcctttaccagggtctcagtacagccaccaaggacacctacgacgcccttcacatgcaggccctgccccctcgctctagaggatctggagcaacaaacttctcactactcaaacaagcaggtgacgtggaggagaatcccgggcctgggatccacatggccacttacgaggttctctgtgaggtggcgcggaaactgggcacggatgacagggaagtggtattgttcctcctaaacgtgttcatacctcaacccacactggcccaattaattggagctcttagagctttaaaggaggagggcaggttaacgtttcccctgttagcggaatgtctgtttcgtgcaggtcgcagagacctcttgcgcgacctgcttcacttagacccgcgttttttagagcgccacctagcgggcacaatgagttatttcagcccttatcagctcactgttctccacgtagacggggagctgtgtgcgagggatattaggtctttgatatttttaagcaaggacactatagggtctcgcagcacaccacagacattcttacactgggtgtactgtatggaaaacttagacctactgggtcccactgacgtggatgccctaatgtcaatgcttagatctttgtcaagagtagacctacagcgccaagtgcaaaccctaatgggccttcacctttccggcccatcacactcccaacactatcgccatacaccactcgagaccgatttctacgactacaaggacgacgatgacaagactagtggctccggcgagggcagaggaagtctactaacctgcggagatgtggaagaaaatcctggcccacatatgaccgagtacaagcccacggtgcgcctcgccacccgcgacgacgtccccagggccgtacgcaccctcgccgccgcgttcgccgactaccccgccacgcgccacaccgtcgatccggaccgccacatcgagcgggtcaccgagctgcaagaactcttcctcacgcgcgtcgggctcgacatcggcaaggtgtgggtcgcggacgacggcgccgcggtggcggtctggaccacgccggagagcgtcgaagcgggggcggtgttcgccgagatcggcccgcgcatggccgagttgagcggttcccggctggccgcgcagcaacagatggaaggcctcctggcgccgcaccggcccaaggagcccgcgtggttcctggccaccgtcggcgtctcgcccgaccaccagggcaagggtctgggcagcgccgtcgtgctccccggagtggaggcggccgagcgcgccggggtgcccgccttcctggagacctccgcgccccgcaacctccccttctacgagcggctcggcttcaccgtcaccgccgacgtcgaggtgcccgaaggaccgcgcacctggtgcatgacccgcaagcccggtgcctga

SEQ ID NO: 1373 - DNA, 2886 bp, Artificial Sequence
  Synthetic Polynucleotides
atggccttaccagtgaccgccttgctcctgccgctggccttgctgctccacgccgccaggccggacatcgtgatgacccagagccccagcagcctgaccatgagcgtgggccagaaagtgaccatgtcctgcaagagcagccacagcctgctgaacagccggaaccagaagaactacctggcctggttccagcagaagcccggccagtcccccaagctgctggtgtacttcgcaagcacccgcgagagcggcgtgcccgacagattcatcggcagcggctccggcaccgacttcaccctgaccatcagcaacgtgcaggccgaggacctggccgactacttctgccagcagcactacaccaccctgcccaccttcggcggaggcaccaagctggaaatcaagggcggaggcggaagtggaggcggaggatctggcggcggaggctctcagatccagctggtgcagagcggccctgacctgaagaaacccggcgagacagtgaagatcagttgcaaggcctccggctacaccttcaccaacacaggcatgaactgggtcaagcaggcccctggcaagggcctgaagtggatgggctggatcaacacctacaccggcgagcccacctacgccgacgacttcaagggccggttcaccttcagcctggaaaccagcgccagcaccgcctacctgcagatcaacaacctgaagaacgaggacaccgccacctatttctgcaccagatggggctacggcagcagcctgtactacgccatggactactggggccagggcaccagcgtgaccgtgtcctctacgcgtgagcagaaactgatctcggaagaggatctggcgaagcccaccacgacgccagcgccgcgaccaccaacaccggcgcccaccatcgcgtcgcagcccctgtccctgcgcccagaggcgtgccggccagcggcggggggcgcagtgcacacgagggggctggacttcgcctgtgacatctacatctgggcgcccttggccgggacttgtggggtccttctcctgtcactggttatcaccctttactgcaaacggggcagaaagaaactcctgtatatattcaaacaaccatttatgagaccagtacaaactactcaagaggaagatggctgtagctgccgatttccagaagaagaagaaggaggatgtgaactgagagtgaagttcagcaggagcgcagacgcccccgcgtaccagcagggccagaaccagctctataacgagctgaatctaggacgaagagaggagtacgatgttttggacaagagacgtggccgggaccctgagatggggggaaagccgagaaggaagaaccctcaggaaggcctgtacaatgaactgcagaaagataagatggcggaggcctacagtgagattgggatgaaaggcgagcgccggaggggcaaggggcacgatggcctttaccagggtctcagtacagccaccaaggacacctacgacgcccttcacatgcaggccctgccccctcgctctagaggatctggagcaacaaacttctcactactcaaacaagcaggtgacgtggaggagaatcccgggcctgggatccacatggccacttacgaggttctctgtgaggtggcgcggaaactgggcacggatgacagggaagtggtattgttcctcctaaacgtgttcatacctcaacccacactggcccaattaattggagctcttagagctttaaaggaggagggcaggttaacgtttcccctgttagcggaatgtctgtttcgtgcaggtcgcagagacctcttgcgcgacctgcttcacttagacccgcgttttttagagcgccacctagcgggcacaatgagttatttcagcccttatcagctcactgttctccacgtagacggggagctgtgtgcgagggatattaggtctttgatatttttaagcaaggacactatagggtctcgcagcacaccacagacattcttacactgggtgtactgtatggaaaacttagacctactgggtcccactgacgtggatgccctaatgtcaatgcttagatctttgtcaagagtagacctacagcgccaagtgcaaaccctaatgggccttcacctttccggcccatcacactcccaacactatcgccatacaccactcgagaccgatttctacgactacaaggacgacgatgacaagactagtggctccggcgagggcagaggaagtctactaacctgcggagatgtggaagaaaatcctggcccacatatgaccgagtacaagcccacggtgcgcctcgccacccgcgacgacgtccccagggccgtacgcaccctcgccgccgcgttcgccgactaccccgccacgcgccacaccgtcgatccggaccgccacatcgagcgggtcaccgagctgcaagaactcttcctcacgcgcgtcgggctcgacatcggcaaggtgtgggtcgcggacgacggcgccgcggtggcggtctggaccacgccggagagcgtcgaagcgggggcggtgttcgccgagatcggcccgcgcatggccgagttgagcggttcccggctggccgcgcagcaacagatggaaggcctcctggcgccgcaccggcccaaggagcccgcgtggttcctggccaccgtcggcgtctcgcccgaccaccagggcaagggtctgggcagcgccgtcgtgctccccggagtggaggcggccgagcgcgccggggtgcccgccttcctggagacctccgcgccccgcaacctccccttctacgagcggctcggcttcaccgtcaccgccgacgtcgaggtgcccgaaggaccgcgcacctggtgcatgacccgcaagcccggtgcctga

SEQ ID NO: 1374 - DNA, 2856 bp, Artificial Sequence
  Synthetic Polynucleotides
atggccttaccagtgaccgccttgctcctgccgctggccttgctgctccacgccgccaggccggacatccagatgacccagagcccccctagcctgtctgcctctgtgggcggcaaagtgaccatcacatgcaaggccagccaggacatcgaccgctacatggcctggtatcaggacaagcccggcaagggacccaagctgctgatccacgataccagcaccctccagcccggcatccccagcagattttctggcagcggctccggcagagactacagcttcagcatcagcaacctggaacccgaggacattgccacctactactgcctccagtacgacaacctgtggaccttcggcggaggcaccaagctggaaatcaagagaggcggaggcggaagtggaggcggaggatctggcggcggaggctctcaggtgcaactggtgcagagcggagccgagcttgtgaagcctggcgcttccgtgaagatgagctgcaaagccagcggctacatcttcaccaactacaacatccactgggtcaagaagtccccaggccagggcctggaatggatcggagccatctaccccggaaacggcgacgccccttacagccagaagttccaggacagagccaccctgaccgccgacaccagcagcagcaccacctacatggaactgagcagcctgaccagcgaggacagcgccgtgtactattgcgtgcgggccaactgggatgtggccttcgcctattggggccagggcacactggtgtccgtgtcctctacgcgtgagcagaaactgatctcggaagaggatctggcgaagcccaccacgacgccagcgccgcgaccaccaacaccggcgcccaccatcgcgtcgcagcccctgtccctgcgcccagaggcgtgccggccagcggcggggggcgcagtgcacacgagggggctggacttcgcctgtgacatctacatctgggcgcccttggccgggacttgtggggtccttctcctgtcactggttatcaccctttactgcaaacggggcagaaagaaactcctgtatatattcaaacaaccatttatgagaccagtacaaactactcaagaggaagatggctgtagctgccgatttccagaagaagaagaaggaggatgtgaactgagagtgaagttcagcaggagcgcagacgcccccgcgtaccagcagggccagaaccagctctataacgagctgaatctaggacgaagagaggagtacgatgttttggacaagagacgtggccgggaccctgagatggggggaaagccgagaaggaagaaccctcaggaaggcctgtacaatgaactgcagaaagataagatggcggaggcctacagtgagattgggatgaaaggcgagcgccggaggggcaaggggcacgatggcctttaccagggtctcagtacagccaccaaggacacctacgacgcccttcacatgcaggccctgccccctcgctctagaggatctggagcaacaaacttctcactactcaaacaagcaggtgacgtggaggagaatcccgggcctgggatccacatggccacttacgaggttctctgtgaggtggcgcggaaactgggcacggatgacagggaagtggtattgttcctcctaaacgtgttcatacctcaacccacactggcccaattaattggagctcttagagctttaaaggaggagggcaggttaacgtttcccctgttagcggaatgtctgtttcgtgcaggtcgcagagacctcttgcgcgacctgcttcacttagacccgcgttttttagagcgccacctagcgggcacaatgagttatttcagcccttatcagctcactgttctccacgtagacggggagctgtgtgcgagggatattaggtctttgatatttttaagcaaggacactatagggtctcgcagcacaccacagacattcttacactgggtgtactgtatggaaaacttagacctactgggtcccactgacgtggatgccctaatgtcaatgcttagatctttgtcaagagtagacctacagcgccaagtgcaaaccctaatgggccttcacctttccggcccatcacactcccaacactatcgccatacaccactcgagaccgatttctacgactacaaggacgacgatgacaagactagtggctccggcgagggcagaggaagtctactaacctgcggagatgtggaagaaaatcctggcccacatatgaccgagtacaagcccacggtgcgcctcgccacccgcgacgacgtccccagggccgtacgcaccctcgccgccgcgttcgccgactaccccgccacgcgccacaccgtcgatccggaccgccacatcgagcgggtcaccgagctgcaagaactcttcctcacgcgcgtcgggctcgacatcggcaaggtgtgggtcgcggacgacggcgccgcggtggcggtctggaccacgccggagagcgtcgaagcgggggcggtgttcgccgagatcggcccgcgcatggccgagttgagcggttcccggctggccgcgcagcaacagatggaaggcctcctggcgccgcaccggcccaaggagcccgcgtggttcctggccaccgtcggcgtctcgcccgaccaccagggcaagggtctgggcagcgccgtcgtgctccccggagtggaggcggccgagcgcgccggggtgcccgccttcctggagacctccgcgccccgcaacctccccttctacgagcggctcggcttcaccgtcaccgccgacgtcgaggtgcccgaaggaccgcgcacctggtgcatgacccgcaagcccggtgcctga

SEQ ID NO: 1375 - DNA, 2859 bp, Artificial Sequence
  Synthetic Polynucleotides
atggccttaccagtgaccgccttgctcctgccgctggccttgctgctccacgccgccaggccggacatccagatgacccagagccctgccagcctgtctgcctctgtgggcgagacagtgaccatcacctgtcgggtgtccggcaacatccacaactacctggcctggtatcagcagaagcagggcaagagcccccaactgctggtgtacaacgccaagaccctggccgatggcgtgcccagcagattttctggctctggcagcggcacccagtacagcctgaagatcaacagcctccagcccgaggacttcggcagctactactgccagcacttctggtccaacccctacaccttcggcggaggcaccaagctggaaatcaagggcggaggcggaagtggaggcggaggatctggcggcggaggctctcaggtgcaactccagcagtctggcgcttccgtgaaggtgtcctgcaaggccagcgaactcgtgcggcctggcacaggctacgccttcaccaattacctgatcgagtgggtcaagcagaggcccggacagggcctggaatggatcggagtgattaacccaggcagcggcggcaccaactacaacgagaagttcaagggcaaggccaccctgaccgccgacaagagcagcagcacagcctacatgcaactgagcagcctgaccagcgacgacagcgccgtgtacttctgcgcccggtacagaagctacgactggtacttcgacgtgtggggagccggcaccaccgtgacagtgtcatctacgcgtgagcagaaactgatctcggaagaggatctggcgaagcccaccacgacgccagcgccgcgaccaccaacaccggcgcccaccatcgcgtcgcagcccctgtccctgcgcccagaggcgtgccggccagcggcggggggcgcagtgcacacgagggggctggacttcgcctgtgacatctacatctgggcgcccttggccgggacttgtggggtccttctcctgtcactggttatcaccctttactgcaaacggggcagaaagaaactcctgtatatattcaaacaaccatttatgagaccagtacaaactactcaagaggaagatggctgtagctgccgatttccagaagaagaagaaggaggatgtgaactgagagtgaagttcagcaggagcgcagacgcccccgcgtaccagcagggccagaaccagctctataacgagctgaatctaggacgaagagaggagtacgatgttttggacaagagacgtggccgggaccctgagatggggggaaagccgagaaggaagaaccctcaggaaggcctgtacaatgaactgcagaaagataagatggcggaggcctacagtgagattgggatgaaaggcgagcgccggaggggcaaggggcacgatggcctttaccagggtctcagtacagccaccaaggacacctacgacgcccttcacatgcaggccctgccccctcgctctagaggatctggagcaacaaacttctcactactcaaacaagcaggtgacgtggaggagaatcccgggcctgggatccacatggccacttacgaggttctctgtgaggtggcgcggaaactgggcacggatgacagggaagtggtattgttcctcctaaacgtgttcatacctcaacccacactggcccaattaattggagctcttagagctttaaaggaggagggcaggttaacgtttcccctgttagcggaatgtctgtttcgtgcaggtcgcagagacctcttgcgcgacctgcttcacttagacccgcgttttttagagcgccacctagcgggcacaatgagttatttcagcccttatcagctcactgttctccacgtagacggggagctgtgtgcgagggatattaggtctttgatatttttaagcaaggacactatagggtctcgcagcacaccacagacattcttacactgggtgtactgtatggaaaacttagacctactgggtcccactgacgtggatgccctaatgtcaatgcttagatctttgtcaagagtagacctacagcgccaagtgcaaaccctaatgggccttcacctttccggcccatcacactcccaacactatcgccatacaccactcgagaccgatttctacgactacaaggacgacgatgacaagactagtggctccggcgagggcagaggaagtctactaacctgcggagatgtggaagaaaatcctggcccacatatgaccgagtacaagcccacggtgcgcctcgccacccgcgacgacgtccccagggccgtacgcaccctcgccgccgcgttcgccgactaccccgccacgcgccacaccgtcgatccggaccgccacatcgagcgggtcaccgagctgcaagaactcttcctcacgcgcgtcgggctcgacatcggcaaggtgtgggtcgcggacgacggcgccgcggtggcggtctggaccacgccggagagcgtcgaagcgggggcggtgttcgccgagatcggcccgcgcatggccgagttgagcggttcccggctggccgcgcagcaacagatggaaggcctcctggcgccgcaccggcccaaggagcccgcgtggttcctggccaccgtcggcgtctcgcccgaccaccagggcaagggtctgggcagcgccgtcgtgctccccggagtggaggcggccgagcgcgccggggtgcccgccttcctggagacctccgcgccccgcaacctccccttctacgagcggctcggcttcaccgtcaccgccgacgtcgaggtgcccgaaggaccgcgcacctggtgcatgacccgcaagcccggtgcctga

SEQ ID NO: 1376 - DNA, 2874 bp, Artificial Sequence
  Synthetic Polynucleotides
atggccttaccagtgaccgccttgctcctgccgctggccttgctgctccacgccgccaggccggacgacatccagatgacccagagccccagcagcctgtctgccagcgtgggcgacagagtgaccatcacctgtcggagcagccagcggatcgtgcacagcaacggcaacacctacctggaatggtatcagcagacccccggcaaggcccccaagctgctgatctacaaggtgtccaacagattcagcggcgtgcccagcaggtttagcggctctggcagcggcaccgactacacccctaccatctctagcctccagcccgaggacattgccacctactactgttttcaaggcagccacgtgccccccaccttcggccagggaacaaagctccagatcaccggcggaggcggaagtggaggcggaggatctggcggcggaggctctgaggtgcaactggtggaatctggcggcggagtggtgcagcctggcagaagcctgagactgagctgtagcagcagcggccctaccttcagcgactactacatgtactgggtgcgccaggcccctggcaagggactggaatgggtggcctacatgagcaacgtgggagccatcaccgattaccccgacaccgtgaagggcagacccaccatcagccgggacaacagcaagaataccctgttcctgatggacagcctgcggcccgaggataccggcgtgtacttttgcgccagaggcaccagggacggcagttggttcgcctattggggccagggcacacccgtgaccgtgtctagtacgcgtgagcagaaactgatctcggaagaggatctggcgaagcccaccacgacgccagcgccgcgaccaccaacaccggcgcccaccatcgcgtcgcagcccctgtccctgcgcccagaggcgtgccggccagcggcggggggcgcagtgcacacgagggggctggacttcgcctgtgacatctacatctgggcgcccttggccgggacttgtggggtccttctcctgtcactggttatcaccctttactgcaaacggggcagaaagaaactcctgtatatattcaaacaaccatttatgagaccagtacaaactactcaagaggaagatggctgtagctgccgatttccagaagaagaagaaggaggatgtgaactgagagtgaagttcagcaggagcgcagacgcccccgcgtaccagcagggccagaaccagctctataacgagctgaatctaggacgaagagaggagtacgatgttttggacaagagacgtggccgggaccctgagatggggggaaagccgagaaggaagaaccctcaggaaggcctgtacaatgaactgcagaaagataagatggcggaggcctacagtgagattgggatgaaaggcgagcgccggaggggcaaggggcacgatggcctttaccagggtctcagtacagccaccaaggacacctacgacgcccttcacatgcaggccctgccccctcgctctagaggatctggagcaacaaacttctcactactcaaacaagcaggtgacgtggaggagaatcccgggcctgggatccacatggccacttacgaggttctctgtgaggtggcgcggaaactgggcacggatgacagggaagtggtattgttcctcctaaacgtgttcatacctcaacccacactggcccaattaattggagctcttagagctttaaaggaggagggcaggttaacgtttcccctgttagcggaatgtctgtttcgtgcaggtcgcagagacctcttgcgcgacctgcttcacttagacccgcgttttttagagcgccacctagcgggcacaatgagttatttcagcccttatcagctcactgttctccacgtagacggggagctgtgtgcgagggatattaggtctttgatatttttaagcaaggacactatagggtctcgcagcacaccacagacattcttacactgggtgtactgtatggaaaacttagacctactgggtcccactgacgtggatgccctaatgtcaatgcttagatctttgtcaagagtagacctacagcgccaagtgcaaaccctaatgggccttcacctttccggcccatcacactcccaacactatcgccatacaccactcgagaccgatttctacgactacaaggacgacgatgacaagactagtggctccggcgagggcagaggaagtctactaacctgcggagatgtggaagaaaatcctggcccacatatgaccgagtacaagcccacggtgcgcctcgccacccgcgacgacgtccccagggccgtacgcaccctcgccgccgcgttcgccgactaccccgccacgcgccacaccgtcgatccggaccgccacatcgagcgggtcaccgagctgcaagaactcttcctcacgcgcgtcgggctcgacatcggcaaggtgtgggtcgcggacgacggcgccgcggtggcggtctggaccacgccggagagcgtcgaagcgggggcggtgttcgccgagatcggcccgcgcatggccgagttgagcggttcccggctggccgcgcagcaacagatggaaggcctcctggcgccgcaccggcccaaggagcccgcgtggttcctggccaccgtcggcgtctcgcccgaccaccagggcaagggtctgggcagcgccgtcgtgctccccggagtggaggcggccgagcgcgccggggtgcccgccttcctggagacctccgcgccccgcaacctccccttctacgagcggctcggcttcaccgtcaccgccgacgtcgaggtgcccgaaggaccgcgcacctggtgcatgacccgcaagcccggtgcctga

SEQ ID NO: 1377 - DNA, 2856 bp, Artificial Sequence
  Synthetic Polynucleotides
atggccttaccagtgaccgccttgctcctgccgctggccttgctgctccacgccgccaggccggacatccagatgacccagagcttcagcagcctgagcgccagcgtgggcgacagagtgaccatcacctgtagagccagccaggacatcagcaactacctgaactggtatcagcagaagcccggcaaggcccccaagctgctgatctactacaccagcagactgcacagcggcgtgcccagcagattttctggcagcggctccggcaccgactacaccctgacaatcagctccctgcagcccgaggacttcgctacctacttctgtcagcaaggcaacaccctgccctggacctttggcggaggcaccaagctggaaatcaagagaggcggaggcggaagtggaggcggaggatctggcggcggaggctctgaagtgcaactggtgcagtccggcggagggctggtgcagagcggaggatctctgagactgagctgcagagccagcggctacaccttcacccggtactggatgctgtgggtgcgccagaggccaggcaagggactggaatgggtggccgagatcaacccccggaacgaccggaccaactacaacgagaagttcaagacccggttcaccatcagcgtggacagaagcaagaacaccctgtacctgcagatggacagcctgcgggccgaggataccgccgtgtacttttgtgctctgggaggcggctacgctatggactactggggccagggaacccttgtgaccgtgtcctctacgcgtgagcagaaactgatctcggaagaggatctggcgaagcccaccacgacgccagcgccgcgaccaccaacaccggcgcccaccatcgcgtcgcagcccctgtccctgcgcccagaggcgtgccggccagcggcggggggcgcagtgcacacgagggggctggacttcgcctgtgacatctacatctgggcgcccttggccgggacttgtggggtccttctcctgtcactggttatcaccctttactgcaaacggggcagaaagaaactcctgtatatattcaaacaaccatttatgagaccagtacaaactactcaagaggaagatggctgtagctgccgatttccagaagaagaagaaggaggatgtgaactgagagtgaagttcagcaggagcgcagacgcccccgcgtaccagcagggccagaaccagctctataacgagctgaatctaggacgaagagaggagtacgatgttttggacaagagacgtggccgggaccctgagatggggggaaagccgagaaggaagaaccctcaggaaggcctgtacaatgaactgcagaaagataagatggcggaggcctacagtgagattgggatgaaaggcgagcgccggaggggcaaggggcacgatggcctttaccagggtctcagtacagccaccaaggacacctacgacgcccttcacatgcaggccctgccccctcgctctagaggatctggagcaacaaacttctcactactcaaacaagcaggtgacgtggaggagaatcccgggcctgggatccacatggccacttacgaggttctctgtgaggtggcgcggaaactgggcacggatgacagggaagtggtattgttcctcctaaacgtgttcatacctcaacccacactggcccaattaattggagctcttagagctttaaaggaggagggcaggttaacgtttcccctgttagcggaatgtctgtttcgtgcaggtcgcagagacctcttgcgcgacctgcttcacttagacccgcgttttttagagcgccacctagcgggcacaatgagttatttcagcccttatcagctcactgttctccacgtagacggggagctgtgtgcgagggatattaggtctttgatatttttaagcaaggacactatagggtctcgcagcacaccacagacattcttacactgggtgtactgtatggaaaacttagacctactgggtcccactgacgtggatgccctaatgtcaatgcttagatctttgtcaagagtagacctacagcgccaagtgcaaaccctaatgggccttcacctttccggcccatcacactcccaacactatcgccatacaccactcgagaccgatttctacgactacaaggacgacgatgacaagactagtggctccggcgagggcagaggaagtctactaacctgcggagatgtggaagaaaatcctggcccacatatgaccgagtacaagcccacggtgcgcctcgccacccgcgacgacgtccccagggccgtacgcaccctcgccgccgcgttcgccgactaccccgccacgcgccacaccgtcgatccggaccgccacatcgagcgggtcaccgagctgcaagaactcttcctcacgcgcgtcgggctcgacatcggcaaggtgtgggtcgcggacgacggcgccgcggtggcggtctggaccacgccggagagcgtcgaagcgggggcggtgttcgccgagatcggcccgcgcatggccgagttgagcggttcccggctggccgcgcagcaacagatggaaggcctcctggcgccgcaccggcccaaggagcccgcgtggttcctggccaccgtcggcgtctcgcccgaccaccagggcaagggtctgggcagcgccgtcgtgctccccggagtggaggcggccgagcgcgccggggtgcccgccttcctggagacctccgcgccccgcaacctccccttctacgagcggctcggcttcaccgtcaccgccgacgtcgaggtgcccgaaggaccgcgcacctggtgcatgacccgcaagcccggtgcctga

SEQ ID NO: 1378 - DNA, 2817 bp, Artificial Sequence
  Synthetic Polynucleotides
atggaaatgctccagggcctgctgctgctcctgctgctttctatgggcggagcttgggccagcagagagcctcttagaccttggtgtcaccccatcaacgccatcctggccgtggaaaaagagggctgccctgtctgcatcaccgtgaacaccacaatctgcgccggctactgccccaccatgatgagagtgctgcaagccgttctgcctcctctgcctcaggtcgtgtgcacctatcgggacgtccgcttcgagagcatcagactgcctggatgtcctagaggcgtggaccccgtggtgtcttttcctgtggctctgtcctgtagatgcggcccctgtagaagaagcaccagcgattgcggcggacccaaggatcaccctctgacatgcgatcacccacagctgagcggcctgttgtttcttggcggaggcggaagtggaggcggaggatctggcggcggaggctctgctcctgatgtgcaggattgccctgagtgcaccctgcaagagaaccccttcttctcccaacctggcgctcctatcctccagtgcatgggctgctgcttcagccgggcttatcccacacctctgcggagcaagaaaaccatgctggtccagaaaaacgtgaccagcgagagcacctgttgtgtggctaagagctacaacagagtgaccgtgatgggcggcttcaaggtggaaaatcacaccgcctgccactgctccacctgttactaccacaagagcacgcgtgagcagaaactgatctcggaagaggatctggcgaagcccaccacgacgccagcgccgcgaccaccaacaccggcgcccaccatcgcgtcgcagcccctgtccctgcgcccagaggcgtgccggccagcggcggggggcgcagtgcacacgagggggctggacttcgcctgtgacatctacatctgggcgcccttggccgggacttgtggggtccttctcctgtcactggttatcaccctttactgcaaacggggcagaaagaaactcctgtatatattcaaacaaccatttatgagaccagtacaaactactcaagaggaagatggctgtagctgccgatttccagaagaagaagaaggaggatgtgaactgagagtgaagttcagcaggagcgcagacgcccccgcgtaccagcagggccagaaccagctctataacgagctgaatctaggacgaagagaggagtacgatgttttggacaagagacgtggccgggaccctgagatggggggaaagccgagaaggaagaaccctcaggaaggcctgtacaatgaactgcagaaagataagatggcggaggcctacagtgagattgggatgaaaggcgagcgccggaggggcaaggggcacgatggcctttaccagggtctcagtacagccaccaaggacacctacgacgcccttcacatgcaggccctgccccctcgctctagaggatctggagcaacaaacttctcactactcaaacaagcaggtgacgtggaggagaatcccgggcctgggatccacatggccacttacgaggttctctgtgaggtggcgcggaaactgggcacggatgacagggaagtggtattgttcctcctaaacgtgttcatacctcaacccacactggcccaattaattggagctcttagagctttaaaggaggagggcaggttaacgtttcccctgttagcggaatgtctgtttcgtgcaggtcgcagagacctcttgcgcgacctgcttcacttagacccgcgttttttagagcgccacctagcgggcacaatgagttatttcagcccttatcagctcactgttctccacgtagacggggagctgtgtgcgagggatattaggtctttgatatttttaagcaaggacactatagggtctcgcagcacaccacagacattcttacactgggtgtactgtatggaaaacttagacctactgggtcccactgacgtggatgccctaatgtcaatgcttagatctttgtcaagagtagacctacagcgccaagtgcaaaccctaatgggccttcacctttccggcccatcacactcccaacactatcgccatacaccactcgagaccgatttctacgactacaaggacgacgatgacaagactagtggctccggcgagggcagaggaagtctactaacctgcggagatgtggaagaaaatcctggcccacatatgaccgagtacaagcccacggtgcgcctcgccacccgcgacgacgtccccagggccgtacgcaccctcgccgccgcgttcgccgactaccccgccacgcgccacaccgtcgatccggaccgccacatcgagcgggtcaccgagctgcaagaactcttcctcacgcgcgtcgggctcgacatcggcaaggtgtgggtcgcggacgacggcgccgcggtggcggtctggaccacgccggagagcgtcgaagcgggggcggtgttcgccgagatcggcccgcgcatggccgagttgagcggttcccggctggccgcgcagcaacagatggaaggcctcctggcgccgcaccggcccaaggagcccgcgtggttcctggccaccgtcggcgtctcgcccgaccaccagggcaagggtctgggcagcgccgtcgtgctccccggagtggaggcggccgagcgcgccggggtgcccgccttcctggagacctccgcgccccgcaacctccccttctacgagcggctcggcttcaccgtcaccgccgacgtcgaggtgcccgaaggaccgcgcacctggtgcatgacccgcaagcccggtgcctga

SEQ ID NO: 1379 - DNA, 2859 bp, Artificial Sequence
  Synthetic Polynucleotides
atggccttaccagtgaccgccttgctcctgccgctggccttgctgctccacgccgccaggccggacatccagatgacacagtctccggcgtcactgtccgcctccgtgggggagactgtgactattatttgtagggcatcagttaacatctactcttatttggcctggtaccagcagaagcaaggcaagagtcctcagctgctggtgtataatgcgaagatcctggcagagggcgtgccgagccggttctccggcagcggctcaggtacccaattttccctcaagatcaattcactgcagccagaggactttggcagttactattgtcaacaccactacggcacattcactttcgggtccggtacaaaattggagattaagcgaggcggaggcggaagtggaggcggaggatctggcggcggaggctctcaggtacagttgaaagaaagcgggcctggactggtagcgccttcccaatctctctccatcacgtgcaccatctctggcttctccctgacttcctatggagttcactgggtgaggcagccccccggcaagggactggaatggctggtcgtcatctggtccgacgggtccacaacctacaactccgctctgaaaagtcggctctctatttctaaagataatagcaagagccaggtgtttctgaaaatgaactctctgcagaccgatgatacggccatttactactgcgcttcacactatggctcaaccttggcattcgcttcctggggccacggaacactggtgaccgtttccgcagccacgcgtgagcagaaactgatctcggaagaggatctggcgaagcccaccacgacgccagcgccgcgaccaccaacaccggcgcccaccatcgcgtcgcagcccctgtccctgcgcccagaggcgtgccggccagcggcggggggcgcagtgcacacgagggggctggacttcgcctgtgacatctacatctgggcgcccttggccgggacttgtggggtccttctcctgtcactggttatcaccctttactgcaaacggggcagaaagaaactcctgtatatattcaaacaaccatttatgagaccagtacaaactactcaagaggaagatggctgtagctgccgatttccagaagaagaagaaggaggatgtgaactgagagtgaagttcagcaggagcgcagacgcccccgcgtaccagcagggccagaaccagctctataacgagctgaatctaggacgaagagaggagtacgatgttttggacaagagacgtggccgggaccctgagatggggggaaagccgagaaggaagaaccctcaggaaggcctgtacaatgaactgcagaaagataagatggcggaggcctacagtgagattgggatgaaaggcgagcgccggaggggcaaggggcacgatggcctttaccagggtctcagtacagccaccaaggacacctacgacgcccttcacatgcaggccctgccccctcgctctagaggatctggagcaacaaacttctcactactcaaacaagcaggtgacgtggaggagaatcccgggcctgggatccacatggccacttacgaggttctctgtgaggtggcgcggaaactgggcacggatgacagggaagtggtattgttcctcctaaacgtgttcatacctcaacccacactggcccaattaattggagctcttagagctttaaaggaggagggcaggttaacgtttcccctgttagcggaatgtctgtttcgtgcaggtcgcagagacctcttgcgcgacctgcttcacttagacccgcgttttttagagcgccacctagcgggcacaatgagttatttcagcccttatcagctcactgttctccacgtagacggggagctgtgtgcgagggatattaggtctttgatatttttaagcaaggacactatagggtctcgcagcacaccacagacattcttacactgggtgtactgtatggaaaacttagacctactgggtcccactgacgtggatgccctaatgtcaatgcttagatctttgtcaagagtagacctacagcgccaagtgcaaaccctaatgggccttcacctttccggcccatcacactcccaacactatcgccatacaccactcgagaccgatttctacgactacaaggacgacgatgacaagactagtggctccggcgagggcagaggaagtctactaacctgcggagatgtggaagaaaatcctggcccacatatgaccgagtacaagcccacggtgcgcctcgccacccgcgacgacgtccccagggccgtacgcaccctcgccgccgcgttcgccgactaccccgccacgcgccacaccgtcgatccggaccgccacatcgagcgggtcaccgagctgcaagaactcttcctcacgcgcgtcgggctcgacatcggcaaggtgtgggtcgcggacgacggcgccgcggtggcggtctggaccacgccggagagcgtcgaagcgggggcggtgttcgccgagatcggcccgcgcatggccgagttgagcggttcccggctggccgcgcagcaacagatggaaggcctcctggcgccgcaccggcccaaggagcccgcgtggttcctggccaccgtcggcgtctcgcccgaccaccagggcaagggtctgggcagcgccgtcgtgctccccggagtggaggcggccgagcgcgccggggtgcccgccttcctggagacctccgcgccccgcaacctccccttctacgagcggctcggcttcaccgtcaccgccgacgtcgaggtgcccgaaggaccgcgcacctggtgcatgacccgcaagcccggtgcctga

SEQ ID NO: 1380 - DNA, 2883 bp, Artificial Sequence
  Synthetic Polynucleotides
atggccttaccagtgaccgccttgctcctgccgctggccttgctgctccacgccgccaggccggacattgtgatgacccagtctcacaaattcatgtccacatcagtaggagacagggtcagcgtcacctgcaaggccagtcagaatgtgggtaataatgtagcctggtatcaacagaaaccagggcaatctcctaaagtactgatttactcggcatcctaccggtacagtggagtccctgatcgcttcacaggcagtggatctgggacagatttcactctcaccatcagtaatgtgcagtctgaagacttggcagagtatttctgtcagcaatataacacctatccattcacgttcggctcggggacaaagttggaaataaaaggcggaggcggaagtggaggcggaggatctggcggcggaggctctgaggtacagctggaggaaagcggtggaggactggtgcaacctggagggtctatgaagctctcttgcgtagcttctgggttcacgttctccaattactggatgaactgggtgcggcagtcccccgagaaaggcctggaatgggtagcagaaattcggttcaagtcccataactatgctacacactttgccgagtctgtcaaaggccggttcactattagtcgagacgacagcaagtcttcagtctacctgcagatgaataacttgcgggcagaggacacaggtatctactactgcaccaggagaatcggcaactccgactatgactggtggtactttgacgtctggggagcaggcaccagcgtgacggtgagttcagcctcaacgcgtgagcagaaactgatctcggaagaggatctggcgaagcccaccacgacgccagcgccgcgaccaccaacaccggcgcccaccatcgcgtcgcagcccctgtccctgcgcccagaggcgtgccggccagcggcggggggcgcagtgcacacgagggggctggacttcgcctgtgacatctacatctgggcgcccttggccgggacttgtggggtccttctcctgtcactggttatcaccctttactgcaaacggggcagaaagaaactcctgtatatattcaaacaaccatttatgagaccagtacaaactactcaagaggaagatggctgtagctgccgatttccagaagaagaagaaggaggatgtgaactgagagtgaagttcagcaggagcgcagacgcccccgcgtaccagcagggccagaaccagctctataacgagctgaatctaggacgaagagaggagtacgatgttttggacaagagacgtggccgggaccctgagatggggggaaagccgagaaggaagaaccctcaggaaggcctgtacaatgaactgcagaaagataagatggcggaggcctacagtgagattgggatgaaaggcgagcgccggaggggcaaggggcacgatggcctttaccagggtctcagtacagccaccaaggacacctacgacgcccttcacatgcaggccctgccccctcgctctagaggatctggagcaacaaacttctcactactcaaacaagcaggtgacgtggaggagaatcccgggcctgggatccacatggccacttacgaggttctctgtgaggtggcgcggaaactgggcacggatgacagggaagtggtattgttcctcctaaacgtgttcatacctcaacccacactggcccaattaattggagctcttagagctttaaaggaggagggcaggttaacgtttcccctgttagcggaatgtctgtttcgtgcaggtcgcagagacctcttgcgcgacctgcttcacttagacccgcgttttttagagcgccacctagcgggcacaatgagttatttcagcccttatcagctcactgttctccacgtagacggggagctgtgtgcgagggatattaggtctttgatatttttaagcaaggacactatagggtctcgcagcacaccacagacattcttacactgggtgtactgtatggaaaacttagacctactgggtcccactgacgtggatgccctaatgtcaatgcttagatctttgtcaagagtagacctacagcgccaagtgcaaaccctaatgggccttcacctttccggcccatcacactcccaacactatcgccatacaccactcgagaccgatttctacgactacaaggacgacgatgacaagactagtggctccggcgagggcagaggaagtctactaacctgcggagatgtggaagaaaatcctggcccacatatgaccgagtacaagcccacggtgcgcctcgccacccgcgacgacgtccccagggccgtacgcaccctcgccgccgcgttcgccgactaccccgccacgcgccacaccgtcgatccggaccgccacatcgagcgggtcaccgagctgcaagaactcttcctcacgcgcgtcgggctcgacatcggcaaggtgtgggtcgcggacgacggcgccgcggtggcggtctggaccacgccggagagcgtcgaagcgggggcggtgttcgccgagatcggcccgcgcatggccgagttgagcggttcccggctggccgcgcagcaacagatggaaggcctcctggcgccgcaccggcccaaggagcccgcgtggttcctggccaccgtcggcgtctcgcccgaccaccagggcaagggtctgggcagcgccgtcgtgctccccggagtggaggcggccgagcgcgccggggtgcccgccttcctggagacctccgcgccccgcaacctccccttctacgagcggctcggcttcaccgtcaccgccgacgtcgaggtgcccgaaggaccgcgcacctggtgcatgacccgcaagcccggtgcctga

SEQ ID NO: 1381 - DNA, 2871 bp, Artificial Sequence; identical to SEQ ID NO: 1266
  Synthetic Polynucleotides

SEQ ID NO: 1382 - DNA, 2889 bp, Artificial Sequence
  Synthetic Polynucleotides
atggccttaccagtgaccgccttgctcctgccgctggccttgctgctccacgccgccaggccggaccagagcgtgctgacacagcctccatccgtgtctggcgctccaggccagagagtgaccatctcctgtaccggcagcagcagcaacatcggagccggctatgacgtgcactggtatcagcaactgcccggcaccgcccccaagctgctgatctacggcaacagcaacagacccagcggcgtgcccgatagattcagcggcagcaagagcggcacaagcgccagcctggctatcactggactccaggccgaggacgaggccgactactactgccagagctacgacaacagcctgtcctcctgggtgttcggcggaggcaccaagctgacagtgctgggccagcctaagggcggaggcggaagtggaggcggaggatctggcggcggaggctctgaagtgcaactccagcagagcggagccgaagtgaagaaacccggcagctccgtgaaggtgtcctgcaaggcttccggcggcaccttcagcagctacgccatttcttgggtgcgccaggcccctggacagggcctggaatggatgggcagaatcatccccatcctgggaatcgccaactacgcccagaaattccagggccgcgtgaccatcaccgccgacaagagcacaagcaccgcctacatggaactgagcagcctgcggagcgaggacaccgccgtgtactactgcgccagagatgtgggcagcggctcctacagcctggactattggggccagggcaccctcgtgaccgtgtctagtacgcgtgagcagaaactgatctcggaagaggatctggcgaagcccaccacgacgccagcgccgcgaccaccaacaccggcgcccaccatcgcgtcgcagcccctgtccctgcgcccagaggcgtgccggccagcggcggggggcgcagtgcacacgagggggctggacttcgcctgtgacatctacatctgggcgcccttggccgggacttgtggggtccttctcctgtcactggttatcaccctttactgcaaacggggcagaaagaaactcctgtatatattcaaacaaccatttatgagaccagtacaaactactcaagaggaagatggctgtagctgccgatttccagaagaagaagaaggaggatgtgaactgagagtgaagttcagcaggagcgcagacgcccccgcgtaccagcagggccagaaccagctctataacgagctgaatctaggacgaagagaggagtacgatgttttggacaagagacgtggccgggaccctgagatggggggaaagccgagaaggaagaaccctcaggaaggcctgtacaatgaactgcagaaagataagatggcggaggcctacagtgagattgggatgaaaggcgagcgccggaggggcaaggggcacgatggcctttaccagggtctcagtacagccaccaaggacacctacgacgcccttcacatgcaggccctgccccctcgctctagaggatctggagcaacaaacttctcactactcaaacaagcaggtgacgtggaggagaatcccgggcctgggatccacatggccacttacgaggttctctgtgaggtggcgcggaaactgggcacggatgacagggaagtggtattgttcctcctaaacgtgttcatacctcaacccacactggcccaattaattggagctcttagagctttaaaggaggagggcaggttaacgtttcccctgttagcggaatgtctgtttcgtgcaggtcgcagagacctcttgcgcgacctgcttcacttagacccgcgttttttagagcgccacctagcgggcacaatgagttatttcagcccttatcagctcactgttctccacgtagacggggagctgtgtgcgagggatattaggtctttgatatttttaagcaaggacactatagggtctcgcagcacaccacagacattcttacactgggtgtactgtatggaaaacttagacctactgggtcccactgacgtggatgccctaatgtcaatgcttagatctttgtcaagagtagacctacagcgccaagtgcaaaccctaatgggccttcacctttccggcccatcacactcccaacactatcgccatacaccactcgagaccgatttctacgactacaaggacgacgatgacaagactagtggctccggcgagggcagaggaagtctactaacctgcggagatgtggaagaaaatcctggcccacatatgaccgagtacaagcccacggtgcgcctcgccacccgcgacgacgtccccagggccgtacgcaccctcgccgccgcgttcgccgactaccccgccacgcgccacaccgtcgatccggaccgccacatcgagcgggtcaccgagctgcaagaactcttcctcacgcgcgtcgggctcgacatcggcaaggtgtgggtcgcggacgacggcgccgcggtggcggtctggaccacgccggagagcgtcgaagcgggggcggtgttcgccgagatcggcccgcgcatggccgagttgagcggttcccggctggccgcgcagcaacagatggaaggcctcctggcgccgcaccggcccaaggagcccgcgtggttcctggccaccgtcggcgtctcgcccgaccaccagggcaagggtctgggcagcgccgtcgtgctccccggagtggaggcggccgagcgcgccggggtgcccgccttcctggagacctccgcgccccgcaacctccccttctacgagcggctcggcttcaccgtcaccgccgacgtcgaggtgcccgaaggaccgcgcacctggtgcatgacccgcaagcccggtgcctga

SEQ ID NO: 1383 - DNA, 2880 bp, Artificial Sequence
  Synthetic Polynucleotides
atggccttaccagtgaccgccttgctcctgccgctggccttgctgctccacgccgccaggccggaccagagcgtcgtgacacagcctccatctgtgtctgccgcccctggccggaaagtgaccatctcttgtagcggcagcagcagcaacatcggcagcaactacgtgtcctggtatcagcaggtgcccggcaccgcccctaagctgctgatctacgaggacgacaagcggcccagcggcatccccgatagattcagcggctctaagagcggcaccagcgccacactgggcatcaccggactccagacaggcgacgaggccgactacttctgcgccacctgggacagaaccgtgaacgtggtgcgctttggcggcggaaccagactgacagtgcacagccagcctaagggcggaggcggaagtggaggcggaggatctggcggcggaggctctcaactccaactccaggaaagcggccctggcctcgtgaagcctagcgagacactgagcctgacctgcaccgtgtctggcggcagcatctccagcagctcctactactggggctggatcagacagccccctggcaagggcctggaatggatcggctccatctactacagcggaagcacctactacaaccccagcctgaagtcccgcgtgaccatcagcgtggacaccagcaagaaccagttctccctgaagctgagcagcgtgacagccgccgataccgccgtgtactactgtgccagacatgtgggccacgagctggattactggggccagggcacactcgtgaccgtgtctagtacgcgtgagcagaaactgatctcggaagaggatctggcgaagcccaccacgacgccagcgccgcgaccaccaacaccggcgcccaccatcgcgtcgcagcccctgtccctgcgcccagaggcgtgccggccagcggcggggggcgcagtgcacacgagggggctggacttcgcctgtgacatctacatctgggcgcccttggccgggacttgtggggtccttctcctgtcactggttatcaccctttactgcaaacggggcagaaagaaactcctgtatatattcaaacaaccatttatgagaccagtacaaactactcaagaggaagatggctgtagctgccgatttccagaagaagaagaaggaggatgtgaactgagagtgaagttcagcaggagcgcagacgcccccgcgtaccagcagggccagaaccagctctataacgagctgaatctaggacgaagagaggagtacgatgttttggacaagagacgtggccgggaccctgagatggggggaaagccgagaaggaagaaccctcaggaaggcctgtacaatgaactgcagaaagataagatggcggaggcctacagtgagattgggatgaaaggcgagcgccggaggggcaaggggcacgatggcctttaccagggtctcagtacagccaccaaggacacctacgacgcccttcacatgcaggccctgccccctcgctctagaggatctggagcaacaaacttctcactactcaaacaagcaggtgacgtggaggagaatcccgggcctgggatccacatggccacttacgaggttctctgtgaggtggcgcggaaactgggcacggatgacagggaagtggtattgttcctcctaaacgtgttcatacctcaacccacactggcccaattaattggagctcttagagctttaaaggaggagggcaggttaacgtttcccctgttagcggaatgtctgtttcgtgcaggtcgcagagacctcttgcgcgacctgcttcacttagacccgcgttttttagagcgccacctagcgggcacaatgagttatttcagcccttatcagctcactgttctccacgtagacggggagctgtgtgcgagggatattaggtctttgatatttttaagcaaggacactatagggtctcgcagcacaccacagacattcttacactgggtgtactgtatggaaaacttagacctactgggtcccactgacgtggatgccctaatgtcaatgcttagatctttgtcaagagtagacctacagcgccaagtgcaaaccctaatgggccttcacctttccggcccatcacactcccaacactatcgccatacaccactcgagaccgatttctacgactacaaggacgacgatgacaagactagtggctccggcgagggcagaggaagtctactaacctgcggagatgtggaagaaaatcctggcccacatatgaccgagtacaagcccacggtgcgcctcgccacccgcgacgacgtccccagggccgtacgcaccctcgccgccgcgttcgccgactaccccgccacgcgccacaccgtcgatccggaccgccacatcgagcgggtcaccgagctgcaagaactcttcctcacgcgcgtcgggctcgacatcggcaaggtgtgggtcgcggacgacggcgccgcggtggcggtctggaccacgccggagagcgtcgaagcgggggcggtgttcgccgagatcggcccgcgcatggccgagttgagcggttcccggctggccgcgcagcaacagatggaaggcctcctggcgccgcaccggcccaaggagcccgcgtggttcctggccaccgtcggcgtctcgcccgaccaccagggcaagggtctgggcagcgccgtcgtgctccccggagtggaggcggccgagcgcgccggggtgcccgccttcctggagacctccgcgccccgcaacctccccttctacgagcggctcggcttcaccgtcaccgccgacgtcgaggtgcccgaaggaccgcgcacctggtgcatgacccgcaagcccggtgcctga

SEQ ID NO: 1384 - DNA, 2862 bp, Artificial Sequence
  Synthetic Polynucleotides
atggccttaccagtgaccgccttgctcctgccgctggccttgctgctccacgccgccaggccggacatccagatgacccagagccccagcagcctgtctgccagcgtgggcgacagagtgaccatcacctgtagagccagccagagcatcagcagctacctgaactggtatcagcagaagcccggcaaggcccccaaactgctgatctacgccgccagctctctgcagtctggcgtgccatctggctttagcggcagcggctctggcaccgacttcaccctgaccatcagctccctgcagcccgaggacttcgccacctactactgccagcagagctacagcacccccctgacctttggcggaggcaccaaggtggaaatcaagagaggcggcggaggctcaggcggaggcggatctggcgggggaggatctcaggtgcaactgcaggaatctggccctggcctcgtgaagcccagcgagacactgagcctgacctgtaccgtgtctggcggctctgtgtccagcggcagctactactggtcctggatcagacagccccctggcaagggcctggaatggatcggctacatctactacagcggctccaccaactacaaccccagcctgaagtcccgcgtgaccatctccgtggacaccagcaagaaccagttctccctgaagctgagcagcgtgacagccgccgataccgccgtgtactactgtgccagagagggcaagaacggggccttcgacatctggggccagggcacaatggtcaccgtgtcctctacgcgtgagcagaaactgatctcggaagaggatctggcgaagcccaccacgacgccagcgccgcgaccaccaacaccggcgcccaccatcgcgtcgcagcccctgtccctgcgcccagaggcgtgccggccagcggcggggggcgcagtgcacacgagggggctggacttcgcctgtgacatctacatctgggcgcccttggccgggacttgtggggtccttctcctgtcactggttatcaccctttactgcaaacggggcagaaagaaactcctgtatatattcaaacaaccatttatgagaccagtacaaactactcaagaggaagatggctgtagctgccgatttccagaagaagaagaaggaggatgtgaactgagagtgaagttcagcaggagcgcagacgcccccgcgtaccagcagggccagaaccagctctataacgagctgaatctaggacgaagagaggagtacgatgttttggacaagagacgtggccgggaccctgagatggggggaaagccgagaaggaagaaccctcaggaaggcctgtacaatgaactgcagaaagataagatggcggaggcctacagtgagattgggatgaaaggcgagcgccggaggggcaaggggcacgatggcctttaccagggtctcagtacagccaccaaggacacctacgacgcccttcacatgcaggccctgccccctcgctctagaggatctggagcaacaaacttctcactactcaaacaagcaggtgacgtggaggagaatcccgggcctgggatccacatggccacttacgaggttctctgtgaggtggcgcggaaactgggcacggatgacagggaagtggtattgttcctcctaaacgtgttcatacctcaacccacactggcccaattaattggagctcttagagctttaaaggaggagggcaggttaacgtttcccctgttagcggaatgtctgtttcgtgcaggtcgcagagacctcttgcgcgacctgcttcacttagacccgcgttttttagagcgccacctagcgggcacaatgagttatttcagcccttatcagctcactgttctccacgtagacggggagctgtgtgcgagggatattaggtctttgatatttttaagcaaggacactatagggtctcgcagcacaccacagacattcttacactgggtgtactgtatggaaaacttagacctactgggtcccactgacgtggatgccctaatgtcaatgcttagatctttgtcaagagtagacctacagcgccaagtgcaaaccctaatgggccttcacctttccggcccatcacactcccaacactatcgccatacaccactcgagaccgatttctacgactacaaggacgacgatgacaagactagtggctccggcgagggcagaggaagtctactaacctgcggagatgtggaagaaaatcctggcccacatatgaccgagtacaagcccacggtgcgcctcgccacccgcgacgacgtccccagggccgtacgcaccctcgccgccgcgttcgccgactaccccgccacgcgccacaccgtcgatccggaccgccacatcgagcgggtcaccgagctgcaagaactcttcctcacgcgcgtcgggctcgacatcggcaaggtgtgggtcgcggacgacggcgccgcggtggcggtctggaccacgccggagagcgtcgaagcgggggcggtgttcgccgagatcggcccgcgcatggccgagttgagcggttcccggctggccgcgcagcaacagatggaaggcctcctggcgccgcaccggcccaaggagcccgcgtggttcctggccaccgtcggcgtctcgcccgaccaccagggcaagggtctgggcagcgccgtcgtgctccccggagtggaggcggccgagcgcgccggggtgcccgccttcctggagacctccgcgccccgcaacctccccttctacgagcggctcggcttcaccgtcaccgccgacgtcgaggtgcccgaaggaccgcgcacctggtgcatgacccgcaagcccggtgcctga

SEQ ID NO: 1385 - DNA, 2520 bp, Artificial Sequence
  Synthetic Polynucleotides
atggccctgcccgtgacagccctgctgctgcctctggctctgctgctgcacgccgccagacccgatgaattcgatgttcagttggtggagtctggtggcggtttggtgcagccaggtggctccctgcgactcagttgtgcagcctccgggttcattctggattactacgctattggttggtttcgacaggcccccggaaaggagagagagggcgtgctctgcattgatgccagcgacgacattacctactacgccgattctgtgaagggccgcttcaccatcagtagagacaatagcaagaatacagtctacctgcagatgaactccctgcgcccagaagacactgccgtctactactgtgctacccctatcgggctttcttcctcttgccttctcgaatatgactacgattactgggggcaggggacgctggtcaccgtgtctagcacgcgtgagcagaaactgatctcggaagaggatctggcgaagcccaccacgacgccagcgccgcgaccaccaacaccggcgcccaccatcgcgtcgcagcccctgtccctgcgcccagaggcgtgccggccagcggcggggggcgcagtgcacacgagggggctggacttcgcctgtgacatctacatctgggcgcccttggccgggacttgtggggtccttctcctgtcactggttatcaccctttactgcaaacggggcagaaagaaactcctgtatatattcaaacaaccatttatgagaccagtacaaactactcaagaggaagatggctgtagctgccgatttccagaagaagaagaaggaggatgtgaactgagagtgaagttcagcaggagcgcagacgcccccgcgtaccagcagggccagaaccagctctataacgagctgaatctaggacgaagagaggagtacgatgttttggacaagagacgtggccgggaccctgagatggggggaaagccgagaaggaagaaccctcaggaaggcctgtacaatgaactgcagaaagataagatggcggaggcctacagtgagattgggatgaaaggcgagcgccggaggggcaaggggcacgatggcctttaccagggtctcagtacagccaccaaggacacctacgacgcccttcacatgcaggccctgccccctcgctctagaggatctggagcaacaaacttctcactactcaaacaagcaggtgacgtggaggagaatcccgggcctgggatccacatggccacttacgaggttctctgtgaggtggcgcggaaactgggcacggatgacagggaagtggtattgttcctcctaaacgtgttcatacctcaacccacactggcccaattaattggagctcttagagctttaaaggaggagggcaggttaacgtttcccctgttagcggaatgtctgtttcgtgcaggtcgcagagacctcttgcgcgacctgcttcacttagacccgcgttttttagagcgccacctagcgggcacaatgagttatttcagcccttatcagctcactgttctccacgtagacggggagctgtgtgcgagggatattaggtctttgatatttttaagcaaggacactatagggtctcgcagcacaccacagacattcttacactgggtgtactgtatggaaaacttagacctactgggtcccactgacgtggatgccctaatgtcaatgcttagatctttgtcaagagtagacctacagcgccaagtgcaaaccctaatgggccttcacctttccggcccatcacactcccaacactatcgccatacaccactcgagaccgatttctacgactacaaggacgacgatgacaagactagtggctccggcgagggcagaggaagtctactaacctgcggagatgtggaagaaaatcctggcccacatatgaccgagtacaagcccacggtgcgcctcgccacccgcgacgacgtccccagggccgtacgcaccctcgccgccgcgttcgccgactaccccgccacgcgccacaccgtcgatccggaccgccacatcgagcgggtcaccgagctgcaagaactcttcctcacgcgcgtcgggctcgacatcggcaaggtgtgggtcgcggacgacggcgccgcggtggcggtctggaccacgccggagagcgtcgaagcgggggcggtgttcgccgagatcggcccgcgcatggccgagttgagcggttcccggctggccgcgcagcaacagatggaaggcctcctggcgccgcaccggcccaaggagcccgcgtggttcctggccaccgtcggcgtctcgcccgaccaccagggcaagggtctgggcagcgccgtcgtgctccccggagtggaggcggccgagcgcgccggggtgcccgccttcctggagacctccgcgccccgcaacctccccttctacgagcggctcggcttcaccgtcaccgccgacgtcgaggtgcccgaaggaccgcgcacctggtgcatgacccgcaagcccggtgcctga

SEQ ID NO: 1386 - DNA, 3009 bp, Artificial Sequence
  Synthetic Polynucleotides
atggccctgcccgtgacagccctgctgctgcctctggctctgctgctgcacgccgccagacccgatgaattcgatgttcagttggtggagtctggtggcggtttggtgcagccaggtggctccctgcgactcagttgtgcagcctccgggttcattctggattactacgctattggttggtttcgacaggcccccggaaaggagagagagggcgtgctctgcattgatgccagcgacgacattacctactacgccgattctgtgaagggccgcttcaccatcagtagagacaatagcaagaatacagtctacctgcagatgaactccctgcgcccagaagacactgccgtctactactgtgctacccctatcgggctttcttcctcttgccttctcgaatatgactacgattactgggggcaggggacgctggtcaccgtgtctagcctcgagggaggtagcggctccgggggaggcggaagtggaggcggaggatctgggtctggaggaagcggatctggaggctcagggtcagggggctcaggcagtggaggctctttcgaagtgcaactggtggagtccggcggtggactggtacagcctgggggttcactgcgcctgtcctgcgccgccagcggaagaacctattacctcaatgctatgggttggttccgccaggccccaggaaaggagcgcgagttcgtggcggctattgactggtccgaggggaacaaggactatgctgattccgtgaagggcaggtttaccatcagccgggataattcaaaaaatactgtttatttgcagatgaactctcttagaccagaagacactgctgtctattactgcgccgctgacacccctccttggggaccactgatttatatcgaaagctatgattcctgggggcagggcacactcgtcaccgtgagtagcacgcgtgagcagaaactgatctcggaagaggatctggcgaagcccaccacgacgccagcgccgcgaccaccaacaccggcgcccaccatcgcgtcgcagcccctgtccctgcgcccagaggcgtgccggccagcggcggggggcgcagtgcacacgagggggctggacttcgcctgtgacatctacatctgggcgcccttggccgggacttgtggggtccttctcctgtcactggttatcaccctttactgcaaacggggcagaaagaaactcctgtatatattcaaacaaccatttatgagaccagtacaaactactcaagaggaagatggctgtagctgccgatttccagaagaagaagaaggaggatgtgaactgagagtgaagttcagcaggagcgcagacgcccccgcgtaccagcagggccagaaccagctctataacgagctgaatctaggacgaagagaggagtacgatgttttggacaagagacgtggccgggaccctgagatggggggaaagccgagaaggaagaaccctcaggaaggcctgtacaatgaactgcagaaagataagatggcggaggcctacagtgagattgggatgaaaggcgagcgccggaggggcaaggggcacgatggcctttaccagggtctcagtacagccaccaaggacacctacgacgcccttcacatgcaggccctgccccctcgctctagaggatctggagcaacaaacttctcactactcaaacaagcaggtgacgtggaggagaatcccgggcctgggatccacatggccacttacgaggttctctgtgaggtggcgcggaaactgggcacggatgacagggaagtggtattgttcctcctaaacgtgttcatacctcaacccacactggcccaattaattggagctcttagagctttaaaggaggagggcaggttaacgtttcccctgttagcggaatgtctgtttcgtgcaggtcgcagagacctcttgcgcgacctgcttcacttagacccgcgttttttagagcgccacctagcgggcacaatgagttatttcagcccttatcagctcactgttctccacgtagacggggagctgtgtgcgagggatattaggtctttgatatttttaagcaaggacactatagggtctcgcagcacaccacagacattcttacactgggtgtactgtatggaaaacttagacctactgggtcccactgacgtggatgccctaatgtcaatgcttagatctttgtcaagagtagacctacagcgccaagtgcaaaccctaatgggccttcacctttccggcccatcacactcccaacactatcgccatacaccactcgagaccgatttctacgactacaaggacgacgatgacaagactagtggctccggcgagggcagaggaagtctactaacctgcggagatgtggaagaaaatcctggcccacatatgaccgagtacaagcccacggtgcgcctcgccacccgcgacgacgtccccagggccgtacgcaccctcgccgccgcgttcgccgactaccccgccacgcgccacaccgtcgatccggaccgccacatcgagcgggtcaccgagctgcaagaactcttcctcacgcgcgtcgggctcgacatcggcaaggtgtgggtcgcggacgacggcgccgcggtggcggtctggaccacgccggagagcgtcgaagcgggggcggtgttcgccgagatcggcccgcgcatggccgagttgagcggttcccggctggccgcgcagcaacagatggaaggcctcctggcgccgcaccggcccaaggagcccgcgtggttcctggccaccgtcggcgtctcgcccgaccaccagggcaagggtctgggcagcgccgtcgtgctccccggagtggaggcggccgagcgcgccggggtgcccgccttcctggagacctccgcgccccgcaacctccccttctacgagcggctcggcttcaccgtcaccgccgacgtcgaggtgcccgaaggaccgcgcacctggtgcatgacccgcaagcccggtgcctga

SEQ ID NO: 1387 - DNA, 2862 bp, Artificial Sequence
  Synthetic Polynucleotides
atggccttaccagtgaccgccttgctcctgccgctggccttgctgctccacgccgccaggccggaccagatcgtgctgacccagtcccccgctattatgtccgcatcaccgggcgaaaaagtgacgatctcctgtagcgcttcatctagcgtctcctacatgtattggtatcaacagaaacctgggtctagcccaaagccgtggatctacagaaccagtaaccttgccagtggggtgccagcccgcttcagcggtagtggcagtggaacttcctatagcctcacaataagcaacatggaggctgaagatgccgctgcctattactgccagcagtaccacagttacccaaccacgttcggcgggggaactaagctcgaagtaaaaggcggaggcggaagtggaggcggaggatctggcggcggaggctctgaggtgcagctggtggaatctgggggcggcctggtccaacctaagggatcactcaagctctcttgtgcggccagcggattctctttcaatacctatgctatgaattgggtgagacaggcgcccggaaagggcctcgaatggatagcccatatccggtcaaaatcaaacaatttcgcaacctactatgcggactccgtgaaggaccgattttccatctcccgagatgcctccgagaatattctgttcctgcagatgaataacctcaagacagaggacaccgccatgtactactgtgtgcgccagggcggtgactttcccatggattactgggggcaggggaccagcgtgaccgtgagctctacgcgtgagcagaaactgatctcggaagaggatctggcgaagcccaccacgacgccagcgccgcgaccaccaacaccggcgcccaccatcgcgtcgcagcccctgtccctgcgcccagaggcgtgccggccagcggcggggggcgcagtgcacacgagggggctggacttcgcctgtgacatctacatctgggcgcccttggccgggacttgtggggtccttctcctgtcactggttatcaccctttactgcaaacggggcagaaagaaactcctgtatatattcaaacaaccatttatgagaccagtacaaactactcaagaggaagatggctgtagctgccgatttccagaagaagaagaaggaggatgtgaactgagagtgaagttcagcaggagcgcagacgcccccgcgtaccagcagggccagaaccagctctataacgagctgaatctaggacgaagagaggagtacgatgttttggacaagagacgtggccgggaccctgagatggggggaaagccgagaaggaagaaccctcaggaaggcctgtacaatgaactgcagaaagataagatggcggaggcctacagtgagattgggatgaaaggcgagcgccggaggggcaaggggcacgatggcctttaccagggtctcagtacagccaccaaggacacctacgacgcccttcacatgcaggccctgccccctcgctctagaggatctggagcaacaaacttctcactactcaaacaagcaggtgacgtggaggagaatcccgggcctgggatccacatggccacttacgaggttctctgtgaggtggcgcggaaactgggcacggatgacagggaagtggtattgttcctcctaaacgtgttcatacctcaacccacactggcccaattaattggagctcttagagctttaaaggaggagggcaggttaacgtttcccctgttagcggaatgtctgtttcgtgcaggtcgcagagacctcttgcgcgacctgcttcacttagacccgcgttttttagagcgccacctagcgggcacaatgagttatttcagcccttatcagctcactgttctccacgtagacggggagctgtgtgcgagggatattaggtctttgatatttttaagcaaggacactatagggtctcgcagcacaccacagacattcttacactgggtgtactgtatggaaaacttagacctactgggtcccactgacgtggatgccctaatgtcaatgcttagatctttgtcaagagtagacctacagcgccaagtgcaaaccctaatgggccttcacctttccggcccatcacactcccaacactatcgccatacaccactcgagaccgatttctacgactacaaggacgacgatgacaagactagtggctccggcgagggcagaggaagtctactaacctgcggagatgtggaagaaaatcctggcccacatatgaccgagtacaagcccacggtgcgcctcgccacccgcgacgacgtccccagggccgtacgcaccctcgccgccgcgttcgccgactaccccgccacgcgccacaccgtcgatccggaccgccacatcgagcgggtcaccgagctgcaagaactcttcctcacgcgcgtcgggctcgacatcggcaaggtgtgggtcgcggacgacggcgccgcggtggcggtctggaccacgccggagagcgtcgaagcgggggcggtgttcgccgagatcggcccgcgcatggccgagttgagcggttcccggctggccgcgcagcaacagatggaaggcctcctggcgccgcaccggcccaaggagcccgcgtggttcctggccaccgtcggcgtctcgcccgaccaccagggcaagggtctgggcagcgccgtcgtgctccccggagtggaggcggccgagcgcgccggggtgcccgccttcctggagacctccgcgccccgcaacctccccttctacgagcggctcggcttcaccgtcaccgccgacgtcgaggtgcccgaaggaccgcgcacctggtgcatgacccgcaagcccggtgcctga

SEQ ID NO: 1388 - DNA, 2859 bp, Artificial Sequence
  Synthetic Polynucleotides
atggccttaccagtgaccgccttgctcctgccgctggccttgctgctccacgccgccaggccggacgacatccagatgacccagagcagcagcagcttcagcgtgagcctgggcgacagagtgaccatcacctgcatggccagcgaggacatctacatcagactggcctggtaccagcagaagcccggcaacgcccccagactgctgatcagcgccgccaccagcctggagaccggcgtgcccagcagattcagcggcagcggcagcggcaaggactacaccctgagcatcaccagcctgcagaccgaggacgtgggcacctactactgccagcagtactggagcagcccctggaccttcggcggcggcaccaagctggagatcaacggcggaggcggaagtggaggcggaggatctggcggcggaggctctgacgtgcagctgcaggagagcggccccggcctggtgaagcccagccagagcctgagcctgacctgcaccgtgaccggctacagcatcaccagcgactacacctggaactggatcagacagttccccggcaacaagctggagtggatgggctacatcacctacagcggcagcaccagctacaaccccagcctgaagagcagaaacagcatcaccagagacaccagcaagaaccagttcttcctgcagctgaacagcgtgaccaccgaggacaccgccacctactactgcgccagactgggcagaagatacacaatggactactggggccagggcaccagcgtgaccgtgagcagcacgcgtgagcagaaactgatctcggaagaggatctggcgaagcccaccacgacgccagcgccgcgaccaccaacaccggcgcccaccatcgcgtcgcagcccctgtccctgcgcccagaggcgtgccggccagcggcggggggcgcagtgcacacgagggggctggacttcgcctgtgacatctacatctgggcgcccttggccgggacttgtggggtccttctcctgtcactggttatcaccctttactgcaaacggggcagaaagaaactcctgtatatattcaaacaaccatttatgagaccagtacaaactactcaagaggaagatggctgtagctgccgatttccagaagaagaagaaggaggatgtgaactgagagtgaagttcagcaggagcgcagacgcccccgcgtaccagcagggccagaaccagctctataacgagctgaatctaggacgaagagaggagtacgatgttttggacaagagacgtggccgggaccctgagatggggggaaagccgagaaggaagaaccctcaggaaggcctgtacaatgaactgcagaaagataagatggcggaggcctacagtgagattgggatgaaaggcgagcgccggaggggcaaggggcacgatggcctttaccagggtctcagtacagccaccaaggacacctacgacgcccttcacatgcaggccctgccccctcgctctagaggatctggagcaacaaacttctcactactcaaacaagcaggtgacgtggaggagaatcccgggcctgggatccacatggccacttacgaggttctctgtgaggtggcgcggaaactgggcacggatgacagggaagtggtattgttcctcctaaacgtgttcatacctcaacccacactggcccaattaattggagctcttagagctttaaaggaggagggcaggttaacgtttcccctgttagcggaatgtctgtttcgtgcaggtcgcagagacctcttgcgcgacctgcttcacttagacccgcgttttttagagcgccacctagcgggcacaatgagttatttcagcccttatcagctcactgttctccacgtagacggggagctgtgtgcgagggatattaggtctttgatatttttaagcaaggacactatagggtctcgcagcacaccacagacattcttacactgggtgtactgtatggaaaacttagacctactgggtcccactgacgtggatgccctaatgtcaatgcttagatctttgtcaagagtagacctacagcgccaagtgcaaaccctaatgggccttcacctttccggcccatcacactcccaacactatcgccatacaccactcgagaccgatttctacgactacaaggacgacgatgacaagactagtggctccggcgagggcagaggaagtctactaacctgcggagatgtggaagaaaatcctggcccacatatgaccgagtacaagcccacggtgcgcctcgccacccgcgacgacgtccccagggccgtacgcaccctcgccgccgcgttcgccgactaccccgccacgcgccacaccgtcgatccggaccgccacatcgagcgggtcaccgagctgcaagaactcttcctcacgcgcgtcgggctcgacatcggcaaggtgtgggtcgcggacgacggcgccgcggtggcggtctggaccacgccggagagcgtcgaagcgggggcggtgttcgccgagatcggcccgcgcatggccgagttgagcggttcccggctggccgcgcagcaacagatggaaggcctcctggcgccgcaccggcccaaggagcccgcgtggttcctggccaccgtcggcgtctcgcccgaccaccagggcaagggtctgggcagcgccgtcgtgctccccggagtggaggcggccgagcgcgccggggtgcccgccttcctggagacctccgcgccccgcaacctccccttctacgagcggctcggcttcaccgtcaccgccgacgtcgaggtgcccgaaggaccgcgcacctggtgcatgacccgcaagcccggtgcctga

SEQ ID NO: 1389 - DNA, 2856 bp, Artificial Sequence
  Synthetic Polynucleotides
atggccctgcctgtgacagctctgctgctgcctctggcactgctgctgcacgccgccagacctgatgtgcagctccaggaaagcggccctggcctcgtgaagcctagccagagcctgagcctgacatgcaccgtgaccggctacagcatcaccagcgactacacctggaactggatcagacagttccccggcaacaagctggaatggatgggctacatcacctacagcggcagcaccagctacaaccccagcctgaagtcccggaactccatcaccagagacaccagcaagaaccagttcttcttgcagctgaacagcgtgaccaccgaggacaccgccacctactactgcgccagactgggcagacggtacaccatggactattggggccagggcacctccgtgaccgtgtctagcggaggcggaggaagtggcggcggaggatctgggggaggcggaagcgatatccagatgacccagtccagcagcagcttcagcgtgtccctgggcgacagagtgaccatcacctgtatggcctccgaggacatctacatccggctggcctggtatcagcagaagcccggcaacgcccccagactgctgattagcgccgccacctctctggaaaccggcgtgccaagcagattcagcggctctggcagcggcaaggactacaccctgagcatcacctccttgcagaccgaggacgtgggcacctactattgccagcagtattggagcagcccctggacctttggcggaggcacaaagctggaaatcaacacgcgtgagcagaaactgatctcggaagaggatctggcgaagcccaccacgacgccagcgccgcgaccaccaacaccggcgcccaccatcgcgtcgcagcccctgtccctgcgcccagaggcgtgccggccagcggcggggggcgcagtgcacacgagggggctggacttcgcctgtgacatctacatctgggcgcccttggccgggacttgtggggtccttctcctgtcactggttatcaccctttactgcaaacggggcagaaagaaactcctgtatatattcaaacaaccatttatgagaccagtacaaactactcaagaggaagatggctgtagctgccgatttccagaagaagaagaaggaggatgtgaactgagagtgaagttcagcaggagcgcagacgcccccgcgtaccagcagggccagaaccagctctataacgagctgaatctaggacgaagagaggagtacgatgttttggacaagagacgtggccgggaccctgagatggggggaaagccgagaaggaagaaccctcaggaaggcctgtacaatgaactgcagaaagataagatggcggaggcctacagtgagattgggatgaaaggcgagcgccggaggggcaaggggcacgatggcctttaccagggtctcagtacagccaccaaggacacctacgacgcccttcacatgcaggccctgccccctcgctctagaggatctggagcaacaaacttctcactactcaaacaagcaggtgacgtggaggagaatcccgggcctgggatccacatggccacttacgaggttctctgtgaggtggcgcggaaactgggcacggatgacagggaagtggtattgttcctcctaaacgtgttcatacctcaacccacactggcccaattaattggagctcttagagctttaaaggaggagggcaggttaacgtttcccctgttagcggaatgtctgtttcgtgcaggtcgcagagacctcttgcgcgacctgcttcacttagacccgcgttttttagagcgccacctagcgggcacaatgagttatttcagcccttatcagctcactgttctccacgtagacggggagctgtgtgcgagggatattaggtctttgatatttttaagcaaggacactatagggtctcgcagcacaccacagacattcttacactgggtgtactgtatggaaaacttagacctactgggtcccactgacgtggatgccctaatgtcaatgcttagatctttgtcaagagtagacctacagcgccaagtgcaaaccctaatgggccttcacctttccggcccatcacactcccaacactatcgccatacaccactcgagaccgatttctacgactacaaggacgacgatgacaagactagtggctccggcgagggcagaggaagtctactaacctgcggagatgtggaagaaaatcctggcccacatatgaccgagtacaagcccacggtgcgcctcgccacccgcgacgacgtccccagggccgtacgcaccctcgccgccgcgttcgccgactaccccgccacgcgccacaccgtcgatccggaccgccacatcgagcgggtcaccgagctgcaagaactcttcctcacgcgcgtcgggctcgacatcggcaaggtgtgggtcgcggacgacggcgccgcggtggcggtctggaccacgccggagagcgtcgaagcgggggcggtgttcgccgagatcggcccgcgcatggccgagttgagcggttcccggctggccgcgcagcaacagatggaaggcctcctggcgccgcaccggcccaaggagcccgcgtggttcctggccaccgtcggcgtctcgcccgaccaccagggcaagggtctgggcagcgccgtcgtgctccccggagtggaggcggccgagcgcgccggggtgcccgccttcctggagacctccgcgccccgcaacctccccttctacgagcggctcggcttcaccgtcaccgccgacgtcgaggtgcccgaaggaccgcgcacctggtgcatgacccgcaagcccggtgcctga

SEQ ID NO: 1390 - DNA, 2859 bp, Artificial Sequence
  Synthetic Polynucleotides
atggccctgcctgtgacagctctgctgctgcctctggcactgctgctgcacgccgccagacctgacatccagatgacccagagcagcagcagcttcagcgtgtccctgggcgacagagtgaccatcacatgcaaggccagcgaggacatctacatccggctggcctggtatcagcagaagcccggcaacgcccccagactgctgattagcgccgccacctctctggaaaccggcatccccagcagattctccggctctggcagcggcgaggactacaccctgacaatcaccagcctccagaccgaggacgtggcaacctactactgccagcagtattggaccaccccctggacctttggcggaggcaccaagctggaaatcaagagaggcggaggcggaagtggaggcggaggatctggcggcggaggctctgatgtgcagctccaggaatctggccccggactcgtgaagcctagccagagcctgagcctgacatgcaccgtgaccggctacagcatcaccatcgactacacctggaactggatcagacagttccccggcaacaaactggaatggatgggctacatcacctacagcggcagcaccgactacaaccccagcctgaagtccagaagctccatcaccagagacacctctatgaaccagttcttcttgcagctgaacagcgtgaccaccgaggacaccgccacctactattgcgccagactgggcagaagatacgccctggactattggggccagggcaccagcgtgacagtgtcctctacgcgtgagcagaaactgatctcggaagaggatctggcgaagcccaccacgacgccagcgccgcgaccaccaacaccggcgcccaccatcgcgtcgcagcccctgtccctgcgcccagaggcgtgccggccagcggcggggggcgcagtgcacacgagggggctggacttcgcctgtgacatctacatctgggcgcccttggccgggacttgtggggtccttctcctgtcactggttatcaccctttactgcaaacggggcagaaagaaactcctgtatatattcaaacaaccatttatgagaccagtacaaactactcaagaggaagatggctgtagctgccgatttccagaagaagaagaaggaggatgtgaactgagagtgaagttcagcaggagcgcagacgcccccgcgtaccagcagggccagaaccagctctataacgagctgaatctaggacgaagagaggagtacgatgttttggacaagagacgtggccgggaccctgagatggggggaaagccgagaaggaagaaccctcaggaaggcctgtacaatgaactgcagaaagataagatggcggaggcctacagtgagattgggatgaaaggcgagcgccggaggggcaaggggcacgatggcctttaccagggtctcagtacagccaccaaggacacctacgacgcccttcacatgcaggccctgccccctcgctctagaggatctggagcaacaaacttctcactactcaaacaagcaggtgacgtggaggagaatcccgggcctgggatccacatggccacttacgaggttctctgtgaggtggcgcggaaactgggcacggatgacagggaagtggtattgttcctcctaaacgtgttcatacctcaacccacactggcccaattaattggagctcttagagctttaaaggaggagggcaggttaacgtttcccctgttagcggaatgtctgtttcgtgcaggtcgcagagacctcttgcgcgacctgcttcacttagacccgcgttttttagagcgccacctagcgggcacaatgagttatttcagcccttatcagctcactgttctccacgtagacggggagctgtgtgcgagggatattaggtctttgatatttttaagcaaggacactatagggtctcgcagcacaccacagacattcttacactgggtgtactgtatggaaaacttagacctactgggtcccactgacgtggatgccctaatgtcaatgcttagatctttgtcaagagtagacctacagcgccaagtgcaaaccctaatgggccttcacctttccggcccatcacactcccaacactatcgccatacaccactcgagaccgatttctacgactacaaggacgacgatgacaagactagtggctccggcgagggcagaggaagtctactaacctgcggagatgtggaagaaaatcctggcccacatatgaccgagtacaagcccacggtgcgcctcgccacccgcgacgacgtccccagggccgtacgcaccctcgccgccgcgttcgccgactaccccgccacgcgccacaccgtcgatccggaccgccacatcgagcgggtcaccgagctgcaagaactcttcctcacgcgcgtcgggctcgacatcggcaaggtgtgggtcgcggacgacggcgccgcggtggcggtctggaccacgccggagagcgtcgaagcgggggcggtgttcgccgagatcggcccgcgcatggccgagttgagcggttcccggctggccgcgcagcaacagatggaaggcctcctggcgccgcaccggcccaaggagcccgcgtggttcctggccaccgtcggcgtctcgcccgaccaccagggcaagggtctgggcagcgccgtcgtgctccccggagtggaggcggccgagcgcgccggggtgcccgccttcctggagacctccgcgccccgcaacctccccttctacgagcggctcggcttcaccgtcaccgccgacgtcgaggtgcccgaaggaccgcgcacctggtgcatgacccgcaagcccggtgcctga

SEQ ID NO: 1391 - DNA, 2862 bp, Artificial Sequence
  Synthetic Polynucleotides
atggccttaccagtgaccgccttgctcctgccgctggccttgctgctccacgccgccaggccggacatcgtaatgacccaggctgccccatccataccagtcactcccggtgaatccgtgtctatatcttgtaggtccgataagagtctgcttcacagcaacggcaatacttatcttttctggtttttgcagcgaccgggacaaagcccacaactgctgatctatagaatgtcaaatcttgcatcaggggtcccagatcgctttagtggatctgggtcaggcacagctttcaccctgagaatctccggagtggaagcagaagacgtaggcgtgtattactgtatgcagcaccttgagtatccttatacctttggaggcggaactaagctcgaaattaaaggcggaggcggaagtggaggcggaggatctggcggcggaggctctcaggttcaactgcagcagtctggacctgaactggtgaagcctggggcctcagtgaagatgtcctgcaaggcttctggctacgcattcagtagttcctggttgaactgggtgaggcagaggcctggaaagggtcttgagtggattggacggatttatcctggagatggagaaaatcactataatgggaaattcaagggcaaggccacactgactgcagacaaatcctccagcacaggctacatgcaactcagcagcctgacgtctgaggactctgcggtctacttctgtgcaagttattatgaagggggttattggggccaagggactctaatcactgtctctgcaacgcgtgagcagaaactgatctcggaagaggatctggcgaagcccaccacgacgccagcgccgcgaccaccaacaccggcgcccaccatcgcgtcgcagcccctgtccctgcgcccagaggcgtgccggccagcggcggggggcgcagtgcacacgagggggctggacttcgcctgtgacatctacatctgggcgcccttggccgggacttgtggggtccttctcctgtcactggttatcaccctttactgcaaacggggcagaaagaaactcctgtatatattcaaacaaccatttatgagaccagtacaaactactcaagaggaagatggctgtagctgccgatttccagaagaagaagaaggaggatgtgaactgagagtgaagttcagcaggagcgcagacgcccccgcgtaccagcagggccagaaccagctctataacgagctgaatctaggacgaagagaggagtacgatgttttggacaagagacgtggccgggaccctgagatggggggaaagccgagaaggaagaaccctcaggaaggcctgtacaatgaactgcagaaagataagatggcggaggcctacagtgagattgggatgaaaggcgagcgccggaggggcaaggggcacgatggcctttaccagggtctcagtacagccaccaaggacacctacgacgcccttcacatgcaggccctgccccctcgctctagaggatctggagcaacaaacttctcactactcaaacaagcaggtgacgtggaggagaatcccgggcctgggatccacatggccacttacgaggttctctgtgaggtggcgcggaaactgggcacggatgacagggaagtggtattgttcctcctaaacgtgttcatacctcaacccacactggcccaattaattggagctcttagagctttaaaggaggagggcaggttaacgtttcccctgttagcggaatgtctgtttcgtgcaggtcgcagagacctcttgcgcgacctgcttcacttagacccgcgttttttagagcgccacctagcgggcacaatgagttatttcagcccttatcagctcactgttctccacgtagacggggagctgtgtgcgagggatattaggtctttgatatttttaagcaaggacactatagggtctcgcagcacaccacagacattcttacactgggtgtactgtatggaaaacttagacctactgggtcccactgacgtggatgccctaatgtcaatgcttagatctttgtcaagagtagacctacagcgccaagtgcaaaccctaatgggccttcacctttccggcccatcacactcccaacactatcgccatacaccactcgagaccgatttctacgactacaaggacgacgatgacaagactagtggctccggcgagggcagaggaagtctactaacctgcggagatgtggaagaaaatcctggcccacatatgaccgagtacaagcccacggtgcgcctcgccacccgcgacgacgtccccagggccgtacgcaccctcgccgccgcgttcgccgactaccccgccacgcgccacaccgtcgatccggaccgccacatcgagcgggtcaccgagctgcaagaactcttcctcacgcgcgtcgggctcgacatcggcaaggtgtgggtcgcggacgacggcgccgcggtggcggtctggaccacgccggagagcgtcgaagcgggggcggtgttcgccgagatcggcccgcgcatggccgagttgagcggttcccggctggccgcgcagcaacagatggaaggcctcctggcgccgcaccggcccaaggagcccgcgtggttcctggccaccgtcggcgtctcgcccgaccaccagggcaagggtctgggcagcgccgtcgtgctccccggagtggaggcggccgagcgcgccggggtgcccgccttcctggagacctccgcgccccgcaacctccccttctacgagcggctcggcttcaccgtcaccgccgacgtcgaggtgcccgaaggaccgcgcacctggtgcatgacccgcaagcccggtgcctga

SEQ ID NO: 1392 - DNA, 2859 bp, Artificial Sequence
  Synthetic Polynucleotides
atggccttaccagtgaccgccttgctcctgccgctggccttgctgctccacgccgccaggccggacatcgtactgacacagagccccgcttctctggcagtgtcactgggccagtccgttacaatatcctgtcgggcgagtgaatccgtggaatactatggaacaagtctcatgcagtggtatcagcagaaacctggacagccccccaagctgctcatctacggtgcgtcaaatgtcgagagtggggttccggcccgattcagtggttccgggagtggcacagactttagcctcaacatccatcctgttgaggaagacgatattgccatgtatttttgccaacagtcccgcaaagtcccctggacctttggtggaggaactaagctggagatcaagggcggaggcggaagtggaggcggaggatctggcggcggaggctctgaggtcaagctggtagagagtggaggtgggctggttaaaccaggggggagcagaaaactgagttgtgccgcaagtggcttcaccttttctagctataccatgagctgggtaagacaaactccagcaaagcgccttgagtgggtcgcaacaattagcagcggatcttctactatttattacgctgacactgttaagggccggtttaccatatcaagagacaacgccaagaatacccttttccttcaaatgacttcactgcggtccgaggatacggcaatgtactattgtgcacgacggtggtttctcgactgctggggccaggggactacccttaccgtgtctagtacgcgtgagcagaaactgatctcggaagaggatctggcgaagcccaccacgacgccagcgccgcgaccaccaacaccggcgcccaccatcgcgtcgcagcccctgtccctgcgcccagaggcgtgccggccagcggcggggggcgcagtgcacacgagggggctggacttcgcctgtgacatctacatctgggcgcccttggccgggacttgtggggtccttctcctgtcactggttatcaccctttactgcaaacggggcagaaagaaactcctgtatatattcaaacaaccatttatgagaccagtacaaactactcaagaggaagatggctgtagctgccgatttccagaagaagaagaaggaggatgtgaactgagagtgaagttcagcaggagcgcagacgcccccgcgtaccagcagggccagaaccagctctataacgagctgaatctaggacgaagagaggagtacgatgttttggacaagagacgtggccgggaccctgagatggggggaaagccgagaaggaagaaccctcaggaaggcctgtacaatgaactgcagaaagataagatggcggaggcctacagtgagattgggatgaaaggcgagcgccggaggggcaaggggcacgatggcctttaccagggtctcagtacagccaccaaggacacctacgacgcccttcacatgcaggccctgccccctcgctctagaggatctggagcaacaaacttctcactactcaaacaagcaggtgacgtggaggagaatcccgggcctgggatccacatggccacttacgaggttctctgtgaggtggcgcggaaactgggcacggatgacagggaagtggtattgttcctcctaaacgtgttcatacctcaacccacactggcccaattaattggagctcttagagctttaaaggaggagggcaggttaacgtttcccctgttagcggaatgtctgtttcgtgcaggtcgcagagacctcttgcgcgacctgcttcacttagacccgcgttttttagagcgccacctagcgggcacaatgagttatttcagcccttatcagctcactgttctccacgtagacggggagctgtgtgcgagggatattaggtctttgatatttttaagcaaggacactatagggtctcgcagcacaccacagacattcttacactgggtgtactgtatggaaaacttagacctactgggtcccactgacgtggatgccctaatgtcaatgcttagatctttgtcaagagtagacctacagcgccaagtgcaaaccctaatgggccttcacctttccggcccatcacactcccaacactatcgccatacaccactcgagaccgatttctacgactacaaggacgacgatgacaagactagtggctccggcgagggcagaggaagtctactaacctgcggagatgtggaagaaaatcctggcccacatatgaccgagtacaagcccacggtgcgcctcgccacccgcgacgacgtccccagggccgtacgcaccctcgccgccgcgttcgccgactaccccgccacgcgccacaccgtcgatccggaccgccacatcgagcgggtcaccgagctgcaagaactcttcctcacgcgcgtcgggctcgacatcggcaaggtgtgggtcgcggacgacggcgccgcggtggcggtctggaccacgccggagagcgtcgaagcgggggcggtgttcgccgagatcggcccgcgcatggccgagttgagcggttcccggctggccgcgcagcaacagatggaaggcctcctggcgccgcaccggcccaaggagcccgcgtggttcctggccaccgtcggcgtctcgcccgaccaccagggcaagggtctgggcagcgccgtcgtgctccccggagtggaggcggccgagcgcgccggggtgcccgccttcctggagacctccgcgccccgcaacctccccttctacgagcggctcggcttcaccgtcaccgccgacgtcgaggtgcccgaaggaccgcgcacctggtgcatgacccgcaagcccggtgcctga

SEQ ID NO: 1393 - DNA, 2868 bp, Artificial Sequence
  Synthetic Polynucleotides
atggccttaccagtgaccgccttgctcctgccgctggccttgctgctccacgccgccaggccggaccaggtgcagctgcagcagtcgggcccaggactggtgaagccttcggagaccctgtccctcacctgcactgtctctggtgactccatcagtagttactactggagctggatcaggcagcccccagggaagggactggagtggattgggtatatctattacagtgggagcaccaactacaacccctccctcaagagtcgagtcaccatatcagtagacacgtccaagagccagttctccctgaagctgagctctgtgaccgccgcagacacggccgtgtattactgtgcgcgcggcaggtacttcgatgtctggggacgaggcactatggtgactagcagcggcggaggcggaagtggaggcggaggatctggcggcggaggctcttcctcctacgtgctgactcagcctccctccgtgtctgggtctcctggacagtcgatcaccatctcctgcactggaaccagcagtgacgttggtggttataactatgtctcctggtaccaacaacacccaggcaaagcccccaaactcatgatttatgagggcagtaagcggccctcaggggtttctaatcgcttctctggctccaagtctggcaacacggcctccctgacaatctctgggctccaggctgaggacgaggctgattattactgcagctcatatacaaccaggagcacccgagttttcggcggagggaccaagctgaccgtcctaggtgccgccgcaacgcgtgagcagaaactgatctcggaagaggatctggcgaagcccaccacgacgccagcgccgcgaccaccaacaccggcgcccaccatcgcgtcgcagcccctgtccctgcgcccagaggcgtgccggccagcggcggggggcgcagtgcacacgagggggctggacttcgcctgtgacatctacatctgggcgcccttggccgggacttgtggggtccttctcctgtcactggttatcaccctttactgcaaacggggcagaaagaaactcctgtatatattcaaacaaccatttatgagaccagtacaaactactcaagaggaagatggctgtagctgccgatttccagaagaagaagaaggaggatgtgaactgagagtgaagttcagcaggagcgcagacgcccccgcgtaccagcagggccagaaccagctctataacgagctgaatctaggacgaagagaggagtacgatgttttggacaagagacgtggccgggaccctgagatggggggaaagccgagaaggaagaaccctcaggaaggcctgtacaatgaactgcagaaagataagatggcggaggcctacagtgagattgggatgaaaggcgagcgccggaggggcaaggggcacgatggcctttaccagggtctcagtacagccaccaaggacacctacgacgcccttcacatgcaggccctgccccctcgctctagaggatctggagcaacaaacttctcactactcaaacaagcaggtgacgtggaggagaatcccgggcctgggatccacatggccacttacgaggttctctgtgaggtggcgcggaaactgggcacggatgacagggaagtggtattgttcctcctaaacgtgttcatacctcaacccacactggcccaattaattggagctcttagagctttaaaggaggagggcaggttaacgtttcccctgttagcggaatgtctgtttcgtgcaggtcgcagagacctcttgcgcgacctgcttcacttagacccgcgttttttagagcgccacctagcgggcacaatgagttatttcagcccttatcagctcactgttctccacgtagacggggagctgtgtgcgagggatattaggtctttgatatttttaagcaaggacactatagggtctcgcagcacaccacagacattcttacactgggtgtactgtatggaaaacttagacctactgggtcccactgacgtggatgccctaatgtcaatgcttagatctttgtcaagagtagacctacagcgccaagtgcaaaccctaatgggccttcacctttccggcccatcacactcccaacactatcgccatacaccactcgagaccgatttctacgactacaaggacgacgatgacaagactagtggctccggcgagggcagaggaagtctactaacctgcggagatgtggaagaaaatcctggcccacatatgaccgagtacaagcccacggtgcgcctcgccacccgcgacgacgtccccagggccgtacgcaccctcgccgccgcgttcgccgactaccccgccacgcgccacaccgtcgatccggaccgccacatcgagcgggtcaccgagctgcaagaactcttcctcacgcgcgtcgggctcgacatcggcaaggtgtgggtcgcggacgacggcgccgcggtggcggtctggaccacgccggagagcgtcgaagcgggggcggtgttcgccgagatcggcccgcgcatggccgagttgagcggttcccggctggccgcgcagcaacagatggaaggcctcctggcgccgcaccggcccaaggagcccgcgtggttcctggccaccgtcggcgtctcgcccgaccaccagggcaagggtctgggcagcgccgtcgtgctccccggagtggaggcggccgagcgcgccggggtgcccgccttcctggagacctccgcgccccgcaacctccccttctacgagcggctcggcttcaccgtcaccgccgacgtcgaggtgcccgaaggaccgcgcacctggtgcatgacccgcaagcccggtgcctga

SEQ ID NO: 1394 - DNA, 2871 bp, Artificial Sequence
  Synthetic Polynucleotides
atggccttaccagtgaccgccttgctcctgccgctggccttgctgctccacgccgccaggccggacatcgtaatgacacagtctcccctgtccctccctgtcacaccaggtgaacctgccagtatttcttgtagatccagtaagtcacttctgcactccaatgggaacacctacctgtattggttccagcaaaagcctggtcaggcacctcgcttgcttatttataggatgtccaatcttgcatccggcgtgccagaccgattctcaggctccggctctggtactgcatttaccctgaaaatctcccgcgtggaagcagaagatgtgggcgtgtactactgtatgcagcacatcgagtaccccttcacgtttggtcaaggcacaaagctggaaatcaaaggcggaggcggaagtggaggcggaggatctggcggcggaggctctcaggtccagctcgtccagtctggacccgaagtcaagaagccaggcgcctctgtgaaggtttcttgtaaggccagcggatatacattcactaattcatggatgaactgggtgaggcagcgccctggcaaggggcttgagtggatcgggcggatttacccaggggatggcgagacaatttacaacgggaaatttcgggtgagagtgacgatcaccgcagacgaatctacaagcacggcctacatggagttgtcctctctcaggagtgaggacaccgccgtctactattgtgctagaggttatgacgactattcattcgcatactggggccagggcaccaccgtcacagtatcatctacgcgtgagcagaaactgatctcggaagaggatctggcgaagcccaccacgacgccagcgccgcgaccaccaacaccggcgcccaccatcgcgtcgcagcccctgtccctgcgcccagaggcgtgccggccagcggcggggggcgcagtgcacacgagggggctggacttcgcctgtgacatctacatctgggcgcccttggccgggacttgtggggtccttctcctgtcactggttatcaccctttactgcaaacggggcagaaagaaactcctgtatatattcaaacaaccatttatgagaccagtacaaactactcaagaggaagatggctgtagctgccgatttccagaagaagaagaaggaggatgtgaactgagagtgaagttcagcaggagcgcagacgcccccgcgtaccagcagggccagaaccagctctataacgagctgaatctaggacgaagagaggagtacgatgttttggacaagagacgtggccgggaccctgagatggggggaaagccgagaaggaagaaccctcaggaaggcctgtacaatgaactgcagaaagataagatggcggaggcctacagtgagattgggatgaaaggcgagcgccggaggggcaaggggcacgatggcctttaccagggtctcagtacagccaccaaggacacctacgacgcccttcacatgcaggccctgccccctcgctctagaggatctggagcaacaaacttctcactactcaaacaagcaggtgacgtggaggagaatcccgggcctgggatccacatggccacttacgaggttctctgtgaggtggcgcggaaactgggcacggatgacagggaagtggtattgttcctcctaaacgtgttcatacctcaacccacactggcccaattaattggagctcttagagctttaaaggaggagggcaggttaacgtttcccctgttagcggaatgtctgtttcgtgcaggtcgcagagacctcttgcgcgacctgcttcacttagacccgcgttttttagagcgccacctagcgggcacaatgagttatttcagcccttatcagctcactgttctccacgtagacggggagctgtgtgcgagggatattaggtctttgatatttttaagcaaggacactatagggtctcgcagcacaccacagacattcttacactgggtgtactgtatggaaaacttagacctactgggtcccactgacgtggatgccctaatgtcaatgcttagatctttgtcaagagtagacctacagcgccaagtgcaaaccctaatgggccttcacctttccggcccatcacactcccaacactatcgccatacaccactcgagaccgatttctacgactacaaggacgacgatgacaagactagtggctccggcgagggcagaggaagtctactaacctgcggagatgtggaagaaaatcctggcccacatatgaccgagtacaagcccacggtgcgcctcgccacccgcgacgacgtccccagggccgtacgcaccctcgccgccgcgttcgccgactaccccgccacgcgccacaccgtcgatccggaccgccacatcgagcgggtcaccgagctgcaagaactcttcctcacgcgcgtcgggctcgacatcggcaaggtgtgggtcgcggacgacggcgccgcggtggcggtctggaccacgccggagagcgtcgaagcgggggcggtgttcgccgagatcggcccgcgcatggccgagttgagcggttcccggctggccgcgcagcaacagatggaaggcctcctggcgccgcaccggcccaaggagcccgcgtggttcctggccaccgtcggcgtctcgcccgaccaccagggcaagggtctgggcagcgccgtcgtgctccccggagtggaggcggccgagcgcgccggggtgcccgccttcctggagacctccgcgccccgcaacctccccttctacgagcggctcggcttcaccgtcaccgccgacgtcgaggtgcccgaaggaccgcgcacctggtgcatgacccgcaagcccggtgcctga

SEQ ID NO: 1395 - DNA, 2871 bp, Artificial Sequence
  Synthetic Polynucleotides
atggccttaccagtgaccgccttgctcctgccgctggccttgctgctccacgccgccaggccggacgagatcgtgatgacccagagccctgccaccctgtctctgagccctggcgaaagagccaccctgagctgtagagccagccagagcgtgtccagctacctggcctggtatcagcagaagcccggccaggctccccggctgctgatctacgatgccagcaatagagccaccggcatccccgccagattttccggctctggcagcggcaccgacttcaccctgaccatcagctccctggaacccgaggacttcgccgtgtactactgccaccagtacggcagcagcccccagacctttggacagggcaccaaggtggaaatcaagcggggcggaggcggaagtggaggcggaggatctggcggcggaggctctgaagtgcagctggtgcagtctggggccgaagtgaagaaacccggcagctccgtgaaggtgtcctgcaaggcttccggcggcaccttcagcagctacgccatttcttgggtgcgccaggcccctggacagggactggaatggatgggcggcatcatccccatcttcggcaccgccaactacgcccagaaattccagggcagagtgaccatcaccgccgacgagagcaccagcaccgcctacatggaactgagcagcctgcggagcgaggacacagccgtgtattattgcgccgtgcactacggcgactacgtgttcagcagcatggacgtgtggggccagggcacaaccgtgaccgtgtcatctacgcgtgagcagaaactgatctcggaagaggatctggcgaagcccaccacgacgccagcgccgcgaccaccaacaccggcgcccaccatcgcgtcgcagcccctgtccctgcgcccagaggcgtgccggccagcggcggggggcgcagtgcacacgagggggctggacttcgcctgtgacatctacatctgggcgcccttggccgggacttgtggggtccttctcctgtcactggttatcaccctttactgcaaacggggcagaaagaaactcctgtatatattcaaacaaccatttatgagaccagtacaaactactcaagaggaagatggctgtagctgccgatttccagaagaagaagaaggaggatgtgaactgagagtgaagttcagcaggagcgcagacgcccccgcgtaccagcagggccagaaccagctctataacgagctgaatctaggacgaagagaggagtacgatgttttggacaagagacgtggccgggaccctgagatggggggaaagccgagaaggaagaaccctcaggaaggcctgtacaatgaactgcagaaagataagatggcggaggcctacagtgagattgggatgaaaggcgagcgccggaggggcaaggggcacgatggcctttaccagggtctcagtacagccaccaaggacacctacgacgcccttcacatgcaggccctgccccctcgctctagaggatctggagcaacaaacttctcactactcaaacaagcaggtgacgtggaggagaatcccgggcctgggatccacatggccacttacgaggttctctgtgaggtggcgcggaaactgggcacggatgacagggaagtggtattgttcctcctaaacgtgttcatacctcaacccacactggcccaattaattggagctcttagagctttaaaggaggagggcaggttaacgtttcccctgttagcggaatgtctgtttcgtgcaggtcgcagagacctcttgcgcgacctgcttcacttagacccgcgttttttagagcgccacctagcgggcacaatgagttatttcagcccttatcagctcactgttctccacgtagacggggagctgtgtgcgagggatattaggtctttgatatttttaagcaaggacactatagggtctcgcagcacaccacagacattcttacactgggtgtactgtatggaaaacttagacctactgggtcccactgacgtggatgccctaatgtcaatgcttagatctttgtcaagagtagacctacagcgccaagtgcaaaccctaatgggccttcacctttccggcccatcacactcccaacactatcgccatacaccactcgagaccgatttctacgactacaaggacgacgatgacaagactagtggctccggcgagggcagaggaagtctactaacctgcggagatgtggaagaaaatcctggcccacatatgaccgagtacaagcccacggtgcgcctcgccacccgcgacgacgtccccagggccgtacgcaccctcgccgccgcgttcgccgactaccccgccacgcgccacaccgtcgatccggaccgccacatcgagcgggtcaccgagctgcaagaactcttcctcacgcgcgtcgggctcgacatcggcaaggtgtgggtcgcggacgacggcgccgcggtggcggtctggaccacgccggagagcgtcgaagcgggggcggtgttcgccgagatcggcccgcgcatggccgagttgagcggttcccggctggccgcgcagcaacagatggaaggcctcctggcgccgcaccggcccaaggagcccgcgtggttcctggccaccgtcggcgtctcgcccgaccaccagggcaagggtctgggcagcgccgtcgtgctccccggagtggaggcggccgagcgcgccggggtgcccgccttcctggagacctccgcgccccgcaacctccccttctacgagcggctcggcttcaccgtcaccgccgacgtcgaggtgcccgaaggaccgcgcacctggtgcatgacccgcaagcccggtgcctga

SEQ ID NO: 1396 - DNA, 2880 bp, Artificial Sequence
  Synthetic Polynucleotides
atggccttaccagtgaccgccttgctcctgccgctggccttgctgctccacgccgccaggccggacgagacaaccctgacacagagccctggcaccctgagcctgtctccaggcgaaagagccacactgagctgtcgggccagccagagcgtgtccagctcttacctggcctggtatcagcagaagcccggccaggctccccggctgctgatctatggcgcttctagcagagccaccggcatccccgatagattcagcggctctggcagcggcaccgacttcaccctgaccatcagcagactggaacccgaggacttcgccgtgtactactgccagcagtacggcagcagccccagaacattcggccagggcaccaaggtggaaatcaagagaggcggaggcggaagtggaggcggaggatctggcggcggaggctctgaagtgcaactggtgcagagcggagccgaagtgaagaaacccggcagctccgtgaaggtgtcctgcaaggcttccggcggcaccttcagcagctacgccatttcttgggtgcgccaggcccctggacagggcctggaatggatgggcggcatcatccccatcttcggcaccgccaactacgcccagaaattccagggcagagtgaccatcaccgccgacgagagcaccagcaccgcctacatggaactgagcagcctgcggagcgaggacacagccgtgtattattgcgccagaggccccgagtattgcatcaacggcgtgtgcagcctggacgtgtggggccagggaacaaccgtgaccgtgtctagcacgcgtgagcagaaactgatctcggaagaggatctggcgaagcccaccacgacgccagcgccgcgaccaccaacaccggcgcccaccatcgcgtcgcagcccctgtccctgcgcccagaggcgtgccggccagcggcggggggcgcagtgcacacgagggggctggacttcgcctgtgacatctacatctgggcgcccttggccgggacttgtggggtccttctcctgtcactggttatcaccctttactgcaaacggggcagaaagaaactcctgtatatattcaaacaaccatttatgagaccagtacaaactactcaagaggaagatggctgtagctgccgatttccagaagaagaagaaggaggatgtgaactgagagtgaagttcagcaggagcgcagacgcccccgcgtaccagcagggccagaaccagctctataacgagctgaatctaggacgaagagaggagtacgatgttttggacaagagacgtggccgggaccctgagatggggggaaagccgagaaggaagaaccctcaggaaggcctgtacaatgaactgcagaaagataagatggcggaggcctacagtgagattgggatgaaaggcgagcgccggaggggcaaggggcacgatggcctttaccagggtctcagtacagccaccaaggacacctacgacgcccttcacatgcaggccctgccccctcgctctagaggatctggagcaacaaacttctcactactcaaacaagcaggtgacgtggaggagaatcccgggcctgggatccacatggccacttacgaggttctctgtgaggtggcgcggaaactgggcacggatgacagggaagtggtattgttcctcctaaacgtgttcatacctcaacccacactggcccaattaattggagctcttagagctttaaaggaggagggcaggttaacgtttcccctgttagcggaatgtctgtttcgtgcaggtcgcagagacctcttgcgcgacctgcttcacttagacccgcgttttttagagcgccacctagcgggcacaatgagttatttcagcccttatcagctcactgttctccacgtagacggggagctgtgtgcgagggatattaggtctttgatatttttaagcaaggacactatagggtctcgcagcacaccacagacattcttacactgggtgtactgtatggaaaacttagacctactgggtcccactgacgtggatgccctaatgtcaatgcttagatctttgtcaagagtagacctacagcgccaagtgcaaaccctaatgggccttcacctttccggcccatcacactcccaacactatcgccatacaccactcgagaccgatttctacgactacaaggacgacgatgacaagactagtggctccggcgagggcagaggaagtctactaacctgcggagatgtggaagaaaatcctggcccacatatgaccgagtacaagcccacggtgcgcctcgccacccgcgacgacgtccccagggccgtacgcaccctcgccgccgcgttcgccgactaccccgccacgcgccacaccgtcgatccggaccgccacatcgagcgggtcaccgagctgcaagaactcttcctcacgcgcgtcgggctcgacatcggcaaggtgtgggtcgcggacgacggcgccgcggtggcggtctggaccacgccggagagcgtcgaagcgggggcggtgttcgccgagatcggcccgcgcatggccgagttgagcggttcccggctggccgcgcagcaacagatggaaggcctcctggcgccgcaccggcccaaggagcccgcgtggttcctggccaccgtcggcgtctcgcccgaccaccagggcaagggtctgggcagcgccgtcgtgctccccggagtggaggcggccgagcgcgccggggtgcccgccttcctggagacctccgcgccccgcaacctccccttctacgagcggctcggcttcaccgtcaccgccgacgtcgaggtgcccgaaggaccgcgcacctggtgcatgacccgcaagcccggtgcctga

SEQ ID NO: 1397 - DNA, 2886 bp, Artificial Sequence
  Synthetic Polynucleotides
atggccttaccagtgaccgccttgctcctgccgctggccttgctgctccacgccgccaggccggacatcgagctgacccagagccctagcagcctggctgtgtctgccggcgagaaagtgaccatgagctgcaagagcagccagagcctgctgaacagccggacccggaagaatcaactggcctggtatcagcagaagcccggccagtctcccgagctgctgatctactgggccagcaccagacagagcggcgtgcccgatagattcacaggcagcggctccggcaccgacttcaccctgacaatcagcagcgtgcaggccgaggacctggccgtgtactactgccagcagagctacaacctgctgaccttcggccctggcaccaagctggaagtgaagagaggcggaggcggaagtggaggcggaggatctggcggcggaggctctgtgaagctgcaggaatctggcggcggattcgtgaagcctggcggctctctgaaggtgtcctgtgccgccagcggcttcaccttcagcagctacgccatgtcctgggtgcgcctgagccccgagatgagactggaatgggtggcaaccatcagctccgcaggcggctacatcttctacagcgactccgtgcagggccggttcaccatctccagagacaacgccaagaacaccctgcatctgcagatgggcagcctgagaagcggcgacaccgccatgtactattgcgccagacagggcttcggcaactacggcgactactacgctatggactactggggccagggaaccaccgtgaccgtgtctagtacgcgtgagcagaaactgatctcggaagaggatctggcgaagcccaccacgacgccagcgccgcgaccaccaacaccggcgcccaccatcgcgtcgcagcccctgtccctgcgcccagaggcgtgccggccagcggcggggggcgcagtgcacacgagggggctggacttcgcctgtgacatctacatctgggcgcccttggccgggacttgtggggtccttctcctgtcactggttatcaccctttactgcaaacggggcagaaagaaactcctgtatatattcaaacaaccatttatgagaccagtacaaactactcaagaggaagatggctgtagctgccgatttccagaagaagaagaaggaggatgtgaactgagagtgaagttcagcaggagcgcagacgcccccgcgtaccagcagggccagaaccagctctataacgagctgaatctaggacgaagagaggagtacgatgttttggacaagagacgtggccgggaccctgagatggggggaaagccgagaaggaagaaccctcaggaaggcctgtacaatgaactgcagaaagataagatggcggaggcctacagtgagattgggatgaaaggcgagcgccggaggggcaaggggcacgatggcctttaccagggtctcagtacagccaccaaggacacctacgacgcccttcacatgcaggccctgccccctcgctctagaggatctggagcaacaaacttctcactactcaaacaagcaggtgacgtggaggagaatcccgggcctgggatccacatggccacttacgaggttctctgtgaggtggcgcggaaactgggcacggatgacagggaagtggtattgttcctcctaaacgtgttcatacctcaacccacactggcccaattaattggagctcttagagctttaaaggaggagggcaggttaacgtttcccctgttagcggaatgtctgtttcgtgcaggtcgcagagacctcttgcgcgacctgcttcacttagacccgcgttttttagagcgccacctagcgggcacaatgagttatttcagcccttatcagctcactgttctccacgtagacggggagctgtgtgcgagggatattaggtctttgatatttttaagcaaggacactatagggtctcgcagcacaccacagacattcttacactgggtgtactgtatggaaaacttagacctactgggtcccactgacgtggatgccctaatgtcaatgcttagatctttgtcaagagtagacctacagcgccaagtgcaaaccctaatgggccttcacctttccggcccatcacactcccaacactatcgccatacaccactcgagaccgatttctacgactacaaggacgacgatgacaagactagtggctccggcgagggcagaggaagtctactaacctgcggagatgtggaagaaaatcctggcccacatatgaccgagtacaagcccacggtgcgcctcgccacccgcgacgacgtccccagggccgtacgcaccctcgccgccgcgttcgccgactaccccgccacgcgccacaccgtcgatccggaccgccacatcgagcgggtcaccgagctgcaagaactcttcctcacgcgcgtcgggctcgacatcggcaaggtgtgggtcgcggacgacggcgccgcggtggcggtctggaccacgccggagagcgtcgaagcgggggcggtgttcgccgagatcggcccgcgcatggccgagttgagcggttcccggctggccgcgcagcaacagatggaaggcctcctggcgccgcaccggcccaaggagcccgcgtggttcctggccaccgtcggcgtctcgcccgaccaccagggcaagggtctgggcagcgccgtcgtgctccccggagtggaggcggccgagcgcgccggggtgcccgccttcctggagacctccgcgccccgcaacctccccttctacgagcggctcggcttcaccgtcaccgccgacgtcgaggtgcccgaaggaccgcgcacctggtgcatgacccgcaagcccggtgcctga

SEQ ID NO: 1398 - DNA, 2883 bp, Artificial Sequence
  Synthetic Polynucleotides
atggccttaccagtgaccgccttgctcctgccgctggccttgctgctccacgccgccaggccggacatccagatgacccagagccccagcagcctgtctgccagcgtgggcgacagagtgaccatcacctgtcggagcagccagaacatcgtgcacagcaacggcaacacctacctggactggtatcagcagacccccggcaaggcccccaagctgctgatctacaaggtgtccaacagattcagcggcgtgcccagcaggtttagcggctctggcagcggcaccgacttcaccttcaccatcagctccctccagcccgaggacattgccacctactactgcttccagtacagccacgtgccctggaccttcggccagggcacaaagctccagatcggcggaggcggaagtggaggcggaggatctggcggcggaggctctcaggtgcagctccagcagtctggggccgaagtgaagaaacccggcagcagcgtgaaggtgtcctgcaaggccagcggctacacctttaccaactactacatctactgggtgcgccaggccccaggccagggactggaatggatcggcggcatcaatcctaccagcggcggcagcaacttcaacgagaagttcaagacccgcgtgacaatcaccgccgacgagagcagcaccaccgcctacatggaactgagcagcctgcggagcgaggataccgccttctacttctgcacccggcagggcctgtggttcgactctgatggcagaggcttcgacttctggggccagggaaccaccgtgaccgtgtctagtacgcgtgagcagaaactgatctcggaagaggatctggcgaagcccaccacgacgccagcgccgcgaccaccaacaccggcgcccaccatcgcgtcgcagcccctgtccctgcgcccagaggcgtgccggccagcggcggggggcgcagtgcacacgagggggctggacttcgcctgtgacatctacatctgggcgcccttggccgggacttgtggggtccttctcctgtcactggttatcaccctttactgcaaacggggcagaaagaaactcctgtatatattcaaacaaccatttatgagaccagtacaaactactcaagaggaagatggctgtagctgccgatttccagaagaagaagaaggaggatgtgaactgagagtgaagttcagcaggagcgcagacgcccccgcgtaccagcagggccagaaccagctctataacgagctgaatctaggacgaagagaggagtacgatgttttggacaagagacgtggccgggaccctgagatggggggaaagccgagaaggaagaaccctcaggaaggcctgtacaatgaactgcagaaagataagatggcggaggcctacagtgagattgggatgaaaggcgagcgccggaggggcaaggggcacgatggcctttaccagggtctcagtacagccaccaaggacacctacgacgcccttcacatgcaggccctgccccctcgctctagaggatctggagcaacaaacttctcactactcaaacaagcaggtgacgtggaggagaatcccgggcctgggatccacatggccacttacgaggttctctgtgaggtggcgcggaaactgggcacggatgacagggaagtggtattgttcctcctaaacgtgttcatacctcaacccacactggcccaattaattggagctcttagagctttaaaggaggagggcaggttaacgtttcccctgttagcggaatgtctgtttcgtgcaggtcgcagagacctcttgcgcgacctgcttcacttagacccgcgttttttagagcgccacctagcgggcacaatgagttatttcagcccttatcagctcactgttctccacgtagacggggagctgtgtgcgagggatattaggtctttgatatttttaagcaaggacactatagggtctcgcagcacaccacagacattcttacactgggtgtactgtatggaaaacttagacctactgggtcccactgacgtggatgccctaatgtcaatgcttagatctttgtcaagagtagacctacagcgccaagtgcaaaccctaatgggccttcacctttccggcccatcacactcccaacactatcgccatacaccactcgagaccgatttctacgactacaaggacgacgatgacaagactagtggctccggcgagggcagaggaagtctactaacctgcggagatgtggaagaaaatcctggcccacatatgaccgagtacaagcccacggtgcgcctcgccacccgcgacgacgtccccagggccgtacgcaccctcgccgccgcgttcgccgactaccccgccacgcgccacaccgtcgatccggaccgccacatcgagcgggtcaccgagctgcaagaactcttcctcacgcgcgtcgggctcgacatcggcaaggtgtgggtcgcggacgacggcgccgcggtggcggtctggaccacgccggagagcgtcgaagcgggggcggtgttcgccgagatcggcccgcgcatggccgagttgagcggttcccggctggccgcgcagcaacagatggaaggcctcctggcgccgcaccggcccaaggagcccgcgtggttcctggccaccgtcggcgtctcgcccgaccaccagggcaagggtctgggcagcgccgtcgtgctccccggagtggaggcggccgagcgcgccggggtgcccgccttcctggagacctccgcgccccgcaacctccccttctacgagcggctcggcttcaccgtcaccgccgacgtcgaggtgcccgaaggaccgcgcacctggtgcatgacccgcaagcccggtgcctga

SEQ ID NO: 1399 - DNA, 2571 bp, Artificial Sequence
  Synthetic Polynucleotides
atggccttaccagtgaccgccttgctcctgccgctggccttgctgctccacgccgccaggccgctgttcaaccaggaagtgcagatccccctgaccgagagctactgcggcccctgccccaagaactggatctgctacaagaacaactgctaccagttcttcgacgagagcaagaattggtacgagagccaggcttcctgcatgagccagaacgccagcctgctgaaggtgtacagcaaagaggaccaggatctgctgaagctggtcaagagctaccactggatgggcctggtgcacatccccaccaacggctcttggcagtgggaggacggcagcatcctgagccccaacctgctgaccatcatcgagatgcagaagggcgactgcgccctgtacgccagcagcttcaagggctacatcgagaactgctccacccccaacacctacatctgtatgcagcggaccgtgggcggaggcggaagtggaggcggaggagacacgcgtgagcagaaactgatctcggaagaggatctggcgaagcccaccacgacgccagcgccgcgaccaccaacaccggcgcccaccatcgcgtcgcagcccctgtccctgcgcccagaggcgtgccggccagcggcggggggcgcagtgcacacgagggggctggacttcgcctgtgacatctacatctgggcgcccttggccgggacttgtggggtccttctcctgtcactggttatcaccctttactgcaaacggggcagaaagaaactcctgtatatattcaaacaaccatttatgagaccagtacaaactactcaagaggaagatggctgtagctgccgatttccagaagaagaagaaggaggatgtgaactgagagtgaagttcagcaggagcgcagacgcccccgcgtaccagcagggccagaaccagctctataacgagctgaatctaggacgaagagaggagtacgatgttttggacaagagacgtggccgggaccctgagatggggggaaagccgagaaggaagaaccctcaggaaggcctgtacaatgaactgcagaaagataagatggcggaggcctacagtgagattgggatgaaaggcgagcgccggaggggcaaggggcacgatggcctttaccagggtctcagtacagccaccaaggacacctacgacgcccttcacatgcaggccctgccccctcgctctagaggatctggagcaacaaacttctcactactcaaacaagcaggtgacgtggaggagaatcccgggcctgggatccacatggccacttacgaggttctctgtgaggtggcgcggaaactgggcacggatgacagggaagtggtattgttcctcctaaacgtgttcatacctcaacccacactggcccaattaattggagctcttagagctttaaaggaggagggcaggttaacgtttcccctgttagcggaatgtctgtttcgtgcaggtcgcagagacctcttgcgcgacctgcttcacttagacccgcgttttttagagcgccacctagcgggcacaatgagttatttcagcccttatcagctcactgttctccacgtagacggggagctgtgtgcgagggatattaggtctttgatatttttaagcaaggacactatagggtctcgcagcacaccacagacattcttacactgggtgtactgtatggaaaacttagacctactgggtcccactgacgtggatgccctaatgtcaatgcttagatctttgtcaagagtagacctacagcgccaagtgcaaaccctaatgggccttcacctttccggcccatcacactcccaacactatcgccatacaccactcgagaccgatttctacgactacaaggacgacgatgacaagactagtggctccggcgagggcagaggaagtctactaacctgcggagatgtggaagaaaatcctggcccacatatgaccgagtacaagcccacggtgcgcctcgccacccgcgacgacgtccccagggccgtacgcaccctcgccgccgcgttcgccgactaccccgccacgcgccacaccgtcgatccggaccgccacatcgagcgggtcaccgagctgcaagaactcttcctcacgcgcgtcgggctcgacatcggcaaggtgtgggtcgcggacgacggcgccgcggtggcggtctggaccacgccggagagcgtcgaagcgggggcggtgttcgccgagatcggcccgcgcatggccgagttgagcggttcccggctggccgcgcagcaacagatggaaggcctcctggcgccgcaccggcccaaggagcccgcgtggttcctggccaccgtcggcgtctcgcccgaccaccagggcaagggtctgggcagcgccgtcgtgctccccggagtggaggcggccgagcgcgccggggtgcccgccttcctggagacctccgcgccccgcaacctccccttctacgagcggctcggcttcaccgtcaccgccgacgtcgaggtgcccgaaggaccgcgcacctggtgcatgacccgcaagcccggtgcctga

SEQ ID NO: 1400 - DNA, 2853 bp, Artificial Sequence
  Synthetic Polynucleotides
atggccttaccagtgaccgccttgctcctgccgctggccttgctgctccacgccgccaggccggagatcgtgctgacacagagccctggcaccctgagcctgtctccaggcgaaagagccacactgagctgtcgggccagccagagcgtgtccagctcttacctggcctggtatcagcagaagcccggccaggctccccggctgctgatctatggcgcttctagcagagccaccggcatccccgatagattcagcggctctggcagcggcaccgacttcaccctgaccatcagcagactggaacccgaggacttcgccgtgtactactgccagcagtacggcagcagcccctggacctttggacagggcaccaaggtggaaatcaagagaggcggaggcggaagtggaggcggaggatctggcggcggaggctctcaagtgcatctccaggaaagcggacccggcctcgtgaagcctagcgagacactgagcctgacctgcaccgtgtccgacgacagcatcagcagctactactggtcctggatcagacagccccctggcaagggcctggaatggatcggccacatcagctacagcggcagcgccaactacaaccccagcctgaagtccagagtgaccatctccgtggacaccagcaagaaccagttctccctgaagctgagcagcgtgacagccgccgacaccgccgtgtattattgcgccaactgggacgacgccttcaacatctggggccagggcacaatggtcaccgtgtctagcacgcgtgagcagaaactgatctcggaagaggatctggcgaagcccaccacgacgccagcgccgcgaccaccaacaccggcgcccaccatcgcgtcgcagcccctgtccctgcgcccagaggcgtgccggccagcggcggggggcgcagtgcacacgagggggctggacttcgcctgtgacatctacatctgggcgcccttggccgggacttgtggggtccttctcctgtcactggttatcaccctttactgcaaacggggcagaaagaaactcctgtatatattcaaacaaccatttatgagaccagtacaaactactcaagaggaagatggctgtagctgccgatttccagaagaagaagaaggaggatgtgaactgagagtgaagttcagcaggagcgcagacgcccccgcgtaccagcagggccagaaccagctctataacgagctgaatctaggacgaagagaggagtacgatgttttggacaagagacgtggccgggaccctgagatggggggaaagccgagaaggaagaaccctcaggaaggcctgtacaatgaactgcagaaagataagatggcggaggcctacagtgagattgggatgaaaggcgagcgccggaggggcaaggggcacgatggcctttaccagggtctcagtacagccaccaaggacacctacgacgcccttcacatgcaggccctgccccctcgctctagaggatctggagcaacaaacttctcactactcaaacaagcaggtgacgtggaggagaatcccgggcctgggatccacatggccacttacgaggttctctgtgaggtggcgcggaaactgggcacggatgacagggaagtggtattgttcctcctaaacgtgttcatacctcaacccacactggcccaattaattggagctcttagagctttaaaggaggagggcaggttaacgtttcccctgttagcggaatgtctgtttcgtgcaggtcgcagagacctcttgcgcgacctgcttcacttagacccgcgttttttagagcgccacctagcgggcacaatgagttatttcagcccttatcagctcactgttctccacgtagacggggagctgtgtgcgagggatattaggtctttgatatttttaagcaaggacactatagggtctcgcagcacaccacagacattcttacactgggtgtactgtatggaaaacttagacctactgggtcccactgacgtggatgccctaatgtcaatgcttagatctttgtcaagagtagacctacagcgccaagtgcaaaccctaatgggccttcacctttccggcccatcacactcccaacactatcgccatacaccactcgagaccgatttctacgactacaaggacgacgatgacaagactagtggctccggcgagggcagaggaagtctactaacctgcggagatgtggaagaaaatcctggcccacatatgaccgagtacaagcccacggtgcgcctcgccacccgcgacgacgtccccagggccgtacgcaccctcgccgccgcgttcgccgactaccccgccacgcgccacaccgtcgatccggaccgccacatcgagcgggtcaccgagctgcaagaactcttcctcacgcgcgtcgggctcgacatcggcaaggtgtgggtcgcggacgacggcgccgcggtggcggtctggaccacgccggagagcgtcgaagcgggggcggtgttcgccgagatcggcccgcgcatggccgagttgagcggttcccggctggccgcgcagcaacagatggaaggcctcctggcgccgcaccggcccaaggagcccgcgtggttcctggccaccgtcggcgtctcgcccgaccaccagggcaagggtctgggcagcgccgtcgtgctccccggagtggaggcggccgagcgcgccggggtgcccgccttcctggagacctccgcgccccgcaacctccccttctacgagcggctcggcttcaccgtcaccgccgacgtcgaggtgcccgaaggaccgcgcacctggtgcatgacccgcaagcccggtgcctga

SEQ ID NO: 1401 - DNA, 2859 bp, Artificial Sequence
  Synthetic Polynucleotides
atggccttaccagtgaccgccttgctcctgccgctggccttgctgctccacgccgccaggccggacgtcgtgatgacccagacccctctgaccctgagcgtgaccattggacagcccgccagcatctcctgcaagagcagccagagcctgctggacagcgacggcaagacctatctccactggctgttgcaacggccaggtcagagccccaagagactgatcttcctggtgtccaagctggactccggcgtgcccgatagattcacaggcagcggctccggcaccgacttcaccctgaagatcagccgggtggaagccgaggacctgggcgtgtactactgttggcagggcacccacttcccccagacctttggcggcggaacaaagctggaaatcaagggcggaggcggaagtggaggcggaggatctggcggcggaggctctgtgcaactccaagagtccggccctgacctcgtgaagcctagccagtctctgagcctgacctgcaccgtgaccggctacagcatcaccagcggctactcttggcactggatcagacagttccccggcaacaagctggaatggatgggctacatccactacagcggcgacaccgactacaaccccagcctgaagtcccggttctccatcaccagagacaccagcaagaaccagttcttcttgcaactgaactccgtgaccaccgaggacaccgccacctactactgtgccacccctggcggctttgtgtactggggccagggaacactcgtgaccgtgtcctctacgcgtgagcagaaactgatctcggaagaggatctggcgaagcccaccacgacgccagcgccgcgaccaccaacaccggcgcccaccatcgcgtcgcagcccctgtccctgcgcccagaggcgtgccggccagcggcggggggcgcagtgcacacgagggggctggacttcgcctgtgacatctacatctgggcgcccttggccgggacttgtggggtccttctcctgtcactggttatcaccctttactgcaaacggggcagaaagaaactcctgtatatattcaaacaaccatttatgagaccagtacaaactactcaagaggaagatggctgtagctgccgatttccagaagaagaagaaggaggatgtgaactgagagtgaagttcagcaggagcgcagacgcccccgcgtaccagcagggccagaaccagctctataacgagctgaatctaggacgaagagaggagtacgatgttttggacaagagacgtggccgggaccctgagatggggggaaagccgagaaggaagaaccctcaggaaggcctgtacaatgaactgcagaaagataagatggcggaggcctacagtgagattgggatgaaaggcgagcgccggaggggcaaggggcacgatggcctttaccagggtctcagtacagccaccaaggacacctacgacgcccttcacatgcaggccctgccccctcgctctagaggatctggagcaacaaacttctcactactcaaacaagcaggtgacgtggaggagaatcccgggcctgggatccacatggccacttacgaggttctctgtgaggtggcgcggaaactgggcacggatgacagggaagtggtattgttcctcctaaacgtgttcatacctcaacccacactggcccaattaattggagctcttagagctttaaaggaggagggcaggttaacgtttcccctgttagcggaatgtctgtttcgtgcaggtcgcagagacctcttgcgcgacctgcttcacttagacccgcgttttttagagcgccacctagcgggcacaatgagttatttcagcccttatcagctcactgttctccacgtagacggggagctgtgtgcgagggatattaggtctttgatatttttaagcaaggacactatagggtctcgcagcacaccacagacattcttacactgggtgtactgtatggaaaacttagacctactgggtcccactgacgtggatgccctaatgtcaatgcttagatctttgtcaagagtagacctacagcgccaagtgcaaaccctaatgggccttcacctttccggcccatcacactcccaacactatcgccatacaccactcgagaccgatttctacgactacaaggacgacgatgacaagactagtggctccggcgagggcagaggaagtctactaacctgcggagatgtggaagaaaatcctggcccacatatgaccgagtacaagcccacggtgcgcctcgccacccgcgacgacgtccccagggccgtacgcaccctcgccgccgcgttcgccgactaccccgccacgcgccacaccgtcgatccggaccgccacatcgagcgggtcaccgagctgcaagaactcttcctcacgcgcgtcgggctcgacatcggcaaggtgtgggtcgcggacgacggcgccgcggtggcggtctggaccacgccggagagcgtcgaagcgggggcggtgttcgccgagatcggcccgcgcatggccgagttgagcggttcccggctggccgcgcagcaacagatggaaggcctcctggcgccgcaccggcccaaggagcccgcgtggttcctggccaccgtcggcgtctcgcccgaccaccagggcaagggtctgggcagcgccgtcgtgctccccggagtggaggcggccgagcgcgccggggtgcccgccttcctggagacctccgcgccccgcaacctccccttctacgagcggctcggcttcaccgtcaccgccgacgtcgaggtgcccgaaggaccgcgcacctggtgcatgacccgcaagcccggtgcctga

SEQ ID NO: 1402 - DNA, 2871 bp, Artificial Sequence
  Synthetic Polynucleotides
atggccttaccagtgaccgccttgctcctgccgctggccttgctgctccacgccgccaggccggaccagagcgagctgacccagcctagaagcgtgtccggcagccctggacagagcgtgaccatcagctgtaccggcaccgagagagatgtgggcggctacaactacgtgtcctggtatcagcagcaccccggcaaggcccccaagctgatcatccacgacgtgatcgagcggagcagcggcgtgcccgatagattcagcggcagcaagagcggcaacaccgccagcctgacaatcagcggactgcaggccgaggacgaggccgactactactgctggtctttcgctggcggctactacgtgttcggcaccggcacagatgtgaccgtgctgggcggaggcggaagtggaggcggaggatctggcggcggaggctctttcgaagtgcagctgctggaatctggcggcggactggtgcagcctggcggatctctgagactgagctgtgccgcctccggcttcaccttcagcacctaccagatgagctgggtgcgccaggcccctggcaaaggactggaatgggtgtccgggatcgtgtccagcggcggctctacagcctacgccgatagcgtgaagggccggttcaccatcagccgggacaacagcaagaacaccctgtacctgcagatgaacagcctgagagccgaggacaccgccgtgtactattgtgccggcgagctgctgccctactacggcatggatgtgtggggccagggcaccaccgtgaccgtgtcatctacgcgtgagcagaaactgatctcggaagaggatctggcgaagcccaccacgacgccagcgccgcgaccaccaacaccggcgcccaccatcgcgtcgcagcccctgtccctgcgcccagaggcgtgccggccagcggcggggggcgcagtgcacacgagggggctggacttcgcctgtgacatctacatctgggcgcccttggccgggacttgtggggtccttctcctgtcactggttatcaccctttactgcaaacggggcagaaagaaactcctgtatatattcaaacaaccatttatgagaccagtacaaactactcaagaggaagatggctgtagctgccgatttccagaagaagaagaaggaggatgtgaactgagagtgaagttcagcaggagcgcagacgcccccgcgtaccagcagggccagaaccagctctataacgagctgaatctaggacgaagagaggagtacgatgttttggacaagagacgtggccgggaccctgagatggggggaaagccgagaaggaagaaccctcaggaaggcctgtacaatgaactgcagaaagataagatggcggaggcctacagtgagattgggatgaaaggcgagcgccggaggggcaaggggcacgatggcctttaccagggtctcagtacagccaccaaggacacctacgacgcccttcacatgcaggccctgccccctcgctctagaggatctggagcaacaaacttctcactactcaaacaagcaggtgacgtggaggagaatcccgggcctgggatccacatggccacttacgaggttctctgtgaggtggcgcggaaactgggcacggatgacagggaagtggtattgttcctcctaaacgtgttcatacctcaacccacactggcccaattaattggagctcttagagctttaaaggaggagggcaggttaacgtttcccctgttagcggaatgtctgtttcgtgcaggtcgcagagacctcttgcgcgacctgcttcacttagacccgcgttttttagagcgccacctagcgggcacaatgagttatttcagcccttatcagctcactgttctccacgtagacggggagctgtgtgcgagggatattaggtctttgatatttttaagcaaggacactatagggtctcgcagcacaccacagacattcttacactgggtgtactgtatggaaaacttagacctactgggtcccactgacgtggatgccctaatgtcaatgcttagatctttgtcaagagtagacctacagcgccaagtgcaaaccctaatgggccttcacctttccggcccatcacactcccaacactatcgccatacaccactcgagaccgatttctacgactacaaggacgacgatgacaagactagtggctccggcgagggcagaggaagtctactaacctgcggagatgtggaagaaaatcctggcccacatatgaccgagtacaagcccacggtgcgcctcgccacccgcgacgacgtccccagggccgtacgcaccctcgccgccgcgttcgccgactaccccgccacgcgccacaccgtcgatccggaccgccacatcgagcgggtcaccgagctgcaagaactcttcctcacgcgcgtcgggctcgacatcggcaaggtgtgggtcgcggacgacggcgccgcggtggcggtctggaccacgccggagagcgtcgaagcgggggcggtgttcgccgagatcggcccgcgcatggccgagttgagcggttcccggctggccgcgcagcaacagatggaaggcctcctggcgccgcaccggcccaaggagcccgcgtggttcctggccaccgtcggcgtctcgcccgaccaccagggcaagggtctgggcagcgccgtcgtgctccccggagtggaggcggccgagcgcgccggggtgcccgccttcctggagacctccgcgccccgcaacctccccttctacgagcggctcggcttcaccgtcaccgccgacgtcgaggtgcccgaaggaccgcgcacctggtgcatgacccgcaagcccggtgcctga

SEQ ID NO: 1403 - DNA, 2868 bp, Artificial Sequence
  Synthetic Polynucleotides
atggccttaccagtgaccgccttgctcctgccgctggccttgctgctccacgccgccaggccggaccagagcgagctgacccagcctagaagcgtgtccggcagccctggacagagcgtgaccatcagctgtaccggcaccgagagagatgtgggcggctacaactacgtgtcctggtatcagcagcaccccggcaaggcccccaagctgatcatccacgacgtgatcgagcggagcagcggcgtgcccgatagattcagcggcagcaagagcggcaacaccgccagcctgacaatcagcggactgcaggccgaggacgaggccgactactactgctggtctttcgctggcggctactacgtgttcggcaccggcacagatgtgaccgtgctgggcggaggcggaagtggaggcggaggatctggcggcggaggctctgaagtgcagctgctggaatctggcggcggactggtgcagcctggcggatctctgagactgagctgtgccgccagcggcttcaccttcagcacctacgagatgcactgggtgcgccaggcccctggcaaaggactggaatgggtgtccgtgatcctgagcagcggcggagagacaaactacgccgacagcgtgaagggccggttcaccatcagccgggacaacagcaagaacaccctgtacctccagatgaacagcctgcgggccgaggacaccgccgtgtactattgtgccggaatgctgctgccctactacggcatggatgtgtggggccagggcaccaccgtgaccgtgtcatctacgcgtgagcagaaactgatctcggaagaggatctggcgaagcccaccacgacgccagcgccgcgaccaccaacaccggcgcccaccatcgcgtcgcagcccctgtccctgcgcccagaggcgtgccggccagcggcggggggcgcagtgcacacgagggggctggacttcgcctgtgacatctacatctgggcgcccttggccgggacttgtggggtccttctcctgtcactggttatcaccctttactgcaaacggggcagaaagaaactcctgtatatattcaaacaaccatttatgagaccagtacaaactactcaagaggaagatggctgtagctgccgatttccagaagaagaagaaggaggatgtgaactgagagtgaagttcagcaggagcgcagacgcccccgcgtaccagcagggccagaaccagctctataacgagctgaatctaggacgaagagaggagtacgatgttttggacaagagacgtggccgggaccctgagatggggggaaagccgagaaggaagaaccctcaggaaggcctgtacaatgaactgcagaaagataagatggcggaggcctacagtgagattgggatgaaaggcgagcgccggaggggcaaggggcacgatggcctttaccagggtctcagtacagccaccaaggacacctacgacgcccttcacatgcaggccctgccccctcgctctagaggatctggagcaacaaacttctcactactcaaacaagcaggtgacgtggaggagaatcccgggcctgggatccacatggccacttacgaggttctctgtgaggtggcgcggaaactgggcacggatgacagggaagtggtattgttcctcctaaacgtgttcatacctcaacccacactggcccaattaattggagctcttagagctttaaaggaggagggcaggttaacgtttcccctgttagcggaatgtctgtttcgtgcaggtcgcagagacctcttgcgcgacctgcttcacttagacccgcgttttttagagcgccacctagcgggcacaatgagttatttcagcccttatcagctcactgttctccacgtagacggggagctgtgtgcgagggatattaggtctttgatatttttaagcaaggacactatagggtctcgcagcacaccacagacattcttacactgggtgtactgtatggaaaacttagacctactgggtcccactgacgtggatgccctaatgtcaatgcttagatctttgtcaagagtagacctacagcgccaagtgcaaaccctaatgggccttcacctttccggcccatcacactcccaacactatcgccatacaccactcgagaccgatttctacgactacaaggacgacgatgacaagactagtggctccggcgagggcagaggaagtctactaacctgcggagatgtggaagaaaatcctggcccacatatgaccgagtacaagcccacggtgcgcctcgccacccgcgacgacgtccccagggccgtacgcaccctcgccgccgcgttcgccgactaccccgccacgcgccacaccgtcgatccggaccgccacatcgagcgggtcaccgagctgcaagaactcttcctcacgcgcgtcgggctcgacatcggcaaggtgtgggtcgcggacgacggcgccgcggtggcggtctggaccacgccggagagcgtcgaagcgggggcggtgttcgccgagatcggcccgcgcatggccgagttgagcggttcccggctggccgcgcagcaacagatggaaggcctcctggcgccgcaccggcccaaggagcccgcgtggttcctggccaccgtcggcgtctcgcccgaccaccagggcaagggtctgggcagcgccgtcgtgctccccggagtggaggcggccgagcgcgccggggtgcccgccttcctggagacctccgcgccccgcaacctccccttctacgagcggctcggcttcaccgtcaccgccgacgtcgaggtgcccgaaggaccgcgcacctggtgcatgacccgcaagcccggtgcctga

SEQ ID NO: 1404 - DNA, 2574 bp, Artificial Sequence
  Synthetic Polynucleotides
atggccttaccagtgaccgccttgctcctgccgctggccttgctgctccacgccgccaggccgggctggtttctggacagccctgacagaccctggaatcctccaacattcagccccgctctgctggtggttaccgagggcgataatgccaccttcacctgtagcttcagcaacaccagcgagagcttcgtgctgaactggtacagaatgagccccagcaaccagaccgacaagctggccgcctttcctgaggatagaagccagcctggacaggactgccggttcagagttacccagctgcctaacggcagagacttccacatgagcgttgtgcgggccagaagaaacgacagcggcacatatctgtgcggagccatctctctggcccctaaggctcagatcaaagagagcctgagagccgagctgagagtgacagaaagacgggccgaagtgcccacagctcacccttcaccttctccaagacctgccggccagttccagacgcgtgagcagaaactgatctcggaagaggatctggcgaagcccaccacgacgccagcgccgcgaccaccaacaccggcgcccaccatcgcgtcgcagcccctgtccctgcgcccagaggcgtgccggccagcggcggggggcgcagtgcacacgagggggctggacttcgcctgtgacatctacatctgggcgcccttggccgggacttgtggggtccttctcctgtcactggttatcaccctttactgcaaacggggcagaaagaaactcctgtatatattcaaacaaccatttatgagaccagtacaaactactcaagaggaagatggctgtagctgccgatttccagaagaagaagaaggaggatgtgaactgagagtgaagttcagcaggagcgcagacgcccccgcgtaccagcagggccagaaccagctctataacgagctgaatctaggacgaagagaggagtacgatgttttggacaagagacgtggccgggaccctgagatggggggaaagccgagaaggaagaaccctcaggaaggcctgtacaatgaactgcagaaagataagatggcggaggcctacagtgagattgggatgaaaggcgagcgccggaggggcaaggggcacgatggcctttaccagggtctcagtacagccaccaaggacacctacgacgcccttcacatgcaggccctgccccctcgctctagaggatctggagcaacaaacttctcactactcaaacaagcaggtgacgtggaggagaatcccgggcctgggatccacatggccacttacgaggttctctgtgaggtggcgcggaaactgggcacggatgacagggaagtggtattgttcctcctaaacgtgttcatacctcaacccacactggcccaattaattggagctcttagagctttaaaggaggagggcaggttaacgtttcccctgttagcggaatgtctgtttcgtgcaggtcgcagagacctcttgcgcgacctgcttcacttagacccgcgttttttagagcgccacctagcgggcacaatgagttatttcagcccttatcagctcactgttctccacgtagacggggagctgtgtgcgagggatattaggtctttgatatttttaagcaaggacactatagggtctcgcagcacaccacagacattcttacactgggtgtactgtatggaaaacttagacctactgggtcccactgacgtggatgccctaatgtcaatgcttagatctttgtcaagagtagacctacagcgccaagtgcaaaccctaatgggccttcacctttccggcccatcacactcccaacactatcgccatacaccactcgagaccgatttctacgactacaaggacgacgatgacaagactagtggctccggcgagggcagaggaagtctactaacctgcggagatgtggaagaaaatcctggcccacatatgaccgagtacaagcccacggtgcgcctcgccacccgcgacgacgtccccagggccgtacgcaccctcgccgccgcgttcgccgactaccccgccacgcgccacaccgtcgatccggaccgccacatcgagcgggtcaccgagctgcaagaactcttcctcacgcgcgtcgggctcgacatcggcaaggtgtgggtcgcggacgacggcgccgcggtggcggtctggaccacgccggagagcgtcgaagcgggggcggtgttcgccgagatcggcccgcgcatggccgagttgagcggttcccggctggccgcgcagcaacagatggaaggcctcctggcgccgcaccggcccaaggagcccgcgtggttcctggccaccgtcggcgtctcgcccgaccaccagggcaagggtctgggcagcgccgtcgtgctccccggagtggaggcggccgagcgcgccggggtgcccgccttcctggagacctccgcgccccgcaacctccccttctacgagcggctcggcttcaccgtcaccgccgacgtcgaggtgcccgaaggaccgcgcacctggtgcatgacccgcaagcccggtgcctga

SEQ ID NO: 1405 - DNA, 2859 bp, Artificial Sequence
  Synthetic Polynucleotides
atggccttaccagtgaccgccttgctcctgccgctggccttgctgctccacgccgccaggccggacatccagatgacacagagccctagcagcctgtctgccagcgtgggagacagagtgaccatcacctgtagagccagccaggatgtgtctacagccgtggcctggtatcagcagaagcctggaaaggcccctaagctgctgatctacagcgccagctttctgtacagcggcgtgcccagcagattttctggcagcggctctggcaccgacttcaccctgacaatatccagcctccagcctgaggacttcgccacctactactgccagcagtacctgtatcaccccgccacctttggacagggcaccaaggtggaaatcaagagaggcggaggcggaagtggaggcggaggatctggcggcggaggctctgaagtgcagctggttgaatcaggtggcggcctggttcaacctggcggatctctgagactgagctgtgccgccagcggcttcacctttagcgacagctggattcactgggtccgacaggcccctggcaaaggacttgaatgggtcgcctggatcagcccttatggcggcagcacctattacgccgacagcgtgaagggcagattcaccatcagcgccgacaccagcaagaacaccgcctacctccagatgaactccctgagagccgaagataccgccgtgtactactgcgccagaaggcattggcctggcggctttgattattggggccagggcacactggtcaccgtgtcatctacgcgtgagcagaaactgatctcggaagaggatctggcgaagcccaccacgacgccagcgccgcgaccaccaacaccggcgcccaccatcgcgtcgcagcccctgtccctgcgcccagaggcgtgccggccagcggcggggggcgcagtgcacacgagggggctggacttcgcctgtgacatctacatctgggcgcccttggccgggacttgtggggtccttctcctgtcactggttatcaccctttactgcaaacggggcagaaagaaactcctgtatatattcaaacaaccatttatgagaccagtacaaactactcaagaggaagatggctgtagctgccgatttccagaagaagaagaaggaggatgtgaactgagagtgaagttcagcaggagcgcagacgcccccgcgtaccagcagggccagaaccagctctataacgagctgaatctaggacgaagagaggagtacgatgttttggacaagagacgtggccgggaccctgagatggggggaaagccgagaaggaagaaccctcaggaaggcctgtacaatgaactgcagaaagataagatggcggaggcctacagtgagattgggatgaaaggcgagcgccggaggggcaaggggcacgatggcctttaccagggtctcagtacagccaccaaggacacctacgacgcccttcacatgcaggccctgccccctcgctctagaggatctggagcaacaaacttctcactactcaaacaagcaggtgacgtggaggagaatcccgggcctgggatccacatggccacttacgaggttctctgtgaggtggcgcggaaactgggcacggatgacagggaagtggtattgttcctcctaaacgtgttcatacctcaacccacactggcccaattaattggagctcttagagctttaaaggaggagggcaggttaacgtttcccctgttagcggaatgtctgtttcgtgcaggtcgcagagacctcttgcgcgacctgcttcacttagacccgcgttttttagagcgccacctagcgggcacaatgagttatttcagcccttatcagctcactgttctccacgtagacggggagctgtgtgcgagggatattaggtctttgatatttttaagcaaggacactatagggtctcgcagcacaccacagacattcttacactgggtgtactgtatggaaaacttagacctactgggtcccactgacgtggatgccctaatgtcaatgcttagatctttgtcaagagtagacctacagcgccaagtgcaaaccctaatgggccttcacctttccggcccatcacactcccaacactatcgccatacaccactcgagaccgatttctacgactacaaggacgacgatgacaagactagtggctccggcgagggcagaggaagtctactaacctgcggagatgtggaagaaaatcctggcccacatatgaccgagtacaagcccacggtgcgcctcgccacccgcgacgacgtccccagggccgtacgcaccctcgccgccgcgttcgccgactaccccgccacgcgccacaccgtcgatccggaccgccacatcgagcgggtcaccgagctgcaagaactcttcctcacgcgcgtcgggctcgacatcggcaaggtgtgggtcgcggacgacggcgccgcggtggcggtctggaccacgccggagagcgtcgaagcgggggcggtgttcgccgagatcggcccgcgcatggccgagttgagcggttcccggctggccgcgcagcaacagatggaaggcctcctggcgccgcaccggcccaaggagcccgcgtggttcctggccaccgtcggcgtctcgcccgaccaccagggcaagggtctgggcagcgccgtcgtgctccccggagtggaggcggccgagcgcgccggggtgcccgccttcctggagacctccgcgccccgcaacctccccttctacgagcggctcggcttcaccgtcaccgccgacgtcgaggtgcccgaaggaccgcgcacctggtgcatgacccgcaagcccggtgcctga

SEQ ID NO: 1406 - DNA, 2862 bp, Artificial Sequence
  Synthetic Polynucleotides
atggccttaccagtgaccgccttgctcctgccgctggccttgctgctccacgccgccaggccggccatcgtgatgacccagacaccttctccagtgtctgccgccgttggcggcacagtgacaatcaactgtcaggccagcgagagcgtgtacagcaacaactacctgagctggttccagcagaagcccggccagcctcctaagctgctgatctacctggcctccacactggcaagcggagtgcccagtagattcaaaggcagcggctctggcacccagttcaccctgacaattagcggcgtgcagtgtgacgatgccgccacctattactgcatcggcggcaagagcagcagcaccgatggcaatgcttttggcggcggaacagaggtggtcgttagaggcggaggcggaagtggaggcggaggatctggcggcggaggctctcaatctctggaagaaagcggaggcagactggtcaagcccgacgagacactgaccatcacctgtaccgtgtccggcatcgacctgagcagcaatggactgacctgggtccgacaagctcctggcgaaggactggaatggatcggcaccatcaacaaggacgccagcgcctactatgcctcctgggccaaaggcaggctgaccatctctaagcccagctccacaaaggtggacctgaagatcacaagccccaccaccgaggacaccgccacatacttttgtggccggatcgccttcaagaccggcacctctatttggggacctggcacactggtcaccgtgtctagtacgcgtgagcagaaactgatctcggaagaggatctggcgaagcccaccacgacgccagcgccgcgaccaccaacaccggcgcccaccatcgcgtcgcagcccctgtccctgcgcccagaggcgtgccggccagcggcggggggcgcagtgcacacgagggggctggacttcgcctgtgacatctacatctgggcgcccttggccgggacttgtggggtccttctcctgtcactggttatcaccctttactgcaaacggggcagaaagaaactcctgtatatattcaaacaaccatttatgagaccagtacaaactactcaagaggaagatggctgtagctgccgatttccagaagaagaagaaggaggatgtgaactgagagtgaagttcagcaggagcgcagacgcccccgcgtaccagcagggccagaaccagctctataacgagctgaatctaggacgaagagaggagtacgatgttttggacaagagacgtggccgggaccctgagatggggggaaagccgagaaggaagaaccctcaggaaggcctgtacaatgaactgcagaaagataagatggcggaggcctacagtgagattgggatgaaaggcgagcgccggaggggcaaggggcacgatggcctttaccagggtctcagtacagccaccaaggacacctacgacgcccttcacatgcaggccctgccccctcgctctagaggatctggagcaacaaacttctcactactcaaacaagcaggtgacgtggaggagaatcccgggcctgggatccacatggccacttacgaggttctctgtgaggtggcgcggaaactgggcacggatgacagggaagtggtattgttcctcctaaacgtgttcatacctcaacccacactggcccaattaattggagctcttagagctttaaaggaggagggcaggttaacgtttcccctgttagcggaatgtctgtttcgtgcaggtcgcagagacctcttgcgcgacctgcttcacttagacccgcgttttttagagcgccacctagcgggcacaatgagttatttcagcccttatcagctcactgttctccacgtagacggggagctgtgtgcgagggatattaggtctttgatatttttaagcaaggacactatagggtctcgcagcacaccacagacattcttacactgggtgtactgtatggaaaacttagacctactgggtcccactgacgtggatgccctaatgtcaatgcttagatctttgtcaagagtagacctacagcgccaagtgcaaaccctaatgggccttcacctttccggcccatcacactcccaacactatcgccatacaccactcgagaccgatttctacgactacaaggacgacgatgacaagactagtggctccggcgagggcagaggaagtctactaacctgcggagatgtggaagaaaatcctggcccacatatgaccgagtacaagcccacggtgcgcctcgccacccgcgacgacgtccccagggccgtacgcaccctcgccgccgcgttcgccgactaccccgccacgcgccacaccgtcgatccggaccgccacatcgagcgggtcaccgagctgcaagaactcttcctcacgcgcgtcgggctcgacatcggcaaggtgtgggtcgcggacgacggcgccgcggtggcggtctggaccacgccggagagcgtcgaagcgggggcggtgttcgccgagatcggcccgcgcatggccgagttgagcggttcccggctggccgcgcagcaacagatggaaggcctcctggcgccgcaccggcccaaggagcccgcgtggttcctggccaccgtcggcgtctcgcccgaccaccagggcaagggtctgggcagcgccgtcgtgctccccggagtggaggcggccgagcgcgccggggtgcccgccttcctggagacctccgcgccccgcaacctccccttctacgagcggctcggcttcaccgtcaccgccgacgtcgaggtgcccgaaggaccgcgcacctggtgcatgacccgcaagcccggtgcctga

SEQ ID NO: 1407 - DNA, 2856 bp, Artificial Sequence
  Synthetic Polynucleotides
atggccttaccagtgaccgccttgctcctgccgctggccttgctgctccacgccgccaggccggacatccagatgacacagagccctagcagcctgtctgccagcgtgggagacagagtgaccatcacctgtagagccagccagggcatctcttcttggctggcctggtatcagcagaagcccgagaaggcccctaagagcctgatctatgccgccagctctctccagagcggagtgcctagcagattttctggcagcggctccggcaccgatttcaccctgacaatatccagcctccagcctgaggacttcgccacctactactgccagcagtacaacagctacccctacaccttcggccagggcaccaagctggaaatcaaaggcggaggcggaagtggaggcggaggatctggcggcggaggctctcaagtgcaactggttcagagcggcgctgaagtgaagaaacctggggcctctgtgaaggtgtcctgcaaggcttccggctacacctttaccagctacgacgtgcactgggtccgacaggctccaggacaaagactggaatggatgggatggctgcacgccgataccggcatcaccaagttcagccagaaattccagggccgcgtgacaatcaccagagacacatctgccagcaccgcctacatggaactgagcagcctgagaagcgaggacaccgccgtgtactactgcgccagagagagaatccagctttggttcgactactggggccagggaaccctggtcacagtctcttctacgcgtgagcagaaactgatctcggaagaggatctggcgaagcccaccacgacgccagcgccgcgaccaccaacaccggcgcccaccatcgcgtcgcagcccctgtccctgcgcccagaggcgtgccggccagcggcggggggcgcagtgcacacgagggggctggacttcgcctgtgacatctacatctgggcgcccttggccgggacttgtggggtccttctcctgtcactggttatcaccctttactgcaaacggggcagaaagaaactcctgtatatattcaaacaaccatttatgagaccagtacaaactactcaagaggaagatggctgtagctgccgatttccagaagaagaagaaggaggatgtgaactgagagtgaagttcagcaggagcgcagacgcccccgcgtaccagcagggccagaaccagctctataacgagctgaatctaggacgaagagaggagtacgatgttttggacaagagacgtggccgggaccctgagatggggggaaagccgagaaggaagaaccctcaggaaggcctgtacaatgaactgcagaaagataagatggcggaggcctacagtgagattgggatgaaaggcgagcgccggaggggcaaggggcacgatggcctttaccagggtctcagtacagccaccaaggacacctacgacgcccttcacatgcaggccctgccccctcgctctagaggatctggagcaacaaacttctcactactcaaacaagcaggtgacgtggaggagaatcccgggcctgggatccacatggccacttacgaggttctctgtgaggtggcgcggaaactgggcacggatgacagggaagtggtattgttcctcctaaacgtgttcatacctcaacccacactggcccaattaattggagctcttagagctttaaaggaggagggcaggttaacgtttcccctgttagcggaatgtctgtttcgtgcaggtcgcagagacctcttgcgcgacctgcttcacttagacccgcgttttttagagcgccacctagcgggcacaatgagttatttcagcccttatcagctcactgttctccacgtagacggggagctgtgtgcgagggatattaggtctttgatatttttaagcaaggacactatagggtctcgcagcacaccacagacattcttacactgggtgtactgtatggaaaacttagacctactgggtcccactgacgtggatgccctaatgtcaatgcttagatctttgtcaagagtagacctacagcgccaagtgcaaaccctaatgggccttcacctttccggcccatcacactcccaacactatcgccatacaccactcgagaccgatttctacgactacaaggacgacgatgacaagactagtggctccggcgagggcagaggaagtctactaacctgcggagatgtggaagaaaatcctggcccacatatgaccgagtacaagcccacggtgcgcctcgccacccgcgacgacgtccccagggccgtacgcaccctcgccgccgcgttcgccgactaccccgccacgcgccacaccgtcgatccggaccgccacatcgagcgggtcaccgagctgcaagaactcttcctcacgcgcgtcgggctcgacatcggcaaggtgtgggtcgcggacgacggcgccgcggtggcggtctggaccacgccggagagcgtcgaagcgggggcggtgttcgccgagatcggcccgcgcatggccgagttgagcggttcccggctggccgcgcagcaacagatggaaggcctcctggcgccgcaccggcccaaggagcccgcgtggttcctggccaccgtcggcgtctcgcccgaccaccagggcaagggtctgggcagcgccgtcgtgctccccggagtggaggcggccgagcgcgccggggtgcccgccttcctggagacctccgcgccccgcaacctccccttctacgagcggctcggcttcaccgtcaccgccgacgtcgaggtgcccgaaggaccgcgcacctggtgcatgacccgcaagcccggtgcctga

SEQ ID NO: 1408 - DNA, 2913 bp, Artificial Sequence
  Synthetic Polynucleotides
atggccttaccagtgaccgccttgctcctgccgctggccttgctgctccacgccgccaggccggacgacatcgtgatgacccagagccccctgagcctgcctgtgacacctggcgagcctgccagcatctcctgtagaagcagccagagcctgctgcacagcaacggctacaactacctcgtgtggtatctccagaagcccggccagagccctcaactgctgatctacctgggcagcatcagagccagcggcgtgcccgatagattttccggcagcggctccggcaccgacttcaccctgaagatcagccgggtggaagccgaggacgtgggcgtgtactactgtatgcagcccctccagacccccatcaccttcggccagggcaccagactggaaatcaagagaggcggaggcggaagtggaggcggaggatctggcggcggaggctctggactccagtgtgtggccgctcctagatgggtgctgagccaggtgcaactccagcagtggggagccggactgctgaagcctagcgagacactgagcctgacatgcgccgtgtacggcggcagcttcagcggcaattactggtcctggatcagacagccccctggcaagggcctggaatggatcggcgagatcaaccacagcggcagcaccaactacaaccccagcctgaagtccagagtgaccatcagcgtggacaccagcaagaaccagttctccctgaagctgagcagcgtgacagccgccgacaccgccgtgtattactgtgccagaggcggctcctacaattacttcgactactggggccagggaaccctcgtgaccgtgtctagtacgcgtgagcagaaactgatctcggaagaggatctggcgaagcccaccacgacgccagcgccgcgaccaccaacaccggcgcccaccatcgcgtcgcagcccctgtccctgcgcccagaggcgtgccggccagcggcggggggcgcagtgcacacgagggggctggacttcgcctgtgacatctacatctgggcgcccttggccgggacttgtggggtccttctcctgtcactggttatcaccctttactgcaaacggggcagaaagaaactcctgtatatattcaaacaaccatttatgagaccagtacaaactactcaagaggaagatggctgtagctgccgatttccagaagaagaagaaggaggatgtgaactgagagtgaagttcagcaggagcgcagacgcccccgcgtaccagcagggccagaaccagctctataacgagctgaatctaggacgaagagaggagtacgatgttttggacaagagacgtggccgggaccctgagatggggggaaagccgagaaggaagaaccctcaggaaggcctgtacaatgaactgcagaaagataagatggcggaggcctacagtgagattgggatgaaaggcgagcgccggaggggcaaggggcacgatggcctttaccagggtctcagtacagccaccaaggacacctacgacgcccttcacatgcaggccctgccccctcgctctagaggatctggagcaacaaacttctcactactcaaacaagcaggtgacgtggaggagaatcccgggcctgggatccacatggccacttacgaggttctctgtgaggtggcgcggaaactgggcacggatgacagggaagtggtattgttcctcctaaacgtgttcatacctcaacccacactggcccaattaattggagctcttagagctttaaaggaggagggcaggttaacgtttcccctgttagcggaatgtctgtttcgtgcaggtcgcagagacctcttgcgcgacctgcttcacttagacccgcgttttttagagcgccacctagcgggcacaatgagttatttcagcccttatcagctcactgttctccacgtagacggggagctgtgtgcgagggatattaggtctttgatatttttaagcaaggacactatagggtctcgcagcacaccacagacattcttacactgggtgtactgtatggaaaacttagacctactgggtcccactgacgtggatgccctaatgtcaatgcttagatctttgtcaagagtagacctacagcgccaagtgcaaaccctaatgggccttcacctttccggcccatcacactcccaacactatcgccatacaccactcgagaccgatttctacgactacaaggacgacgatgacaagactagtggctccggcgagggcagaggaagtctactaacctgcggagatgtggaagaaaatcctggcccacatatgaccgagtacaagcccacggtgcgcctcgccacccgcgacgacgtccccagggccgtacgcaccctcgccgccgcgttcgccgactaccccgccacgcgccacaccgtcgatccggaccgccacatcgagcgggtcaccgagctgcaagaactcttcctcacgcgcgtcgggctcgacatcggcaaggtgtgggtcgcggacgacggcgccgcggtggcggtctggaccacgccggagagcgtcgaagcgggggcggtgttcgccgagatcggcccgcgcatggccgagttgagcggttcccggctggccgcgcagcaacagatggaaggcctcctggcgccgcaccggcccaaggagcccgcgtggttcctggccaccgtcggcgtctcgcccgaccaccagggcaagggtctgggcagcgccgtcgtgctccccggagtggaggcggccgagcgcgccggggtgcccgccttcctggagacctccgcgccccgcaacctccccttctacgagcggctcggcttcaccgtcaccgccgacgtcgaggtgcccgaaggaccgcgcacctggtgcatgacccgcaagcccggtgcctga

SEQ ID NO: 1409 - DNA, 2904 bp, Artificial Sequence
  Synthetic Polynucleotides
atggccttaccagtgaccgccttgctcctgccgctggccttgctgctccacgccgccaggccggaccagctgacacagagccctagcagcgtgtcagccagcgtgggcgacagagtgaccatcacctgtagagccagccggggcatcagctcttggctggcctggtatcagcagaagcccggcaaggcccccaagctgctgatctacacagccagcagcctccagagcggcgtgcccagcagattttctggcagcggctccggcaccgacttcaccctgacaatcagcagcctccagcccgaggacttcgccacctactactgccagcaggcttacagcttcccccggacctttggccagggcaccaaggtggaaatcaagcggggcggaggcggaagtggaggcggaggatctggcggcggaggctctgtggctgctcctagatgggtgctgagccaggtgcagctccaggaatctggccccggactcgtgaagcctagccagaccctgagcctgacctgtaccgtgtctggcggcagcatcagcagcggcggctactactggatctggatcagacagcaccctggcaagggcctggaatggatcggctacatctactacaacggcaacacctactataaccccagcctgaagtcccgcgtgaccatgagcgtggacaccagcaagaaccagttctccctgaagctgtccagcgtgacagccgccgataccgccgtgtactactgcgccagagatggcatcaccatgatccggggctactattacggcatggacgtgtggggccagggaaccaccgtgaccgtgtcatctacgcgtgagcagaaactgatctcggaagaggatctggcgaagcccaccacgacgccagcgccgcgaccaccaacaccggcgcccaccatcgcgtcgcagcccctgtccctgcgcccagaggcgtgccggccagcggcggggggcgcagtgcacacgagggggctggacttcgcctgtgacatctacatctgggcgcccttggccgggacttgtggggtccttctcctgtcactggttatcaccctttactgcaaacggggcagaaagaaactcctgtatatattcaaacaaccatttatgagaccagtacaaactactcaagaggaagatggctgtagctgccgatttccagaagaagaagaaggaggatgtgaactgagagtgaagttcagcaggagcgcagacgcccccgcgtaccagcagggccagaaccagctctataacgagctgaatctaggacgaagagaggagtacgatgttttggacaagagacgtggccgggaccctgagatggggggaaagccgagaaggaagaaccctcaggaaggcctgtacaatgaactgcagaaagataagatggcggaggcctacagtgagattgggatgaaaggcgagcgccggaggggcaaggggcacgatggcctttaccagggtctcagtacagccaccaaggacacctacgacgcccttcacatgcaggccctgccccctcgctctagaggatctggagcaacaaacttctcactactcaaacaagcaggtgacgtggaggagaatcccgggcctgggatccacatggccacttacgaggttctctgtgaggtggcgcggaaactgggcacggatgacagggaagtggtattgttcctcctaaacgtgttcatacctcaacccacactggcccaattaattggagctcttagagctttaaaggaggagggcaggttaacgtttcccctgttagcggaatgtctgtttcgtgcaggtcgcagagacctcttgcgcgacctgcttcacttagacccgcgttttttagagcgccacctagcgggcacaatgagttatttcagcccttatcagctcactgttctccacgtagacggggagctgtgtgcgagggatattaggtctttgatatttttaagcaaggacactatagggtctcgcagcacaccacagacattcttacactgggtgtactgtatggaaaacttagacctactgggtcccactgacgtggatgccctaatgtcaatgcttagatctttgtcaagagtagacctacagcgccaagtgcaaaccctaatgggccttcacctttccggcccatcacactcccaacactatcgccatacaccactcgagaccgatttctacgactacaaggacgacgatgacaagactagtggctccggcgagggcagaggaagtctactaacctgcggagatgtggaagaaaatcctggcccacatatgaccgagtacaagcccacggtgcgcctcgccacccgcgacgacgtccccagggccgtacgcaccctcgccgccgcgttcgccgactaccccgccacgcgccacaccgtcgatccggaccgccacatcgagcgggtcaccgagctgcaagaactcttcctcacgcgcgtcgggctcgacatcggcaaggtgtgggtcgcggacgacggcgccgcggtggcggtctggaccacgccggagagcgtcgaagcgggggcggtgttcgccgagatcggcccgcgcatggccgagttgagcggttcccggctggccgcgcagcaacagatggaaggcctcctggcgccgcaccggcccaaggagcccgcgtggttcctggccaccgtcggcgtctcgcccgaccaccagggcaagggtctgggcagcgccgtcgtgctccccggagtggaggcggccgagcgcgccggggtgcccgccttcctggagacctccgcgccccgcaacctccccttctacgagcggctcggcttcaccgtcaccgccgacgtcgaggtgcccgaaggaccgcgcacctggtgcatgacccgcaagcccggtgcctga

SEQ ID NO: 1410 - DNA, 2826 bp, Artificial Sequence
  Synthetic Polynucleotides
atggccttaccagtgaccgccttgctcctgccgctggccttgctgctccacgccgccaggccggacatcgtcgtgacacagagccctgcttccctggccgtgtccctgggacagagagccaccatcagctaccgggccagcaagagcgtgtccaccagcggctacagctacatgcactggaaccagcagaagcccggccagccccctagactgctgatctacctggtgtccaacctggaaagcggcgtgcccgccagattttctggcagcggctctggcaccgacttcaccctgaacatccaccccgtggaagaagaggacgccgccacctactactgccagcacatcagagagctgaccagaagcgagggcggaccctcttggaagggcggaggcggaagtggaggcggaggatctggcggcggaggctctgaagtgaagctggaagagtctggcggcgaccttgtgaagcctggcggcagcctgaagctgagctgtgccgccagcggctttaccttctccggctacggcatgagctgggtgcgccagacccccgacaagagactggaatgggtggcaaccatcagcagcggcggcagctacacctactatcccgacagcgtgaagggccggttcaccatctccagagacaacgccaagaacaccctgtacctgcagatgtcctccctgaagtccgaggacaccgccatgtactattgcgccaggcacgaaggcggctactacggcagttctacgcgtgagcagaaactgatctcggaagaggatctggcgaagcccaccacgacgccagcgccgcgaccaccaacaccggcgcccaccatcgcgtcgcagcccctgtccctgcgcccagaggcgtgccggccagcggcggggggcgcagtgcacacgagggggctggacttcgcctgtgacatctacatctgggcgcccttggccgggacttgtggggtccttctcctgtcactggttatcaccctttactgcaaacggggcagaaagaaactcctgtatatattcaaacaaccatttatgagaccagtacaaactactcaagaggaagatggctgtagctgccgatttccagaagaagaagaaggaggatgtgaactgagagtgaagttcagcaggagcgcagacgcccccgcgtaccagcagggccagaaccagctctataacgagctgaatctaggacgaagagaggagtacgatgttttggacaagagacgtggccgggaccctgagatggggggaaagccgagaaggaagaaccctcaggaaggcctgtacaatgaactgcagaaagataagatggcggaggcctacagtgagattgggatgaaaggcgagcgccggaggggcaaggggcacgatggcctttaccagggtctcagtacagccaccaaggacacctacgacgcccttcacatgcaggccctgccccctcgctctagaggatctggagcaacaaacttctcactactcaaacaagcaggtgacgtggaggagaatcccgggcctgggatccacatggccacttacgaggttctctgtgaggtggcgcggaaactgggcacggatgacagggaagtggtattgttcctcctaaacgtgttcatacctcaacccacactggcccaattaattggagctcttagagctttaaaggaggagggcaggttaacgtttcccctgttagcggaatgtctgtttcgtgcaggtcgcagagacctcttgcgcgacctgcttcacttagacccgcgttttttagagcgccacctagcgggcacaatgagttatttcagcccttatcagctcactgttctccacgtagacggggagctgtgtgcgagggatattaggtctttgatatttttaagcaaggacactatagggtctcgcagcacaccacagacattcttacactgggtgtactgtatggaaaacttagacctactgggtcccactgacgtggatgccctaatgtcaatgcttagatctttgtcaagagtagacctacagcgccaagtgcaaaccctaatgggccttcacctttccggcccatcacactcccaacactatcgccatacaccactcgagaccgatttctacgactacaaggacgacgatgacaagactagtggctccggcgagggcagaggaagtctactaacctgcggagatgtggaagaaaatcctggcccacatatgaccgagtacaagcccacggtgcgcctcgccacccgcgacgacgtccccagggccgtacgcaccctcgccgccgcgttcgccgactaccccgccacgcgccacaccgtcgatccggaccgccacatcgagcgggtcaccgagctgcaagaactcttcctcacgcgcgtcgggctcgacatcggcaaggtgtgggtcgcggacgacggcgccgcggtggcggtctggaccacgccggagagcgtcgaagcgggggcggtgttcgccgagatcggcccgcgcatggccgagttgagcggttcccggctggccgcgcagcaacagatggaaggcctcctggcgccgcaccggcccaaggagcccgcgtggttcctggccaccgtcggcgtctcgcccgaccaccagggcaagggtctgggcagcgccgtcgtgctccccggagtggaggcggccgagcgcgccggggtgcccgccttcctggagacctccgcgccccgcaacctccccttctacgagcggctcggcttcaccgtcaccgccgacgtcgaggtgcccgaaggaccgcgcacctggtgcatgacccgcaagcccggtgcctga

SEQ ID NO: 1411 - DNA, 2874 bp, Artificial Sequence
  Synthetic Polynucleotides
atggccttaccagtgaccgccttgctcctgccgctggccttgctgctccacgccgccaggccggacgacatccagatgacccagagccccagcagcctgtctgccagcgtgggcgacagagtgaccatcacctgtagagccagccagggcatcagcaactacctggcctggtatcagcagaaaaccggcaaggtgcccaagttcctgatctacgaggccagcaccctgcagagcggcgtgccaagtagattttccggcggaggcagcggcaccgacttcaccctgacaatcagctccctgcagcccgaggacgtggcaacctactactgccagaactacaacagcgcccccttcaccttcggccctgggaccaaggtggacatcaagggcggaggcggaagtggaggcggaggatctggcggcggaggctctcaggtgcaactggtggaatctggcggaggcgtggtgcagcctggcagaagcctgagactgagctgtgccgccagcggcttcgccttcagcagatacggaatgcactgggtgcgccaggcccctggcaaaggactggaatgggtggccgtgatttggtacgacggcagcaacaagtactacgccgacagcgtgaagggccggttcaccatcagccgggacaacagcaagaacacccagtacctgcagatgaacagcctgcgggccgaggataccgccgtgtactattgtgccagaggcggcgacttcctgtactactactattacggcatggacgtgtggggccagggaaccaccgtgaccgtgtcatctacgcgtgagcagaaactgatctcggaagaggatctggcgaagcccaccacgacgccagcgccgcgaccaccaacaccggcgcccaccatcgcgtcgcagcccctgtccctgcgcccagaggcgtgccggccagcggcggggggcgcagtgcacacgagggggctggacttcgcctgtgacatctacatctgggcgcccttggccgggacttgtggggtccttctcctgtcactggttatcaccctttactgcaaacggggcagaaagaaactcctgtatatattcaaacaaccatttatgagaccagtacaaactactcaagaggaagatggctgtagctgccgatttccagaagaagaagaaggaggatgtgaactgagagtgaagttcagcaggagcgcagacgcccccgcgtaccagcagggccagaaccagctctataacgagctgaatctaggacgaagagaggagtacgatgttttggacaagagacgtggccgggaccctgagatggggggaaagccgagaaggaagaaccctcaggaaggcctgtacaatgaactgcagaaagataagatggcggaggcctacagtgagattgggatgaaaggcgagcgccggaggggcaaggggcacgatggcctttaccagggtctcagtacagccaccaaggacacctacgacgcccttcacatgcaggccctgccccctcgctctagaggatctggagcaacaaacttctcactactcaaacaagcaggtgacgtggaggagaatcccgggcctgggatccacatggccacttacgaggttctctgtgaggtggcgcggaaactgggcacggatgacagggaagtggtattgttcctcctaaacgtgttcatacctcaacccacactggcccaattaattggagctcttagagctttaaaggaggagggcaggttaacgtttcccctgttagcggaatgtctgtttcgtgcaggtcgcagagacctcttgcgcgacctgcttcacttagacccgcgttttttagagcgccacctagcgggcacaatgagttatttcagcccttatcagctcactgttctccacgtagacggggagctgtgtgcgagggatattaggtctttgatatttttaagcaaggacactatagggtctcgcagcacaccacagacattcttacactgggtgtactgtatggaaaacttagacctactgggtcccactgacgtggatgccctaatgtcaatgcttagatctttgtcaagagtagacctacagcgccaagtgcaaaccctaatgggccttcacctttccggcccatcacactcccaacactatcgccatacaccactcgagaccgatttctacgactacaaggacgacgatgacaagactagtggctccggcgagggcagaggaagtctactaacctgcggagatgtggaagaaaatcctggcccacatatgaccgagtacaagcccacggtgcgcctcgccacccgcgacgacgtccccagggccgtacgcaccctcgccgccgcgttcgccgactaccccgccacgcgccacaccgtcgatccggaccgccacatcgagcgggtcaccgagctgcaagaactcttcctcacgcgcgtcgggctcgacatcggcaaggtgtgggtcgcggacgacggcgccgcggtggcggtctggaccacgccggagagcgtcgaagcgggggcggtgttcgccgagatcggcccgcgcatggccgagttgagcggttcccggctggccgcgcagcaacagatggaaggcctcctggcgccgcaccggcccaaggagcccgcgtggttcctggccaccgtcggcgtctcgcccgaccaccagggcaagggtctgggcagcgccgtcgtgctccccggagtggaggcggccgagcgcgccggggtgcccgccttcctggagacctccgcgccccgcaacctccccttctacgagcggctcggcttcaccgtcaccgccgacgtcgaggtgcccgaaggaccgcgcacctggtgcatgacccgcaagcccggtgcctga

SEQ ID NO: 1412 - DNA, 2847 bp, Artificial Sequence
  Synthetic Polynucleotides
atggccttaccagtgaccgccttgctcctgccgctggccttgctgctccacgccgccaggccggacatccagatgacccagagccccagcagcctgtctaccagcgtgggcgatagagtgaccctgacctgcaaggccagccaggatgtgggaaccgccgtggactggtatcagcagaagcctggccccagccccaagctgctgatctactgggccagcaccagacacaccggcatccccagcagattttccggcagcggctccggcaccgacttcaccctgacaatcagctccctgcagcccgaggacttcgccgactactactgccagcagtacaacagctaccccctgaccttcggccctgggaccaaggtggacatcaagggcggaggcggaagtggaggcggaggatctggcggcggaggctctgaagtgcaactggtgcagagcggccctgaagtgaagaaacccggcgctaccgtgaagattagctgcaagaccagcggctacaccttcaccgagtacaccatccactgggtcaagcaggcccctggcaagggcctggaatggatcggcaacatcaaccccaacaacggcggcaccacctacaaccagaagttcgaggacaaggccaccctgaccgtggacaagagcaccgacaccgcctacatggaactgagcagcctgcggagcgaggataccgccgtgtactattgtgccgccggatggaacttcgactactggggacagggcaccctgctgaccgtgtctagtacgcgtgagcagaaactgatctcggaagaggatctggcgaagcccaccacgacgccagcgccgcgaccaccaacaccggcgcccaccatcgcgtcgcagcccctgtccctgcgcccagaggcgtgccggccagcggcggggggcgcagtgcacacgagggggctggacttcgcctgtgacatctacatctgggcgcccttggccgggacttgtggggtccttctcctgtcactggttatcaccctttactgcaaacggggcagaaagaaactcctgtatatattcaaacaaccatttatgagaccagtacaaactactcaagaggaagatggctgtagctgccgatttccagaagaagaagaaggaggatgtgaactgagagtgaagttcagcaggagcgcagacgcccccgcgtaccagcagggccagaaccagctctataacgagctgaatctaggacgaagagaggagtacgatgttttggacaagagacgtggccgggaccctgagatggggggaaagccgagaaggaagaaccctcaggaaggcctgtacaatgaactgcagaaagataagatggcggaggcctacagtgagattgggatgaaaggcgagcgccggaggggcaaggggcacgatggcctttaccagggtctcagtacagccaccaaggacacctacgacgcccttcacatgcaggccctgccccctcgctctagaggatctggagcaacaaacttctcactactcaaacaagcaggtgacgtggaggagaatcccgggcctgggatccacatggccacttacgaggttctctgtgaggtggcgcggaaactgggcacggatgacagggaagtggtattgttcctcctaaacgtgttcatacctcaacccacactggcccaattaattggagctcttagagctttaaaggaggagggcaggttaacgtttcccctgttagcggaatgtctgtttcgtgcaggtcgcagagacctcttgcgcgacctgcttcacttagacccgcgttttttagagcgccacctagcgggcacaatgagttatttcagcccttatcagctcactgttctccacgtagacggggagctgtgtgcgagggatattaggtctttgatatttttaagcaaggacactatagggtctcgcagcacaccacagacattcttacactgggtgtactgtatggaaaacttagacctactgggtcccactgacgtggatgccctaatgtcaatgcttagatctttgtcaagagtagacctacagcgccaagtgcaaaccctaatgggccttcacctttccggcccatcacactcccaacactatcgccatacaccactcgagaccgatttctacgactacaaggacgacgatgacaagactagtggctccggcgagggcagaggaagtctactaacctgcggagatgtggaagaaaatcctggcccacatatgaccgagtacaagcccacggtgcgcctcgccacccgcgacgacgtccccagggccgtacgcaccctcgccgccgcgttcgccgactaccccgccacgcgccacaccgtcgatccggaccgccacatcgagcgggtcaccgagctgcaagaactcttcctcacgcgcgtcgggctcgacatcggcaaggtgtgggtcgcggacgacggcgccgcggtggcggtctggaccacgccggagagcgtcgaagcgggggcggtgttcgccgagatcggcccgcgcatggccgagttgagcggttcccggctggccgcgcagcaacagatggaaggcctcctggcgccgcaccggcccaaggagcccgcgtggttcctggccaccgtcggcgtctcgcccgaccaccagggcaagggtctgggcagcgccgtcgtgctccccggagtggaggcggccgagcgcgccggggtgcccgccttcctggagacctccgcgccccgcaacctccccttctacgagcggctcggcttcaccgtcaccgccgacgtcgaggtgcccgaaggaccgcgcacctggtgcatgacccgcaagcccggtgcctga

SEQ ID NO: 1413 - DNA, 2850 bp, Artificial Sequence
  Synthetic Polynucleotides
atggccttaccagtgaccgccttgctcctgccgctggccttgctgctccacgccgccaggccggacatccagatgacccagagccccagcagcctgtctgccagcgtgggcgacagagtgaccatcacatgcaaggccagccaggacatctacccctacctgaactggttccagcagaagcccggcaaggcccccaagaccctgatctaccggaccaacagactgctggacggcgtgcccagcagattttctggcagcggctccggcaccgacttcaccttcaccatcagctccctccagccctactactgcctccagtacgacgagttccccctgacctttggagccggcaccaagctggaaatcaagagaggcggaggcggaagtggaggcggaggatctggcggcggaggctctcagatcaccctgaaagagtccggccccaccctcgtgaagcctacccagaccctgacactgacctgcaccttcagcggcttcagcctgagcaccagcaacatgggcgtgggctggatcagacagcctcccggaaaagccctggaatggctggcccacatttggtgggacgacgacaagtactacagccccagcctgaagtcccggctgacaatcaccaaggacaccagcaagaaccaggtggtgctgaccatgaccaacatggaccccgtggacaccgccacctactattgcgtgcggagcaactacggctacgcttggtttgcctactggggccagggcaccctcgtgaccgtgtcatctacgcgtgagcagaaactgatctcggaagaggatctggcgaagcccaccacgacgccagcgccgcgaccaccaacaccggcgcccaccatcgcgtcgcagcccctgtccctgcgcccagaggcgtgccggccagcggcggggggcgcagtgcacacgagggggctggacttcgcctgtgacatctacatctgggcgcccttggccgggacttgtggggtccttctcctgtcactggttatcaccctttactgcaaacggggcagaaagaaactcctgtatatattcaaacaaccatttatgagaccagtacaaactactcaagaggaagatggctgtagctgccgatttccagaagaagaagaaggaggatgtgaactgagagtgaagttcagcaggagcgcagacgcccccgcgtaccagcagggccagaaccagctctataacgagctgaatctaggacgaagagaggagtacgatgttttggacaagagacgtggccgggaccctgagatggggggaaagccgagaaggaagaaccctcaggaaggcctgtacaatgaactgcagaaagataagatggcggaggcctacagtgagattgggatgaaaggcgagcgccggaggggcaaggggcacgatggcctttaccagggtctcagtacagccaccaaggacacctacgacgcccttcacatgcaggccctgccccctcgctctagaggatctggagcaacaaacttctcactactcaaacaagcaggtgacgtggaggagaatcccgggcctgggatccacatggccacttacgaggttctctgtgaggtggcgcggaaactgggcacggatgacagggaagtggtattgttcctcctaaacgtgttcatacctcaacccacactggcccaattaattggagctcttagagctttaaaggaggagggcaggttaacgtttcccctgttagcggaatgtctgtttcgtgcaggtcgcagagacctcttgcgcgacctgcttcacttagacccgcgttttttagagcgccacctagcgggcacaatgagttatttcagcccttatcagctcactgttctccacgtagacggggagctgtgtgcgagggatattaggtctttgatatttttaagcaaggacactatagggtctcgcagcacaccacagacattcttacactgggtgtactgtatggaaaacttagacctactgggtcccactgacgtggatgccctaatgtcaatgcttagatctttgtcaagagtagacctacagcgccaagtgcaaaccctaatgggccttcacctttccggcccatcacactcccaacactatcgccatacaccactcgagaccgatttctacgactacaaggacgacgatgacaagactagtggctccggcgagggcagaggaagtctactaacctgcggagatgtggaagaaaatcctggcccacatatgaccgagtacaagcccacggtgcgcctcgccacccgcgacgacgtccccagggccgtacgcaccctcgccgccgcgttcgccgactaccccgccacgcgccacaccgtcgatccggaccgccacatcgagcgggtcaccgagctgcaagaactcttcctcacgcgcgtcgggctcgacatcggcaaggtgtgggtcgcggacgacggcgccgcggtggcggtctggaccacgccggagagcgtcgaagcgggggcggtgttcgccgagatcggcccgcgcatggccgagttgagcggttcccggctggccgcgcagcaacagatggaaggcctcctggcgccgcaccggcccaaggagcccgcgtggttcctggccaccgtcggcgtctcgcccgaccaccagggcaagggtctgggcagcgccgtcgtgctccccggagtggaggcggccgagcgcgccggggtgcccgccttcctggagacctccgcgccccgcaacctccccttctacgagcggctcggcttcaccgtcaccgccgacgtcgaggtgcccgaaggaccgcgcacctggtgcatgacccgcaagcccggtgcctga

SEQ ID NO: 1414 - DNA, 2850 bp, Artificial Sequence
  Synthetic Polynucleotides
atggccttaccagtgaccgccttgctcctgccgctggccttgctgctccacgccgccaggccggacatcgtgatgacccagagccagaaattcatgagcaccagcgtgggcgacagagtgaacgtgacctgcaaggccagccagaacgtgggcaccaacgtcgtgtggtatcagcagaaaaccggccagagccccaaggccctgatccacagcgccagctacagatacagcggcgtgcccgacagattcaccggcagcggctctggcaccgacttcaccctgaccctgagcaacgtgcagagcgaggacctggccgaatacttctgccagcactacaacagcttcccttacaccttcggcggaggcaccaagctggaaatcaagagaggcggaggcggaagtggaggcggaggatctggcggcggaggctctcaggtgcaactccagcagagcggagccgaactcgtgcggcctggcgtgtccgtgaagattagctgcaagggctccggctacaggttcaccgactaccccatccactgggtcaagcagagccacgccaagagcctggaatggatcggcatcatcagcacctactacggcgacgtgaccaacaaccccaagttccggggcaaggccaccatgacagtggacaagagcagcaccaccgcctacatggaactggcccggctgaccagcgaggactccgccatctactactgcgcccggaacgacctgttcgcctattggggccagggcaccctcgtgacagtgtctgctacgcgtgagcagaaactgatctcggaagaggatctggcgaagcccaccacgacgccagcgccgcgaccaccaacaccggcgcccaccatcgcgtcgcagcccctgtccctgcgcccagaggcgtgccggccagcggcggggggcgcagtgcacacgagggggctggacttcgcctgtgacatctacatctgggcgcccttggccgggacttgtggggtccttctcctgtcactggttatcaccctttactgcaaacggggcagaaagaaactcctgtatatattcaaacaaccatttatgagaccagtacaaactactcaagaggaagatggctgtagctgccgatttccagaagaagaagaaggaggatgtgaactgagagtgaagttcagcaggagcgcagacgcccccgcgtaccagcagggccagaaccagctctataacgagctgaatctaggacgaagagaggagtacgatgttttggacaagagacgtggccgggaccctgagatggggggaaagccgagaaggaagaaccctcaggaaggcctgtacaatgaactgcagaaagataagatggcggaggcctacagtgagattgggatgaaaggcgagcgccggaggggcaaggggcacgatggcctttaccagggtctcagtacagccaccaaggacacctacgacgcccttcacatgcaggccctgccccctcgctctagaggatctggagcaacaaacttctcactactcaaacaagcaggtgacgtggaggagaatcccgggcctgggatccacatggccacttacgaggttctctgtgaggtggcgcggaaactgggcacggatgacagggaagtggtattgttcctcctaaacgtgttcatacctcaacccacactggcccaattaattggagctcttagagctttaaaggaggagggcaggttaacgtttcccctgttagcggaatgtctgtttcgtgcaggtcgcagagacctcttgcgcgacctgcttcacttagacccgcgttttttagagcgccacctagcgggcacaatgagttatttcagcccttatcagctcactgttctccacgtagacggggagctgtgtgcgagggatattaggtctttgatatttttaagcaaggacactatagggtctcgcagcacaccacagacattcttacactgggtgtactgtatggaaaacttagacctactgggtcccactgacgtggatgccctaatgtcaatgcttagatctttgtcaagagtagacctacagcgccaagtgcaaaccctaatgggccttcacctttccggcccatcacactcccaacactatcgccatacaccactcgagaccgatttctacgactacaaggacgacgatgacaagactagtggctccggcgagggcagaggaagtctactaacctgcggagatgtggaagaaaatcctggcccacatatgaccgagtacaagcccacggtgcgcctcgccacccgcgacgacgtccccagggccgtacgcaccctcgccgccgcgttcgccgactaccccgccacgcgccacaccgtcgatccggaccgccacatcgagcgggtcaccgagctgcaagaactcttcctcacgcgcgtcgggctcgacatcggcaaggtgtgggtcgcggacgacggcgccgcggtggcggtctggaccacgccggagagcgtcgaagcgggggcggtgttcgccgagatcggcccgcgcatggccgagttgagcggttcccggctggccgcgcagcaacagatggaaggcctcctggcgccgcaccggcccaaggagcccgcgtggttcctggccaccgtcggcgtctcgcccgaccaccagggcaagggtctgggcagcgccgtcgtgctccccggagtggaggcggccgagcgcgccggggtgcccgccttcctggagacctccgcgccccgcaacctccccttctacgagcggctcggcttcaccgtcaccgccgacgtcgaggtgcccgaaggaccgcgcacctggtgcatgacccgcaagcccggtgcctga

SEQ ID NO: 1415 - DNA, 2859 bp, Artificial Sequence
  Synthetic Polynucleotides
atggccttaccagtgaccgccttgctcctgccgctggccttgctgctccacgccgccaggccggacatcaagatgacccagagccccagctctatgtacgccagcctgggcgagcgcgtgaccatcacctgtaaagccagccccgacatcaacagctacctgagctggttccagcagaagcccggcaagagccccaagaccctgatctaccgggccaacagactggtggatggcgtgcccagcagattctctggcggcggaagcggccaggactacagcctgaccatcaactccctggaatacgaggacatgggcatctactactgcctccagtacgacgagttcccctacaccttcggcggaggcaccaagctggaaatgaaaggcggaggcggaagtggaggcggaggatctggcggcggaggctctgaagtgaagctggtggaatcaggaggaggcctcgtgaaacctggcggctctctgaagctgagctgtgccgccagcggcttcaccttcagcagctacgccatgagctgggtgcgccagattcccgagaagcggctggaatgggtggcctccattagcagaggcggcaccacctactaccccgacagcgtgaagggccggttcaccatctccagagacaacgtgcggaacatcctgtacctccagatgagcagcctgcggagcgaggacaccgccatgtactactgcggcagatacgactacgacggctactacgctatggactactggggccagggcaccagcgtgaccgtgtcatctacgcgtgagcagaaactgatctcggaagaggatctggcgaagcccaccacgacgccagcgccgcgaccaccaacaccggcgcccaccatcgcgtcgcagcccctgtccctgcgcccagaggcgtgccggccagcggcggggggcgcagtgcacacgagggggctggacttcgcctgtgacatctacatctgggcgcccttggccgggacttgtggggtccttctcctgtcactggttatcaccctttactgcaaacggggcagaaagaaactcctgtatatattcaaacaaccatttatgagaccagtacaaactactcaagaggaagatggctgtagctgccgatttccagaagaagaagaaggaggatgtgaactgagagtgaagttcagcaggagcgcagacgcccccgcgtaccagcagggccagaaccagctctataacgagctgaatctaggacgaagagaggagtacgatgttttggacaagagacgtggccgggaccctgagatggggggaaagccgagaaggaagaaccctcaggaaggcctgtacaatgaactgcagaaagataagatggcggaggcctacagtgagattgggatgaaaggcgagcgccggaggggcaaggggcacgatggcctttaccagggtctcagtacagccaccaaggacacctacgacgcccttcacatgcaggccctgccccctcgctctagaggatctggagcaacaaacttctcactactcaaacaagcaggtgacgtggaggagaatcccgggcctgggatccacatggccacttacgaggttctctgtgaggtggcgcggaaactgggcacggatgacagggaagtggtattgttcctcctaaacgtgttcatacctcaacccacactggcccaattaattggagctcttagagctttaaaggaggagggcaggttaacgtttcccctgttagcggaatgtctgtttcgtgcaggtcgcagagacctcttgcgcgacctgcttcacttagacccgcgttttttagagcgccacctagcgggcacaatgagttatttcagcccttatcagctcactgttctccacgtagacggggagctgtgtgcgagggatattaggtctttgatatttttaagcaaggacactatagggtctcgcagcacaccacagacattcttacactgggtgtactgtatggaaaacttagacctactgggtcccactgacgtggatgccctaatgtcaatgcttagatctttgtcaagagtagacctacagcgccaagtgcaaaccctaatgggccttcacctttccggcccatcacactcccaacactatcgccatacaccactcgagaccgatttctacgactacaaggacgacgatgacaagactagtggctccggcgagggcagaggaagtctactaacctgcggagatgtggaagaaaatcctggcccacatatgaccgagtacaagcccacggtgcgcctcgccacccgcgacgacgtccccagggccgtacgcaccctcgccgccgcgttcgccgactaccccgccacgcgccacaccgtcgatccggaccgccacatcgagcgggtcaccgagctgcaagaactcttcctcacgcgcgtcgggctcgacatcggcaaggtgtgggtcgcggacgacggcgccgcggtggcggtctggaccacgccggagagcgtcgaagcgggggcggtgttcgccgagatcggcccgcgcatggccgagttgagcggttcccggctggccgcgcagcaacagatggaaggcctcctggcgccgcaccggcccaaggagcccgcgtggttcctggccaccgtcggcgtctcgcccgaccaccagggcaagggtctgggcagcgccgtcgtgctccccggagtggaggcggccgagcgcgccggggtgcccgccttcctggagacctccgcgccccgcaacctccccttctacgagcggctcggcttcaccgtcaccgccgacgtcgaggtgcccgaaggaccgcgcacctggtgcatgacccgcaagcccggtgcctga

SEQ ID NO: 1416 - DNA, 2868 bp, Artificial Sequence
  Synthetic Polynucleotides
atggccttaccagtgaccgccttgctcctgccgctggccttgctgctccacgccgccaggccggacgacgtggtcgtgacccctgtgtcctgcttcctgagctgcatctctggcgccgagggccaccacctgattcagggccagcagaagtgccagtacatctggctgctgtacgccctggaacccaccgagacaagaaccgccacccagacccctcacctgtcctgcatccagcccagaatctggggaccctgccaggtgcagtggcagtgggtgtgggatagactgcacccccagcaccctagttgtggcggcggaggctgttgcaacctgctgctgtctgcccacggcgcctacacatttggcggaggcacccggctggaactgaaaggcggaggcggaagtggaggcggaggatctggcggcggaggctctgaagtgaagctccaggaaagcggccctgagctcgtgaagcctggcgcctctgtgaagatgagctgcaaggccagcggctacaccttcaccagctacgtgatgcactgggtcaagcagaagcccggccagggcctggaatggatcggctacatcaacccctacaacgacggcaccaagtacaacgagaagttcaagggcaaggccaccctgaccagcgacaagagcagcagcaccgcctacatggaactgagcagcctgacctccgaggacagcgccgtgtactactgcgcccggtggaaaatctactacggcaactacgaggactactggggccagggcacacccctgacagtgtctagtacgcgtgagcagaaactgatctcggaagaggatctggcgaagcccaccacgacgccagcgccgcgaccaccaacaccggcgcccaccatcgcgtcgcagcccctgtccctgcgcccagaggcgtgccggccagcggcggggggcgcagtgcacacgagggggctggacttcgcctgtgacatctacatctgggcgcccttggccgggacttgtggggtccttctcctgtcactggttatcaccctttactgcaaacggggcagaaagaaactcctgtatatattcaaacaaccatttatgagaccagtacaaactactcaagaggaagatggctgtagctgccgatttccagaagaagaagaaggaggatgtgaactgagagtgaagttcagcaggagcgcagacgcccccgcgtaccagcagggccagaaccagctctataacgagctgaatctaggacgaagagaggagtacgatgttttggacaagagacgtggccgggaccctgagatggggggaaagccgagaaggaagaaccctcaggaaggcctgtacaatgaactgcagaaagataagatggcggaggcctacagtgagattgggatgaaaggcgagcgccggaggggcaaggggcacgatggcctttaccagggtctcagtacagccaccaaggacacctacgacgcccttcacatgcaggccctgccccctcgctctagaggatctggagcaacaaacttctcactactcaaacaagcaggtgacgtggaggagaatcccgggcctgggatccacatggccacttacgaggttctctgtgaggtggcgcggaaactgggcacggatgacagggaagtggtattgttcctcctaaacgtgttcatacctcaacccacactggcccaattaattggagctcttagagctttaaaggaggagggcaggttaacgtttcccctgttagcggaatgtctgtttcgtgcaggtcgcagagacctcttgcgcgacctgcttcacttagacccgcgttttttagagcgccacctagcgggcacaatgagttatttcagcccttatcagctcactgttctccacgtagacggggagctgtgtgcgagggatattaggtctttgatatttttaagcaaggacactatagggtctcgcagcacaccacagacattcttacactgggtgtactgtatggaaaacttagacctactgggtcccactgacgtggatgccctaatgtcaatgcttagatctttgtcaagagtagacctacagcgccaagtgcaaaccctaatgggccttcacctttccggcccatcacactcccaacactatcgccatacaccactcgagaccgatttctacgactacaaggacgacgatgacaagactagtggctccggcgagggcagaggaagtctactaacctgcggagatgtggaagaaaatcctggcccacatatgaccgagtacaagcccacggtgcgcctcgccacccgcgacgacgtccccagggccgtacgcaccctcgccgccgcgttcgccgactaccccgccacgcgccacaccgtcgatccggaccgccacatcgagcgggtcaccgagctgcaagaactcttcctcacgcgcgtcgggctcgacatcggcaaggtgtgggtcgcggacgacggcgccgcggtggcggtctggaccacgccggagagcgtcgaagcgggggcggtgttcgccgagatcggcccgcgcatggccgagttgagcggttcccggctggccgcgcagcaacagatggaaggcctcctggcgccgcaccggcccaaggagcccgcgtggttcctggccaccgtcggcgtctcgcccgaccaccagggcaagggtctgggcagcgccgtcgtgctccccggagtggaggcggccgagcgcgccggggtgcccgccttcctggagacctccgcgccccgcaacctccccttctacgagcggctcggcttcaccgtcaccgccgacgtcgaggtgcccgaaggaccgcgcacctggtgcatgacccgcaagcccggtgcctga

SEQ ID NO: 1417 - DNA, 2958 bp, Artificial Sequence
  Synthetic Polynucleotides
atggccttaccagtgaccgccttgctcctgccgctggccttgctgctccacgccgccaggccggacgaattccaggtgcaactggtgcagtctggcggagggctggtgcagccagggggatctctgagactgagctgtgccgccagcgacttcgacttcgccgcctacgagatgagctgggtgcgccaggctcctggacagggactggaatgggtggccatcatcagccacgacggcatcgacaagtattacaccgacagcgtgaagggccggttcaccatcagccgggacaacagcaagaacaccctgtacctgcagatgaataccctgcgggccgaggacaccgccacctactattgcctgagactgggagccgtgggccagggcacacttgtgacagtgtctagcctcgagggaggaggcggctccgggggaggcggaagtggaggcggaggatctgggtctggaggaagcggatctggaggctcagggtcagggggctcaggcagtggaggcagcttcgaacaggtgcaactggtgcagagcggaggcggactggtgcagcctgggggcagtctgaggctgtcttgtgccgcctccgatttcgccttcgatgattacgagatgtcttgggtgcggcaggccccaggcaaagccctggaatggatcggcgacatcaaccacagcggcaccaccatctacaaccccagcctgaagtccagagtgaccatctccagagacaactccaagaatactctgtacctgcagatgaacacactgagagccgaagatacagccatctactactgcgccagaccccactacggcgactacagcgacgccttcgacatctggggccagggaaccatggtcaccgtgtcctctacgcgtgagcagaaactgatctcggaagaggatctggcgaagcccaccacgacgccagcgccgcgaccaccaacaccggcgcccaccatcgcgtcgcagcccctgtccctgcgcccagaggcgtgccggccagcggcggggggcgcagtgcacacgagggggctggacttcgcctgtgacatctacatctgggcgcccttggccgggacttgtggggtccttctcctgtcactggttatcaccctttactgcaaacggggcagaaagaaactcctgtatatattcaaacaaccatttatgagaccagtacaaactactcaagaggaagatggctgtagctgccgatttccagaagaagaagaaggaggatgtgaactgagagtgaagttcagcaggagcgcagacgcccccgcgtaccagcagggccagaaccagctctataacgagctgaatctaggacgaagagaggagtacgatgttttggacaagagacgtggccgggaccctgagatggggggaaagccgagaaggaagaaccctcaggaaggcctgtacaatgaactgcagaaagataagatggcggaggcctacagtgagattgggatgaaaggcgagcgccggaggggcaaggggcacgatggcctttaccagggtctcagtacagccaccaaggacacctacgacgcccttcacatgcaggccctgccccctcgctctagaggatctggagcaacaaacttctcactactcaaacaagcaggtgacgtggaggagaatcccgggcctgggatccacatggccacttacgaggttctctgtgaggtggcgcggaaactgggcacggatgacagggaagtggtattgttcctcctaaacgtgttcatacctcaacccacactggcccaattaattggagctcttagagctttaaaggaggagggcaggttaacgtttcccctgttagcggaatgtctgtttcgtgcaggtcgcagagacctcttgcgcgacctgcttcacttagacccgcgttttttagagcgccacctagcgggcacaatgagttatttcagcccttatcagctcactgttctccacgtagacggggagctgtgtgcgagggatattaggtctttgatatttttaagcaaggacactatagggtctcgcagcacaccacagacattcttacactgggtgtactgtatggaaaacttagacctactgggtcccactgacgtggatgccctaatgtcaatgcttagatctttgtcaagagtagacctacagcgccaagtgcaaaccctaatgggccttcacctttccggcccatcacactcccaacactatcgccatacaccactcgagaccgatttctacgactacaaggacgacgatgacaagactagtggctccggcgagggcagaggaagtctactaacctgcggagatgtggaagaaaatcctggcccacatatgaccgagtacaagcccacggtgcgcctcgccacccgcgacgacgtccccagggccgtacgcaccctcgccgccgcgttcgccgactaccccgccacgcgccacaccgtcgatccggaccgccacatcgagcgggtcaccgagctgcaagaactcttcctcacgcgcgtcgggctcgacatcggcaaggtgtgggtcgcggacgacggcgccgcggtggcggtctggaccacgccggagagcgtcgaagcgggggcggtgttcgccgagatcggcccgcgcatggccgagttgagcggttcccggctggccgcgcagcaacagatggaaggcctcctggcgccgcaccggcccaaggagcccgcgtggttcctggccaccgtcggcgtctcgcccgaccaccagggcaagggtctgggcagcgccgtcgtgctccccggagtggaggcggccgagcgcgccggggtgcccgccttcctggagacctccgcgccccgcaacctccccttctacgagcggctcggcttcaccgtcaccgccgacgtcgaggtgcccgaaggaccgcgcacctggtgcatgacccgcaagcccggtgcctga

SEQ ID NO: 1418 - DNA, 2883 bp, Artificial Sequence
  Synthetic Polynucleotides
atggccttaccagtgaccgccttgctcctgccgctggccttgctgctccacgccgccaggccggagatcgtgatgacccagagccctgccaccctgtccgtgtctccaggcgaaagagccaccctgagctgtagagccagccagagcgtgtccagcaacctggcctggtatcagcagaagcccggccaggctccccggctgctgatctatggcgcttctaccagagccaccggcatccccgccagattttctggcagcggctccggcaccgacttcaccctgacaatcagctccctccagtccgtggacagcgccgtgtactactgccagcagtacaacaactggcccccctacaccttcggccagggcaccaagctggaaatcaagggcggaggcggaagtggaggcggaggatctggcggcggaggctctcaggtgcaactgctggaaagcggagggggcgtggtgcagcctggaagaagcctgagactgagctgtgccgccagcggcttcaccttcagcttctacggaatgcactgggtgcgccaggcccctggcaaaggactggaatgggtggccgccatcagctacgacggcagcaacaagtattacgccgacagcgtgaagggccggttcaccatcagccgggacaacagcaagaacaccctgtacctccagatgaacagcctgcgggccgaggacacagccgtgtattattgcgccaagcggcccaaccagttctactgctccgacggcagatgctacagcatcgactactggggccagggaaccctcgtgaccgtgtctagtacgcgtgagcagaaactgatctcggaagaggatctggcgaagcccaccacgacgccagcgccgcgaccaccaacaccggcgcccaccatcgcgtcgcagcccctgtccctgcgcccagaggcgtgccggccagcggcggggggcgcagtgcacacgagggggctggacttcgcctgtgacatctacatctgggcgcccttggccgggacttgtggggtccttctcctgtcactggttatcaccctttactgcaaacggggcagaaagaaactcctgtatatattcaaacaaccatttatgagaccagtacaaactactcaagaggaagatggctgtagctgccgatttccagaagaagaagaaggaggatgtgaactgagagtgaagttcagcaggagcgcagacgcccccgcgtaccagcagggccagaaccagctctataacgagctgaatctaggacgaagagaggagtacgatgttttggacaagagacgtggccgggaccctgagatggggggaaagccgagaaggaagaaccctcaggaaggcctgtacaatgaactgcagaaagataagatggcggaggcctacagtgagattgggatgaaaggcgagcgccggaggggcaaggggcacgatggcctttaccagggtctcagtacagccaccaaggacacctacgacgcccttcacatgcaggccctgccccctcgctctagaggatctggagcaacaaacttctcactactcaaacaagcaggtgacgtggaggagaatcccgggcctgggatccacatggccacttacgaggttctctgtgaggtggcgcggaaactgggcacggatgacagggaagtggtattgttcctcctaaacgtgttcatacctcaacccacactggcccaattaattggagctcttagagctttaaaggaggagggcaggttaacgtttcccctgttagcggaatgtctgtttcgtgcaggtcgcagagacctcttgcgcgacctgcttcacttagacccgcgttttttagagcgccacctagcgggcacaatgagttatttcagcccttatcagctcactgttctccacgtagacggggagctgtgtgcgagggatattaggtctttgatatttttaagcaaggacactatagggtctcgcagcacaccacagacattcttacactgggtgtactgtatggaaaacttagacctactgggtcccactgacgtggatgccctaatgtcaatgcttagatctttgtcaagagtagacctacagcgccaagtgcaaaccctaatgggccttcacctttccggcccatcacactcccaacactatcgccatacaccactcgagaccgatttctacgactacaaggacgacgatgacaagactagtggctccggcgagggcagaggaagtctactaacctgcggagatgtggaagaaaatcctggcccacatatgaccgagtacaagcccacggtgcgcctcgccacccgcgacgacgtccccagggccgtacgcaccctcgccgccgcgttcgccgactaccccgccacgcgccacaccgtcgatccggaccgccacatcgagcgggtcaccgagctgcaagaactcttcctcacgcgcgtcgggctcgacatcggcaaggtgtgggtcgcggacgacggcgccgcggtggcggtctggaccacgccggagagcgtcgaagcgggggcggtgttcgccgagatcggcccgcgcatggccgagttgagcggttcccggctggccgcgcagcaacagatggaaggcctcctggcgccgcaccggcccaaggagcccgcgtggttcctggccaccgtcggcgtctcgcccgaccaccagggcaagggtctgggcagcgccgtcgtgctccccggagtggaggcggccgagcgcgccggggtgcccgccttcctggagacctccgcgccccgcaacctccccttctacgagcggctcggcttcaccgtcaccgccgacgtcgaggtgcccgaaggaccgcgcacctggtgcatgacccgcaagcccggtgcctga

SEQ ID NO: 1419 - DNA, 2871 bp, Artificial Sequence
  Synthetic Polynucleotides
atggccttaccagtgaccgccttgctcctgccgctggccttgctgctccacgccgccaggccgcagagcgtgctgacacagcctcctagtgcctctgccggcggaacacctggacagagagtgaccatctcctgctccggcagcagcagcaacatcggcagcaacttcgtgtactggtatcagcaactgcccggcaccgcccccaagctgctgatctacagaaacaaccagcggcccagcggcgtgcccgatagattctctggaagcagaagcggcaccagcgccagcctggctggactgagaagcgaggacgaggccgactactactgtgccgccgatagcctgggcggccactacgtgttcggcaccggaacaaaagtgctgggcggaggcggaagtggaggcggaggatctggcggcggaggctctcaggtgcaactggtggaatctggcggaggctctgtgcagcctggcagaagcctgagactgagctgtgaagcctccggcttcaccttcgaggcttacgccatgcactgggtgcgccagccacctggcaaaggactggaatgggtgtccagcatcaactggaacagcggcagaatcgcctacgccgacagcgtgaagggccggttcaccatcagccgggacaacgccagaaacagcctgtacctccagatgaacagcctgcggctggaagataccgccttctactactgcgccaaggacatccggcggttcagcacaggcggagccgagtttgagtattggggccagggcaccctcgtgaccgtgtctagtacgcgtgagcagaaactgatctcggaagaggatctggcgaagcccaccacgacgccagcgccgcgaccaccaacaccggcgcccaccatcgcgtcgcagcccctgtccctgcgcccagaggcgtgccggccagcggcggggggcgcagtgcacacgagggggctggacttcgcctgtgacatctacatctgggcgcccttggccgggacttgtggggtccttctcctgtcactggttatcaccctttactgcaaacggggcagaaagaaactcctgtatatattcaaacaaccatttatgagaccagtacaaactactcaagaggaagatggctgtagctgccgatttccagaagaagaagaaggaggatgtgaactgagagtgaagttcagcaggagcgcagacgcccccgcgtaccagcagggccagaaccagctctataacgagctgaatctaggacgaagagaggagtacgatgttttggacaagagacgtggccgggaccctgagatggggggaaagccgagaaggaagaaccctcaggaaggcctgtacaatgaactgcagaaagataagatggcggaggcctacagtgagattgggatgaaaggcgagcgccggaggggcaaggggcacgatggcctttaccagggtctcagtacagccaccaaggacacctacgacgcccttcacatgcaggccctgccccctcgctctagaggatctggagcaacaaacttctcactactcaaacaagcaggtgacgtggaggagaatcccgggcctgggatccacatggccacttacgaggttctctgtgaggtggcgcggaaactgggcacggatgacagggaagtggtattgttcctcctaaacgtgttcatacctcaacccacactggcccaattaattggagctcttagagctttaaaggaggagggcaggttaacgtttcccctgttagcggaatgtctgtttcgtgcaggtcgcagagacctcttgcgcgacctgcttcacttagacccgcgttttttagagcgccacctagcgggcacaatgagttatttcagcccttatcagctcactgttctccacgtagacggggagctgtgtgcgagggatattaggtctttgatatttttaagcaaggacactatagggtctcgcagcacaccacagacattcttacactgggtgtactgtatggaaaacttagacctactgggtcccactgacgtggatgccctaatgtcaatgcttagatctttgtcaagagtagacctacagcgccaagtgcaaaccctaatgggccttcacctttccggcccatcacactcccaacactatcgccatacaccactcgagaccgatttctacgactacaaggacgacgatgacaagactagtggctccggcgagggcagaggaagtctactaacctgcggagatgtggaagaaaatcctggcccacatatgaccgagtacaagcccacggtgcgcctcgccacccgcgacgacgtccccagggccgtacgcaccctcgccgccgcgttcgccgactaccccgccacgcgccacaccgtcgatccggaccgccacatcgagcgggtcaccgagctgcaagaactcttcctcacgcgcgtcgggctcgacatcggcaaggtgtgggtcgcggacgacggcgccgcggtggcggtctggaccacgccggagagcgtcgaagcgggggcggtgttcgccgagatcggcccgcgcatggccgagttgagcggttcccggctggccgcgcagcaacagatggaaggcctcctggcgccgcaccggcccaaggagcccgcgtggttcctggccaccgtcggcgtctcgcccgaccaccagggcaagggtctgggcagcgccgtcgtgctccccggagtggaggcggccgagcgcgccggggtgcccgccttcctggagacctccgcgccccgcaacctccccttctacgagcggctcggcttcaccgtcaccgccgacgtcgaggtgcccgaaggaccgcgcacctggtgcatgacccgcaagcccggtgcctga

SEQ ID NO: 1420 - DNA, 2856 bp, Artificial Sequence
  Synthetic Polynucleotides
atggccttaccagtgaccgccttgctcctgccgctggccttgctgctccacgccgccaggccggagaacgtgctgacacagagccctgccatcatgagcgcttccccaggcgagaaagtgaccatgacatgtagcgccagcagcagcgtgtcctacatgcactggtatcagcagaagtccagcacaagccccaagctgtggatctacgacaccagcaaactggcctctggcgtgccaggcagattttctggcagcggcagcggaaacagctacagcctgacaatcagcagcatggaagccgaggacgtggcaacctactactgctttcaaggcagcggctaccctctgacctttggagccggaacaaagctggaactgaaaggcggaggcggaagtggaggcggaggatctggcggcggaggctctcaggtgcagctgaaagaatctggccctggactggtggcccctagccagtctctgagcatcacctgtaccgtgtccggcttcagcctgagttctcagggcgtgtactgggtccgacagcctcctggaaaaggactggaatggctgggagccatttgggctggcggcagcaccaattacaacagcgccctgatgagccggctgagcatctccaaggacaacagcaagagccaggtgttcctgaagatgaacagcctccagaccgacgacaccgccatgtactactgcgccagagtggatggctaccggggctacaacatggactattggggccagggcaccagcgtgacagtctcttctacgcgtgagcagaaactgatctcggaagaggatctggcgaagcccaccacgacgccagcgccgcgaccaccaacaccggcgcccaccatcgcgtcgcagcccctgtccctgcgcccagaggcgtgccggccagcggcggggggcgcagtgcacacgagggggctggacttcgcctgtgacatctacatctgggcgcccttggccgggacttgtggggtccttctcctgtcactggttatcaccctttactgcaaacggggcagaaagaaactcctgtatatattcaaacaaccatttatgagaccagtacaaactactcaagaggaagatggctgtagctgccgatttccagaagaagaagaaggaggatgtgaactgagagtgaagttcagcaggagcgcagacgcccccgcgtaccagcagggccagaaccagctctataacgagctgaatctaggacgaagagaggagtacgatgttttggacaagagacgtggccgggaccctgagatggggggaaagccgagaaggaagaaccctcaggaaggcctgtacaatgaactgcagaaagataagatggcggaggcctacagtgagattgggatgaaaggcgagcgccggaggggcaaggggcacgatggcctttaccagggtctcagtacagccaccaaggacacctacgacgcccttcacatgcaggccctgccccctcgctctagaggatctggagcaacaaacttctcactactcaaacaagcaggtgacgtggaggagaatcccgggcctgggatccacatggccacttacgaggttctctgtgaggtggcgcggaaactgggcacggatgacagggaagtggtattgttcctcctaaacgtgttcatacctcaacccacactggcccaattaattggagctcttagagctttaaaggaggagggcaggttaacgtttcccctgttagcggaatgtctgtttcgtgcaggtcgcagagacctcttgcgcgacctgcttcacttagacccgcgttttttagagcgccacctagcgggcacaatgagttatttcagcccttatcagctcactgttctccacgtagacggggagctgtgtgcgagggatattaggtctttgatatttttaagcaaggacactatagggtctcgcagcacaccacagacattcttacactgggtgtactgtatggaaaacttagacctactgggtcccactgacgtggatgccctaatgtcaatgcttagatctttgtcaagagtagacctacagcgccaagtgcaaaccctaatgggccttcacctttccggcccatcacactcccaacactatcgccatacaccactcgagaccgatttctacgactacaaggacgacgatgacaagactagtggctccggcgagggcagaggaagtctactaacctgcggagatgtggaagaaaatcctggcccacatatgaccgagtacaagcccacggtgcgcctcgccacccgcgacgacgtccccagggccgtacgcaccctcgccgccgcgttcgccgactaccccgccacgcgccacaccgtcgatccggaccgccacatcgagcgggtcaccgagctgcaagaactcttcctcacgcgcgtcgggctcgacatcggcaaggtgtgggtcgcggacgacggcgccgcggtggcggtctggaccacgccggagagcgtcgaagcgggggcggtgttcgccgagatcggcccgcgcatggccgagttgagcggttcccggctggccgcgcagcaacagatggaaggcctcctggcgccgcaccggcccaaggagcccgcgtggttcctggccaccgtcggcgtctcgcccgaccaccagggcaagggtctgggcagcgccgtcgtgctccccggagtggaggcggccgagcgcgccggggtgcccgccttcctggagacctccgcgccccgcaacctccccttctacgagcggctcggcttcaccgtcaccgccgacgtcgaggtgcccgaaggaccgcgcacctggtgcatgacccgcaagcccggtgcctga

SEQ ID NO: 1421 - DNA, 2868 bp, Artificial Sequence
  Synthetic Polynucleotides
atggccttaccagtgaccgccttgctcctgccgctggccttgctgctccacgccgccaggccggacgacatccagatgacccagagccccagcagcctgtctgccagcgtgggcgacagagtgaccatcacctgtagagccagccagagcatcagcagctacctgaactggtatcagcagaagcccggcaaggcccccaaactgctgatctacgacgccagcaacctggaaaccggcgtgcccagcagattttccggcagcggctctggcaccgacttcaccttcaccatcagctccctccagcccgaggacattgccacctactactgccagcagtacgacaacctgcccctgacctttggcggaggcaccaaggtggacatcaagagaggcggaggcggaagtggaggcggaggatctggcggcggaggctctcaggtgcaactggtggaatctggcggcggagtggtgcagcctggcagaagcctgagactgagctgtgccgccagcggcttcacctttagcagctacgccatgcactgggtgcgccaggcccctggaaaaggcctggaatgggtggccgtgatctcctacgacggctccaacaagtattacgccgacagcgtgaagggccggttcaccatctccagagacaacagcaagaacaccctgtacctccagatgaacagcctgcgggccgaggacaccgccgtgtactattgtgccagggctcacaacagcagctcttggagcttcgactactggggccagggcaccctcgtgaccgtgtcatctacgcgtgagcagaaactgatctcggaagaggatctggcgaagcccaccacgacgccagcgccgcgaccaccaacaccggcgcccaccatcgcgtcgcagcccctgtccctgcgcccagaggcgtgccggccagcggcggggggcgcagtgcacacgagggggctggacttcgcctgtgacatctacatctgggcgcccttggccgggacttgtggggtccttctcctgtcactggttatcaccctttactgcaaacggggcagaaagaaactcctgtatatattcaaacaaccatttatgagaccagtacaaactactcaagaggaagatggctgtagctgccgatttccagaagaagaagaaggaggatgtgaactgagagtgaagttcagcaggagcgcagacgcccccgcgtaccagcagggccagaaccagctctataacgagctgaatctaggacgaagagaggagtacgatgttttggacaagagacgtggccgggaccctgagatggggggaaagccgagaaggaagaaccctcaggaaggcctgtacaatgaactgcagaaagataagatggcggaggcctacagtgagattgggatgaaaggcgagcgccggaggggcaaggggcacgatggcctttaccagggtctcagtacagccaccaaggacacctacgacgcccttcacatgcaggccctgccccctcgctctagaggatctggagcaacaaacttctcactactcaaacaagcaggtgacgtggaggagaatcccgggcctgggatccacatggccacttacgaggttctctgtgaggtggcgcggaaactgggcacggatgacagggaagtggtattgttcctcctaaacgtgttcatacctcaacccacactggcccaattaattggagctcttagagctttaaaggaggagggcaggttaacgtttcccctgttagcggaatgtctgtttcgtgcaggtcgcagagacctcttgcgcgacctgcttcacttagacccgcgttttttagagcgccacctagcgggcacaatgagttatttcagcccttatcagctcactgttctccacgtagacggggagctgtgtgcgagggatattaggtctttgatatttttaagcaaggacactatagggtctcgcagcacaccacagacattcttacactgggtgtactgtatggaaaacttagacctactgggtcccactgacgtggatgccctaatgtcaatgcttagatctttgtcaagagtagacctacagcgccaagtgcaaaccctaatgggccttcacctttccggcccatcacactcccaacactatcgccatacaccactcgagaccgatttctacgactacaaggacgacgatgacaagactagtggctccggcgagggcagaggaagtctactaacctgcggagatgtggaagaaaatcctggcccacatatgaccgagtacaagcccacggtgcgcctcgccacccgcgacgacgtccccagggccgtacgcaccctcgccgccgcgttcgccgactaccccgccacgcgccacaccgtcgatccggaccgccacatcgagcgggtcaccgagctgcaagaactcttcctcacgcgcgtcgggctcgacatcggcaaggtgtgggtcgcggacgacggcgccgcggtggcggtctggaccacgccggagagcgtcgaagcgggggcggtgttcgccgagatcggcccgcgcatggccgagttgagcggttcccggctggccgcgcagcaacagatggaaggcctcctggcgccgcaccggcccaaggagcccgcgtggttcctggccaccgtcggcgtctcgcccgaccaccagggcaagggtctgggcagcgccgtcgtgctccccggagtggaggcggccgagcgcgccggggtgcccgccttcctggagacctccgcgccccgcaacctccccttctacgagcggctcggcttcaccgtcaccgccgacgtcgaggtgcccgaaggaccgcgcacctggtgcatgacccgcaagcccggtgcctga

SEQ ID NO: 1422 - DNA, 2895 bp, Artificial Sequence
  Synthetic Polynucleotides
atggccttaccagtgaccgccttgctcctgccgctggccttgctgctccacgccgccaggccggacgacgtcgtgatgacccagagccctctgagcctgcctgtgtccctgggcgatcaggccagcatctcctgcagatccagccagagactggtgcacagcaacggcaacacctacctgcactggtatctgcagaagcccggccagagccccaagctgctgatctaccgggtgtccaacagattccccggcgtgcccgatagattcagcggctctggcagcggcaccgacttcaccctgaagatcagccgggtggaagccgaggacctgggcatctatttctgcagccagagcacccacgtgccctacacctttggcggaggcaccaagctggaaatcaagcggggcggaggcggaagtggaggcggaggatctggcggcggaggctctgaagtgcggctgcagcagtctggccccgacctgattaagcctggggccagcgtgaagatgagctgcaaggccagcggctacaccttcaccggctacgtgatgcactgggtcaagcagaggccaggccagggcctggaatggatcggcttcatcaacccctacaacgacgacatccagagcaacgagcggttccggggcaaggccaccctgaccagcgataagagcagcaccaccgcctacatggaactgagcagcctgacctccgaggacagcgccgtgtactactgtgctaggggagccggctacaacttcgacggggcctacagattcttcgacttttggggccagggcaccacactgaccgtgtcctctacgcgtgagcagaaactgatctcggaagaggatctggcgaagcccaccacgacgccagcgccgcgaccaccaacaccggcgcccaccatcgcgtcgcagcccctgtccctgcgcccagaggcgtgccggccagcggcggggggcgcagtgcacacgagggggctggacttcgcctgtgacatctacatctgggcgcccttggccgggacttgtggggtccttctcctgtcactggttatcaccctttactgcaaacggggcagaaagaaactcctgtatatattcaaacaaccatttatgagaccagtacaaactactcaagaggaagatggctgtagctgccgatttccagaagaagaagaaggaggatgtgaactgagagtgaagttcagcaggagcgcagacgcccccgcgtaccagcagggccagaaccagctctataacgagctgaatctaggacgaagagaggagtacgatgttttggacaagagacgtggccgggaccctgagatggggggaaagccgagaaggaagaaccctcaggaaggcctgtacaatgaactgcagaaagataagatggcggaggcctacagtgagattgggatgaaaggcgagcgccggaggggcaaggggcacgatggcctttaccagggtctcagtacagccaccaaggacacctacgacgcccttcacatgcaggccctgccccctcgctctagaggatctggagcaacaaacttctcactactcaaacaagcaggtgacgtggaggagaatcccgggcctgggatccacatggccacttacgaggttctctgtgaggtggcgcggaaactgggcacggatgacagggaagtggtattgttcctcctaaacgtgttcatacctcaacccacactggcccaattaattggagctcttagagctttaaaggaggagggcaggttaacgtttcccctgttagcggaatgtctgtttcgtgcaggtcgcagagacctcttgcgcgacctgcttcacttagacccgcgttttttagagcgccacctagcgggcacaatgagttatttcagcccttatcagctcactgttctccacgtagacggggagctgtgtgcgagggatattaggtctttgatatttttaagcaaggacactatagggtctcgcagcacaccacagacattcttacactgggtgtactgtatggaaaacttagacctactgggtcccactgacgtggatgccctaatgtcaatgcttagatctttgtcaagagtagacctacagcgccaagtgcaaaccctaatgggccttcacctttccggcccatcacactcccaacactatcgccatacaccactcgagaccgatttctacgactacaaggacgacgatgacaagactagtggctccggcgagggcagaggaagtctactaacctgcggagatgtggaagaaaatcctggcccacatatgaccgagtacaagcccacggtgcgcctcgccacccgcgacgacgtccccagggccgtacgcaccctcgccgccgcgttcgccgactaccccgccacgcgccacaccgtcgatccggaccgccacatcgagcgggtcaccgagctgcaagaactcttcctcacgcgcgtcgggctcgacatcggcaaggtgtgggtcgcggacgacggcgccgcggtggcggtctggaccacgccggagagcgtcgaagcgggggcggtgttcgccgagatcggcccgcgcatggccgagttgagcggttcccggctggccgcgcagcaacagatggaaggcctcctggcgccgcaccggcccaaggagcccgcgtggttcctggccaccgtcggcgtctcgcccgaccaccagggcaagggtctgggcagcgccgtcgtgctccccggagtggaggcggccgagcgcgccggggtgcccgccttcctggagacctccgcgccccgcaacctccccttctacgagcggctcggcttcaccgtcaccgccgacgtcgaggtgcccgaaggaccgcgcacctggtgcatgacccgcaagcccggtgcctga

SEQ ID NO: 1423 - DNA, 2868 bp, Artificial Sequence
  Synthetic Polynucleotides
atggccttaccagtgaccgccttgctcctgccgctggccttgctgctccacgccgccaggccggacagctacgagctgacccagcctcctagcgtgtccgtgtctcctggacagaccgccaccatctcttgcagcggcgatcaactgggcgggaagtacggccactggtatcagaagaagcccggccagagccccgtgctggtgctgtaccaggacagaaaacggcctgccggcatccccgagagattcagcggaagcagcagcggcaacaccatcaccctgaccatcagcggcacccaggccgtggatgaggccgactactactgccaggcttgggacaccaatctgggcggcgtgttcggcggaggcaccaaagtgacagtgctgggacagggcggaggcggaagtggaggcggaggatctggcggcggaggctctcaggtgcaactggtggaaagcggagccgaagtgaagaaacctggggccagcgtgaaggtgtcctgcaaggccagcggctacacctttaccggctactacatgcactgggtgcgccaggctccaggccagggactggaatggatgggccggatcaaccccaatagcggcggcaccaactacgcccagaaattccagggcagagtgaccatgaccagagacaccagcatcagcaccgcctacatggaactgagccggctgagaagcgacgacaccgccgtgtactactgcgccagccctagaggcagaggcagcgccttcgatatttggggccagggcacactcgtgaccgtgtcctctacgcgtgagcagaaactgatctcggaagaggatctggcgaagcccaccacgacgccagcgccgcgaccaccaacaccggcgcccaccatcgcgtcgcagcccctgtccctgcgcccagaggcgtgccggccagcggcggggggcgcagtgcacacgagggggctggacttcgcctgtgacatctacatctgggcgcccttggccgggacttgtggggtccttctcctgtcactggttatcaccctttactgcaaacggggcagaaagaaactcctgtatatattcaaacaaccatttatgagaccagtacaaactactcaagaggaagatggctgtagctgccgatttccagaagaagaagaaggaggatgtgaactgagagtgaagttcagcaggagcgcagacgcccccgcgtaccagcagggccagaaccagctctataacgagctgaatctaggacgaagagaggagtacgatgttttggacaagagacgtggccgggaccctgagatggggggaaagccgagaaggaagaaccctcaggaaggcctgtacaatgaactgcagaaagataagatggcggaggcctacagtgagattgggatgaaaggcgagcgccggaggggcaaggggcacgatggcctttaccagggtctcagtacagccaccaaggacacctacgacgcccttcacatgcaggccctgccccctcgctctagaggatctggagcaacaaacttctcactactcaaacaagcaggtgacgtggaggagaatcccgggcctgggatccacatggccacttacgaggttctctgtgaggtggcgcggaaactgggcacggatgacagggaagtggtattgttcctcctaaacgtgttcatacctcaacccacactggcccaattaattggagctcttagagctttaaaggaggagggcaggttaacgtttcccctgttagcggaatgtctgtttcgtgcaggtcgcagagacctcttgcgcgacctgcttcacttagacccgcgttttttagagcgccacctagcgggcacaatgagttatttcagcccttatcagctcactgttctccacgtagacggggagctgtgtgcgagggatattaggtctttgatatttttaagcaaggacactatagggtctcgcagcacaccacagacattcttacactgggtgtactgtatggaaaacttagacctactgggtcccactgacgtggatgccctaatgtcaatgcttagatctttgtcaagagtagacctacagcgccaagtgcaaaccctaatgggccttcacctttccggcccatcacactcccaacactatcgccatacaccactcgagaccgatttctacgactacaaggacgacgatgacaagactagtggctccggcgagggcagaggaagtctactaacctgcggagatgtggaagaaaatcctggcccacatatgaccgagtacaagcccacggtgcgcctcgccacccgcgacgacgtccccagggccgtacgcaccctcgccgccgcgttcgccgactaccccgccacgcgccacaccgtcgatccggaccgccacatcgagcgggtcaccgagctgcaagaactcttcctcacgcgcgtcgggctcgacatcggcaaggtgtgggtcgcggacgacggcgccgcggtggcggtctggaccacgccggagagcgtcgaagcgggggcggtgttcgccgagatcggcccgcgcatggccgagttgagcggttcccggctggccgcgcagcaacagatggaaggcctcctggcgccgcaccggcccaaggagcccgcgtggttcctggccaccgtcggcgtctcgcccgaccaccagggcaagggtctgggcagcgccgtcgtgctccccggagtggaggcggccgagcgcgccggggtgcccgccttcctggagacctccgcgccccgcaacctccccttctacgagcggctcggcttcaccgtcaccgccgacgtcgaggtgcccgaaggaccgcgcacctggtgcatgacccgcaagcccggtgcctga

SEQ ID NO: 1424 - DNA, 2877 bp, Artificial Sequence
  Synthetic Polynucleotides
atggccttaccagtgaccgccttgctcctgccgctggccttgctgctccacgccgccaggccggacaacttcatgctgacccagccccacagcgtgtccgagagccctggcaagaccgtgaccatctcctgcaccagaagcagcggctctatcgccagcaaatacgtgcagtggtatcagcagaggcccggcagcagccctaccaccgtgatctacgaggacaaccagaggcctagcggcgtgcccgatagattcagcggcagcatcgacaccagcagcaacagcgccagcctgaccatcagcggcctgagaacagaggacgaggccgactactactgccacagctacgacagcaacaaccactccgtgttcggcggaggcaccaaagtgacagtgctgggacagggcggaggcggaagtggaggcggaggatctggcggcggaggctctgaagtgcaactggtggaaagcgggggaggcgtggtgcagccaggcggatctctgagactgagctgtgccgccagcggcttcaccttcagcagctacgccatgagctgggtgcgccaggcccctggaaaaggcctggaatgggtgtccgccatctctggctctggcggcagcacctactacgccgatagcgtgaagggccggttcagcatcagccgggacaacagcaagaacaccctgtacctccagatgaacagcctgcgggccgaggacaccgccgtgtactactgtgccagaaccagaagctccggggccttcgacatctggggccagggaacactcgtgaccgtgtcctctacgcgtgagcagaaactgatctcggaagaggatctggcgaagcccaccacgacgccagcgccgcgaccaccaacaccggcgcccaccatcgcgtcgcagcccctgtccctgcgcccagaggcgtgccggccagcggcggggggcgcagtgcacacgagggggctggacttcgcctgtgacatctacatctgggcgcccttggccgggacttgtggggtccttctcctgtcactggttatcaccctttactgcaaacggggcagaaagaaactcctgtatatattcaaacaaccatttatgagaccagtacaaactactcaagaggaagatggctgtagctgccgatttccagaagaagaagaaggaggatgtgaactgagagtgaagttcagcaggagcgcagacgcccccgcgtaccagcagggccagaaccagctctataacgagctgaatctaggacgaagagaggagtacgatgttttggacaagagacgtggccgggaccctgagatggggggaaagccgagaaggaagaaccctcaggaaggcctgtacaatgaactgcagaaagataagatggcggaggcctacagtgagattgggatgaaaggcgagcgccggaggggcaaggggcacgatggcctttaccagggtctcagtacagccaccaaggacacctacgacgcccttcacatgcaggccctgccccctcgctctagaggatctggagcaacaaacttctcactactcaaacaagcaggtgacgtggaggagaatcccgggcctgggatccacatggccacttacgaggttctctgtgaggtggcgcggaaactgggcacggatgacagggaagtggtattgttcctcctaaacgtgttcatacctcaacccacactggcccaattaattggagctcttagagctttaaaggaggagggcaggttaacgtttcccctgttagcggaatgtctgtttcgtgcaggtcgcagagacctcttgcgcgacctgcttcacttagacccgcgttttttagagcgccacctagcgggcacaatgagttatttcagcccttatcagctcactgttctccacgtagacggggagctgtgtgcgagggatattaggtctttgatatttttaagcaaggacactatagggtctcgcagcacaccacagacattcttacactgggtgtactgtatggaaaacttagacctactgggtcccactgacgtggatgccctaatgtcaatgcttagatctttgtcaagagtagacctacagcgccaagtgcaaaccctaatgggccttcacctttccggcccatcacactcccaacactatcgccatacaccactcgagaccgatttctacgactacaaggacgacgatgacaagactagtggctccggcgagggcagaggaagtctactaacctgcggagatgtggaagaaaatcctggcccacatatgaccgagtacaagcccacggtgcgcctcgccacccgcgacgacgtccccagggccgtacgcaccctcgccgccgcgttcgccgactaccccgccacgcgccacaccgtcgatccggaccgccacatcgagcgggtcaccgagctgcaagaactcttcctcacgcgcgtcgggctcgacatcggcaaggtgtgggtcgcggacgacggcgccgcggtggcggtctggaccacgccggagagcgtcgaagcgggggcggtgttcgccgagatcggcccgcgcatggccgagttgagcggttcccggctggccgcgcagcaacagatggaaggcctcctggcgccgcaccggcccaaggagcccgcgtggttcctggccaccgtcggcgtctcgcccgaccaccagggcaagggtctgggcagcgccgtcgtgctccccggagtggaggcggccgagcgcgccggggtgcccgccttcctggagacctccgcgccccgcaacctccccttctacgagcggctcggcttcaccgtcaccgccgacgtcgaggtgcccgaaggaccgcgcacctggtgcatgacccgcaagcccggtgcctga

SEQ ID NO: 1425 - DNA, 2862 bp, Artificial Sequence
  Synthetic Polynucleotides
atggccttaccagtgaccgccttgctcctgccgctggccttgctgctccacgccgccaggccggacatccagatgaaccagagccccagcagcctgagcgccagcctgggcgataccatcaccatcacctgtcacgccagccagaacatcaacgtgtggctgagctggtatcagcagaagcccggcaacatccccaagctgctgatctacaaggccagcaacctgcacaccggcgtgcccagcagattttctggcagcggctctggcaccggcttcaccattaccatcagctccctccagcccgaggacattgccacctactactgccagcagggccagagctacccctggacatttggcggaggcaccaagctggaaatcaagagaggcggaggcggaagtggaggcggaggatctggcggcggaggctctgaagtgcaactccagcagagcggcccagagcttgtgaagcctggcgcttccgtgaagattagctgcaaagccagcggctacagcttcaccggctacttcatgaactgggtcaagcagagccacggcaagagcctggagtacatcggcagattcaacccctacaacggcgagacactgtacaaccagaagttcaagggcaaggccaccctgaccgtggacaagagcagcagcaccgtgcacatggaactgctgagcgtgaccagcgaggacagcgccgtgtactactgtggcagaagcggcaacgacgacgctatggactattggggccagggcaccagcgtgaccgtgtctagtgctacgcgtgagcagaaactgatctcggaagaggatctggcgaagcccaccacgacgccagcgccgcgaccaccaacaccggcgcccaccatcgcgtcgcagcccctgtccctgcgcccagaggcgtgccggccagcggcggggggcgcagtgcacacgagggggctggacttcgcctgtgacatctacatctgggcgcccttggccgggacttgtggggtccttctcctgtcactggttatcaccctttactgcaaacggggcagaaagaaactcctgtatatattcaaacaaccatttatgagaccagtacaaactactcaagaggaagatggctgtagctgccgatttccagaagaagaagaaggaggatgtgaactgagagtgaagttcagcaggagcgcagacgcccccgcgtaccagcagggccagaaccagctctataacgagctgaatctaggacgaagagaggagtacgatgttttggacaagagacgtggccgggaccctgagatggggggaaagccgagaaggaagaaccctcaggaaggcctgtacaatgaactgcagaaagataagatggcggaggcctacagtgagattgggatgaaaggcgagcgccggaggggcaaggggcacgatggcctttaccagggtctcagtacagccaccaaggacacctacgacgcccttcacatgcaggccctgccccctcgctctagaggatctggagcaacaaacttctcactactcaaacaagcaggtgacgtggaggagaatcccgggcctgggatccacatggccacttacgaggttctctgtgaggtggcgcggaaactgggcacggatgacagggaagtggtattgttcctcctaaacgtgttcatacctcaacccacactggcccaattaattggagctcttagagctttaaaggaggagggcaggttaacgtttcccctgttagcggaatgtctgtttcgtgcaggtcgcagagacctcttgcgcgacctgcttcacttagacccgcgttttttagagcgccacctagcgggcacaatgagttatttcagcccttatcagctcactgttctccacgtagacggggagctgtgtgcgagggatattaggtctttgatatttttaagcaaggacactatagggtctcgcagcacaccacagacattcttacactgggtgtactgtatggaaaacttagacctactgggtcccactgacgtggatgccctaatgtcaatgcttagatctttgtcaagagtagacctacagcgccaagtgcaaaccctaatgggccttcacctttccggcccatcacactcccaacactatcgccatacaccactcgagaccgatttctacgactacaaggacgacgatgacaagactagtggctccggcgagggcagaggaagtctactaacctgcggagatgtggaagaaaatcctggcccacatatgaccgagtacaagcccacggtgcgcctcgccacccgcgacgacgtccccagggccgtacgcaccctcgccgccgcgttcgccgactaccccgccacgcgccacaccgtcgatccggaccgccacatcgagcgggtcaccgagctgcaagaactcttcctcacgcgcgtcgggctcgacatcggcaaggtgtgggtcgcggacgacggcgccgcggtggcggtctggaccacgccggagagcgtcgaagcgggggcggtgttcgccgagatcggcccgcgcatggccgagttgagcggttcccggctggccgcgcagcaacagatggaaggcctcctggcgccgcaccggcccaaggagcccgcgtggttcctggccaccgtcggcgtctcgcccgaccaccagggcaagggtctgggcagcgccgtcgtgctccccggagtggaggcggccgagcgcgccggggtgcccgccttcctggagacctccgcgccccgcaacctccccttctacgagcggctcggcttcaccgtcaccgccgacgtcgaggtgcccgaaggaccgcgcacctggtgcatgacccgcaagcccggtgcctga

SEQ ID NO: 1426 - DNA, 2865 bp, Artificial Sequence
  Synthetic Polynucleotides
atggccttaccagtgaccgccttgctcctgccgctggccttgctgctccacgccgccaggccggacgacatccagatgacccagagccccagcatcctgagcgccagcgtgggcgacagagtgaccatcacctgtcgggccagccagagattcggcgactacctggcctggtatcagcagaagcctggacaggcccccaagctgctgatctacggcgcttccacactccagagcggcgtgcccagcagattttctggcagcggctccggcaccgagttcaccctgacaatcagcggcctccagcccgaggacttcgccacctactattgccagcaggccaacagcttccctatcaccttcggcaagggcacccggctggacatcagaagaggcggaggcggaagtggaggcggaggatctggcggcggaggctctcaggtgcagctggtgcagtctggggccgaagtgaagaaacccggcagcagcgtgaaggtgtcctgcaaggcttccggcggcaccttcagcagctacgccatttcttgggtgcgccaggccccaggacagggcctggaatggatgggctggatcaacgtgggcaacggcaacgccatctacagccagaaattccagggccgcgtgacaatcaccagagacaccagcgccaccaccgcctacatggaactgagcagcctgcggagcgaggacaccgccgtgtactactgtgccagggatggcgagagagcctgggacctggattattggggccagggcacactcgtgaccgtgtcctctacgcgtgagcagaaactgatctcggaagaggatctggcgaagcccaccacgacgccagcgccgcgaccaccaacaccggcgcccaccatcgcgtcgcagcccctgtccctgcgcccagaggcgtgccggccagcggcggggggcgcagtgcacacgagggggctggacttcgcctgtgacatctacatctgggcgcccttggccgggacttgtggggtccttctcctgtcactggttatcaccctttactgcaaacggggcagaaagaaactcctgtatatattcaaacaaccatttatgagaccagtacaaactactcaagaggaagatggctgtagctgccgatttccagaagaagaagaaggaggatgtgaactgagagtgaagttcagcaggagcgcagacgcccccgcgtaccagcagggccagaaccagctctataacgagctgaatctaggacgaagagaggagtacgatgttttggacaagagacgtggccgggaccctgagatggggggaaagccgagaaggaagaaccctcaggaaggcctgtacaatgaactgcagaaagataagatggcggaggcctacagtgagattgggatgaaaggcgagcgccggaggggcaaggggcacgatggcctttaccagggtctcagtacagccaccaaggacacctacgacgcccttcacatgcaggccctgccccctcgctctagaggatctggagcaacaaacttctcactactcaaacaagcaggtgacgtggaggagaatcccgggcctgggatccacatggccacttacgaggttctctgtgaggtggcgcggaaactgggcacggatgacagggaagtggtattgttcctcctaaacgtgttcatacctcaacccacactggcccaattaattggagctcttagagctttaaaggaggagggcaggttaacgtttcccctgttagcggaatgtctgtttcgtgcaggtcgcagagacctcttgcgcgacctgcttcacttagacccgcgttttttagagcgccacctagcgggcacaatgagttatttcagcccttatcagctcactgttctccacgtagacggggagctgtgtgcgagggatattaggtctttgatatttttaagcaaggacactatagggtctcgcagcacaccacagacattcttacactgggtgtactgtatggaaaacttagacctactgggtcccactgacgtggatgccctaatgtcaatgcttagatctttgtcaagagtagacctacagcgccaagtgcaaaccctaatgggccttcacctttccggcccatcacactcccaacactatcgccatacaccactcgagaccgatttctacgactacaaggacgacgatgacaagactagtggctccggcgagggcagaggaagtctactaacctgcggagatgtggaagaaaatcctggcccacatatgaccgagtacaagcccacggtgcgcctcgccacccgcgacgacgtccccagggccgtacgcaccctcgccgccgcgttcgccgactaccccgccacgcgccacaccgtcgatccggaccgccacatcgagcgggtcaccgagctgcaagaactcttcctcacgcgcgtcgggctcgacatcggcaaggtgtgggtcgcggacgacggcgccgcggtggcggtctggaccacgccggagagcgtcgaagcgggggcggtgttcgccgagatcggcccgcgcatggccgagttgagcggttcccggctggccgcgcagcaacagatggaaggcctcctggcgccgcaccggcccaaggagcccgcgtggttcctggccaccgtcggcgtctcgcccgaccaccagggcaagggtctgggcagcgccgtcgtgctccccggagtggaggcggccgagcgcgccggggtgcccgccttcctggagacctccgcgccccgcaacctccccttctacgagcggctcggcttcaccgtcaccgccgacgtcgaggtgcccgaaggaccgcgcacctggtgcatgacccgcaagcccggtgcctga

SEQ ID NO: 1427 - DNA, 2880 bp, Artificial Sequence
  Synthetic Polynucleotides
atggccttaccagtgaccgccttgctcctgccgctggccttgctgctccacgccgccaggccggacgagacaaccctgacacagagccctggcaccctgagcctgtctccaggcgaaagagccacactgagctgtcgggccagccagagcgtgtccagctcttacctggcctggtatcagcagaagcccggccaggctccccggctgctgatctatggcgcttctagcagagccaccggcatccccgatagattcagcggctctggcagcggcaccgacttcaccctgaccatcagcagactggaacccgaggacttcgccgtgtactactgccagcagtacggcagcagcccctacacattcggccagggcaccaagctggaaatcaagagaggcggaggcggaagtggaggcggaggatctggcggcggaggctctcaggtgcaactggtgcagtctggcggcggagtggtgcagcctggaagaagcctgagactgtcctgtgccgccagcggcttcaccttcagcagctacgccatgcactgggtgcgccaggcccctggaaaaggactggaatgggtggccgtgatctcctacgacggcagcaacaagtattacgccgacagcgtgaagggccggttcaccatctccagagacaacagcaagaacaccctgtacctccagatgaacagcctgcgggccgaggacacagccgtgtattattgcgccagagagctgcggttcctggaatggtccagcgacgccttcgacatctggggccagggaacaatggtcaccgtgtcctccacgcgtgagcagaaactgatctcggaagaggatctggcgaagcccaccacgacgccagcgccgcgaccaccaacaccggcgcccaccatcgcgtcgcagcccctgtccctgcgcccagaggcgtgccggccagcggcggggggcgcagtgcacacgagggggctggacttcgcctgtgacatctacatctgggcgcccttggccgggacttgtggggtccttctcctgtcactggttatcaccctttactgcaaacggggcagaaagaaactcctgtatatattcaaacaaccatttatgagaccagtacaaactactcaagaggaagatggctgtagctgccgatttccagaagaagaagaaggaggatgtgaactgagagtgaagttcagcaggagcgcagacgcccccgcgtaccagcagggccagaaccagctctataacgagctgaatctaggacgaagagaggagtacgatgttttggacaagagacgtggccgggaccctgagatggggggaaagccgagaaggaagaaccctcaggaaggcctgtacaatgaactgcagaaagataagatggcggaggcctacagtgagattgggatgaaaggcgagcgccggaggggcaaggggcacgatggcctttaccagggtctcagtacagccaccaaggacacctacgacgcccttcacatgcaggccctgccccctcgctctagaggatctggagcaacaaacttctcactactcaaacaagcaggtgacgtggaggagaatcccgggcctgggatccacatggccacttacgaggttctctgtgaggtggcgcggaaactgggcacggatgacagggaagtggtattgttcctcctaaacgtgttcatacctcaacccacactggcccaattaattggagctcttagagctttaaaggaggagggcaggttaacgtttcccctgttagcggaatgtctgtttcgtgcaggtcgcagagacctcttgcgcgacctgcttcacttagacccgcgttttttagagcgccacctagcgggcacaatgagttatttcagcccttatcagctcactgttctccacgtagacggggagctgtgtgcgagggatattaggtctttgatatttttaagcaaggacactatagggtctcgcagcacaccacagacattcttacactgggtgtactgtatggaaaacttagacctactgggtcccactgacgtggatgccctaatgtcaatgcttagatctttgtcaagagtagacctacagcgccaagtgcaaaccctaatgggccttcacctttccggcccatcacactcccaacactatcgccatacaccactcgagaccgatttctacgactacaaggacgacgatgacaagactagtggctccggcgagggcagaggaagtctactaacctgcggagatgtggaagaaaatcctggcccacatatgaccgagtacaagcccacggtgcgcctcgccacccgcgacgacgtccccagggccgtacgcaccctcgccgccgcgttcgccgactaccccgccacgcgccacaccgtcgatccggaccgccacatcgagcgggtcaccgagctgcaagaactcttcctcacgcgcgtcgggctcgacatcggcaaggtgtgggtcgcggacgacggcgccgcggtggcggtctggaccacgccggagagcgtcgaagcgggggcggtgttcgccgagatcggcccgcgcatggccgagttgagcggttcccggctggccgcgcagcaacagatggaaggcctcctggcgccgcaccggcccaaggagcccgcgtggttcctggccaccgtcggcgtctcgcccgaccaccagggcaagggtctgggcagcgccgtcgtgctccccggagtggaggcggccgagcgcgccggggtgcccgccttcctggagacctccgcgccccgcaacctccccttctacgagcggctcggcttcaccgtcaccgccgacgtcgaggtgcccgaaggaccgcgcacctggtgcatgacccgcaagcccggtgcctga

SEQ ID NO: 1428 - DNA, 2865 bp, Artificial Sequence
  Synthetic Polynucleotides
atggccttaccagtgaccgccttgctcctgccgctggccttgctgctccacgccgccaggccggagatcgtgctgacacagagccctgccaccctgtctctgagccctggcgaaagagccaccctgagctgtagagccagccagagcgtgcggagctacctggcctggtatcagcagaagcctggacaggcccccagactgctgatctacgacgccagcaatcgggccacaggcatccccgccagattttctggctctggcagcggcaccgacttcaccctgacaatcagcagcctggaacccgaggacttcgccgtgtactactgccagcagcggagcaactggccccctacctttggacagggcaccaaggtggaaatcaagggcggaggcggaagtggaggcggaggatctggcggcggaggctctcaactccaggtgcaggaatctggccccggactcgtgaagcccagcgagacactgagcctgacctgtaccgtgtccggcggcagcatcagcaacagctacttctcctggggctggatcagacagccccctggcaagggcctggaatggatcggcagcttctactacggcgagaaaacctactacaaccccagcctgaagtccagagccaccatcagcatcgacaccagcaagagccagttctccctgaagctgagcagcgtgacagccgccgacaccgccgtgtattattgccccagaggccccaccatgatccggggcgtgatcgactcttggggccagggaacactcgtgaccgtgtcctctacgcgtgagcagaaactgatctcggaagaggatctggcgaagcccaccacgacgccagcgccgcgaccaccaacaccggcgcccaccatcgcgtcgcagcccctgtccctgcgcccagaggcgtgccggccagcggcggggggcgcagtgcacacgagggggctggacttcgcctgtgacatctacatctgggcgcccttggccgggacttgtggggtccttctcctgtcactggttatcaccctttactgcaaacggggcagaaagaaactcctgtatatattcaaacaaccatttatgagaccagtacaaactactcaagaggaagatggctgtagctgccgatttccagaagaagaagaaggaggatgtgaactgagagtgaagttcagcaggagcgcagacgcccccgcgtaccagcagggccagaaccagctctataacgagctgaatctaggacgaagagaggagtacgatgttttggacaagagacgtggccgggaccctgagatggggggaaagccgagaaggaagaaccctcaggaaggcctgtacaatgaactgcagaaagataagatggcggaggcctacagtgagattgggatgaaaggcgagcgccggaggggcaaggggcacgatggcctttaccagggtctcagtacagccaccaaggacacctacgacgcccttcacatgcaggccctgccccctcgctctagaggatctggagcaacaaacttctcactactcaaacaagcaggtgacgtggaggagaatcccgggcctgggatccacatggccacttacgaggttctctgtgaggtggcgcggaaactgggcacggatgacagggaagtggtattgttcctcctaaacgtgttcatacctcaacccacactggcccaattaattggagctcttagagctttaaaggaggagggcaggttaacgtttcccctgttagcggaatgtctgtttcgtgcaggtcgcagagacctcttgcgcgacctgcttcacttagacccgcgttttttagagcgccacctagcgggcacaatgagttatttcagcccttatcagctcactgttctccacgtagacggggagctgtgtgcgagggatattaggtctttgatatttttaagcaaggacactatagggtctcgcagcacaccacagacattcttacactgggtgtactgtatggaaaacttagacctactgggtcccactgacgtggatgccctaatgtcaatgcttagatctttgtcaagagtagacctacagcgccaagtgcaaaccctaatgggccttcacctttccggcccatcacactcccaacactatcgccatacaccactcgagaccgatttctacgactacaaggacgacgatgacaagactagtggctccggcgagggcagaggaagtctactaacctgcggagatgtggaagaaaatcctggcccacatatgaccgagtacaagcccacggtgcgcctcgccacccgcgacgacgtccccagggccgtacgcaccctcgccgccgcgttcgccgactaccccgccacgcgccacaccgtcgatccggaccgccacatcgagcgggtcaccgagctgcaagaactcttcctcacgcgcgtcgggctcgacatcggcaaggtgtgggtcgcggacgacggcgccgcggtggcggtctggaccacgccggagagcgtcgaagcgggggcggtgttcgccgagatcggcccgcgcatggccgagttgagcggttcccggctggccgcgcagcaacagatggaaggcctcctggcgccgcaccggcccaaggagcccgcgtggttcctggccaccgtcggcgtctcgcccgaccaccagggcaagggtctgggcagcgccgtcgtgctccccggagtggaggcggccgagcgcgccggggtgcccgccttcctggagacctccgcgccccgcaacctccccttctacgagcggctcggcttcaccgtcaccgccgacgtcgaggtgcccgaaggaccgcgcacctggtgcatgacccgcaagcccggtgcctga

SEQ ID NO: 1429 - DNA, 2856 bp, Artificial Sequence
  Synthetic Polynucleotides
atggccttaccagtgaccgccttgctcctgccgctggccttgctgctccacgccgccaggccggacatccagatgacacagagccctagcagcctgtctgccagcgtgggagacagagtgaccatcacctgtagagccagccagggcatctcttcttggctggcctggtatcagcagaagcccgagaaggcccctaagagcctgatctatgccgccagctctctccagagcggagtgcctagcagattttctggcagcggctccggcaccgatttcaccctgacaatatccagcctccagcctgaggacttcgccacctactactgccagcagtacaacagctacccctacaccttcggccagggcaccaagctggaaatcaaaggcggaggcggaagtggaggcggaggatctggcggcggaggctctcaagtgcaactggttcagagcggtgccgaagtgcggaagcctggcagctctgtgaaggtgtcctgtaaagcctccggcggcagcttcaacaactaccccatcttctgggtccgacaggcccctggacagggctttgaatggatgggcagaatcatccccatcctgggcatcaccgcctacgctcagaaattccagggccgcgtgacaatcaccgccgacaagtctacaagcacagcctacatggaactgaacagcctgcggagcgaggacaccgccgtgtattattgtgccggcggagatgacctggacgcctttgacatttggggccagggaacaatggtgtccgtgtcctctacgcgtgagcagaaactgatctcggaagaggatctggcgaagcccaccacgacgccagcgccgcgaccaccaacaccggcgcccaccatcgcgtcgcagcccctgtccctgcgcccagaggcgtgccggccagcggcggggggcgcagtgcacacgagggggctggacttcgcctgtgacatctacatctgggcgcccttggccgggacttgtggggtccttctcctgtcactggttatcaccctttactgcaaacggggcagaaagaaactcctgtatatattcaaacaaccatttatgagaccagtacaaactactcaagaggaagatggctgtagctgccgatttccagaagaagaagaaggaggatgtgaactgagagtgaagttcagcaggagcgcagacgcccccgcgtaccagcagggccagaaccagctctataacgagctgaatctaggacgaagagaggagtacgatgttttggacaagagacgtggccgggaccctgagatggggggaaagccgagaaggaagaaccctcaggaaggcctgtacaatgaactgcagaaagataagatggcggaggcctacagtgagattgggatgaaaggcgagcgccggaggggcaaggggcacgatggcctttaccagggtctcagtacagccaccaaggacacctacgacgcccttcacatgcaggccctgccccctcgctctagaggatctggagcaacaaacttctcactactcaaacaagcaggtgacgtggaggagaatcccgggcctgggatccacatggccacttacgaggttctctgtgaggtggcgcggaaactgggcacggatgacagggaagtggtattgttcctcctaaacgtgttcatacctcaacccacactggcccaattaattggagctcttagagctttaaaggaggagggcaggttaacgtttcccctgttagcggaatgtctgtttcgtgcaggtcgcagagacctcttgcgcgacctgcttcacttagacccgcgttttttagagcgccacctagcgggcacaatgagttatttcagcccttatcagctcactgttctccacgtagacggggagctgtgtgcgagggatattaggtctttgatatttttaagcaaggacactatagggtctcgcagcacaccacagacattcttacactgggtgtactgtatggaaaacttagacctactgggtcccactgacgtggatgccctaatgtcaatgcttagatctttgtcaagagtagacctacagcgccaagtgcaaaccctaatgggccttcacctttccggcccatcacactcccaacactatcgccatacaccactcgagaccgatttctacgactacaaggacgacgatgacaagactagtggctccggcgagggcagaggaagtctactaacctgcggagatgtggaagaaaatcctggcccacatatgaccgagtacaagcccacggtgcgcctcgccacccgcgacgacgtccccagggccgtacgcaccctcgccgccgcgttcgccgactaccccgccacgcgccacaccgtcgatccggaccgccacatcgagcgggtcaccgagctgcaagaactcttcctcacgcgcgtcgggctcgacatcggcaaggtgtgggtcgcggacgacggcgccgcggtggcggtctggaccacgccggagagcgtcgaagcgggggcggtgttcgccgagatcggcccgcgcatggccgagttgagcggttcccggctggccgcgcagcaacagatggaaggcctcctggcgccgcaccggcccaaggagcccgcgtggttcctggccaccgtcggcgtctcgcccgaccaccagggcaagggtctgggcagcgccgtcgtgctccccggagtggaggcggccgagcgcgccggggtgcccgccttcctggagacctccgcgccccgcaacctccccttctacgagcggctcggcttcaccgtcaccgccgacgtcgaggtgcccgaaggaccgcgcacctggtgcatgacccgcaagcccggtgcctga

SEQ ID NO: 1430 - DNA, 2892 bp, Artificial Sequence
  Synthetic Polynucleotides
atggccttaccagtgaccgccttgctcctgccgctggccttgctgctccacgccgccaggccggacatcgtgatgacccagacccccctgagcctgcctgtgacacctggcgagcctgccagcatctcctgcagaagcagcagaagcctgctggacagcgacgacggcaacacctacctggactggtatctgcagaaacccggccagagcccccaactgctgatctacaccctgagctacagagccagcggcgtgcccgatagattttccggctctggcagcggcaccgacttcaccctgaagatcagccgggtggaagccgaggacgtgggcgtgtactactgtatgcagcgggtggaatttcccatcaccttcggccagggcaccagactggaaatcaagagaggcggaggcggaagtggaggcggaggatctggcggcggaggctctcaggtgcaactggtggaatctggcgggggagtggtgcagcctggcagatccctgagactgagctgtgccgccagcggcttcatcttcagcagatacggaatgcactgggtgcgccaggcccctggcaagggactgaaatgggtggccgtgatttggtacgacggcagcaacaagctgtacgccgacagcgtgaagggccggttcaccatcagcagagacaacagcaagaacaccctgtacctgcagatgaacagcctgcgggccgaggacaccgccgtgtactattgcgccagagactactacgacaacagccggcaccactggggcttcgactattggggccagggaacccttgtgaccgtgtcctctacgcgtgagcagaaactgatctcggaagaggatctggcgaagcccaccacgacgccagcgccgcgaccaccaacaccggcgcccaccatcgcgtcgcagcccctgtccctgcgcccagaggcgtgccggccagcggcggggggcgcagtgcacacgagggggctggacttcgcctgtgacatctacatctgggcgcccttggccgggacttgtggggtccttctcctgtcactggttatcaccctttactgcaaacggggcagaaagaaactcctgtatatattcaaacaaccatttatgagaccagtacaaactactcaagaggaagatggctgtagctgccgatttccagaagaagaagaaggaggatgtgaactgagagtgaagttcagcaggagcgcagacgcccccgcgtaccagcagggccagaaccagctctataacgagctgaatctaggacgaagagaggagtacgatgttttggacaagagacgtggccgggaccctgagatggggggaaagccgagaaggaagaaccctcaggaaggcctgtacaatgaactgcagaaagataagatggcggaggcctacagtgagattgggatgaaaggcgagcgccggaggggcaaggggcacgatggcctttaccagggtctcagtacagccaccaaggacacctacgacgcccttcacatgcaggccctgccccctcgctctagaggatctggagcaacaaacttctcactactcaaacaagcaggtgacgtggaggagaatcccgggcctgggatccacatggccacttacgaggttctctgtgaggtggcgcggaaactgggcacggatgacagggaagtggtattgttcctcctaaacgtgttcatacctcaacccacactggcccaattaattggagctcttagagctttaaaggaggagggcaggttaacgtttcccctgttagcggaatgtctgtttcgtgcaggtcgcagagacctcttgcgcgacctgcttcacttagacccgcgttttttagagcgccacctagcgggcacaatgagttatttcagcccttatcagctcactgttctccacgtagacggggagctgtgtgcgagggatattaggtctttgatatttttaagcaaggacactatagggtctcgcagcacaccacagacattcttacactgggtgtactgtatggaaaacttagacctactgggtcccactgacgtggatgccctaatgtcaatgcttagatctttgtcaagagtagacctacagcgccaagtgcaaaccctaatgggccttcacctttccggcccatcacactcccaacactatcgccatacaccactcgagaccgatttctacgactacaaggacgacgatgacaagactagtggctccggcgagggcagaggaagtctactaacctgcggagatgtggaagaaaatcctggcccacatatgaccgagtacaagcccacggtgcgcctcgccacccgcgacgacgtccccagggccgtacgcaccctcgccgccgcgttcgccgactaccccgccacgcgccacaccgtcgatccggaccgccacatcgagcgggtcaccgagctgcaagaactcttcctcacgcgcgtcgggctcgacatcggcaaggtgtgggtcgcggacgacggcgccgcggtggcggtctggaccacgccggagagcgtcgaagcgggggcggtgttcgccgagatcggcccgcgcatggccgagttgagcggttcccggctggccgcgcagcaacagatggaaggcctcctggcgccgcaccggcccaaggagcccgcgtggttcctggccaccgtcggcgtctcgcccgaccaccagggcaagggtctgggcagcgccgtcgtgctccccggagtggaggcggccgagcgcgccggggtgcccgccttcctggagacctccgcgccccgcaacctccccttctacgagcggctcggcttcaccgtcaccgccgacgtcgaggtgcccgaaggaccgcgcacctggtgcatgacccgcaagcccggtgcctga

SEQ ID NO: 1431 - DNA, 2862 bp, Artificial Sequence
  Synthetic Polynucleotides
atggccttaccagtgaccgccttgctcctgccgctggccttgctgctccacgccgccaggccggagatccagatgacccagagccccagcagcatgtctgccagcctgggcgacaccatcaccatcacatgccaggccacccaggacatcttcaagaacctgaactggtatcagcagaagcccggcaagccccccagcctgctgatctactatgccaccgaactggccgagggcgtgcccagcagattttctggcagcggcagcggctccgactacagcctgaccatcagcaacctggaaagcgaggacttcgccgcctactactgcctccagttcttcgagttcccattcaccttcggctccggcaccaagctggaaatgaagggcggaggcggaagtggaggcggaggatctggcggcggaggctctcaggtgcaactccagcagtctggcgctgagcttgtgcggcctggcacctctgtgaaggtgtcctgtaaagccagcggctacgtgttcaccaactactggatcgagtggatcaagcagcggccaggccagggcctggaatggatcggcgtgatgaatccaggcagcggcgagacaacctacaacgagaagttcaagggcaaggccaccctgaccgccgacaagagcagcagcacagcctacatgcaactgtcctccctgaccagcgtggacagcgccgtgtacttctgcgccagggaccacgaccgggactactacgctatggactactggggccagggcaccagcgtgaccgtgtcatctacgcgtgagcagaaactgatctcggaagaggatctggcgaagcccaccacgacgccagcgccgcgaccaccaacaccggcgcccaccatcgcgtcgcagcccctgtccctgcgcccagaggcgtgccggccagcggcggggggcgcagtgcacacgagggggctggacttcgcctgtgacatctacatctgggcgcccttggccgggacttgtggggtccttctcctgtcactggttatcaccctttactgcaaacggggcagaaagaaactcctgtatatattcaaacaaccatttatgagaccagtacaaactactcaagaggaagatggctgtagctgccgatttccagaagaagaagaaggaggatgtgaactgagagtgaagttcagcaggagcgcagacgcccccgcgtaccagcagggccagaaccagctctataacgagctgaatctaggacgaagagaggagtacgatgttttggacaagagacgtggccgggaccctgagatggggggaaagccgagaaggaagaaccctcaggaaggcctgtacaatgaactgcagaaagataagatggcggaggcctacagtgagattgggatgaaaggcgagcgccggaggggcaaggggcacgatggcctttaccagggtctcagtacagccaccaaggacacctacgacgcccttcacatgcaggccctgccccctcgctctagaggatctggagcaacaaacttctcactactcaaacaagcaggtgacgtggaggagaatcccgggcctgggatccacatggccacttacgaggttctctgtgaggtggcgcggaaactgggcacggatgacagggaagtggtattgttcctcctaaacgtgttcatacctcaacccacactggcccaattaattggagctcttagagctttaaaggaggagggcaggttaacgtttcccctgttagcggaatgtctgtttcgtgcaggtcgcagagacctcttgcgcgacctgcttcacttagacccgcgttttttagagcgccacctagcgggcacaatgagttatttcagcccttatcagctcactgttctccacgtagacggggagctgtgtgcgagggatattaggtctttgatatttttaagcaaggacactatagggtctcgcagcacaccacagacattcttacactgggtgtactgtatggaaaacttagacctactgggtcccactgacgtggatgccctaatgtcaatgcttagatctttgtcaagagtagacctacagcgccaagtgcaaaccctaatgggccttcacctttccggcccatcacactcccaacactatcgccatacaccactcgagaccgatttctacgactacaaggacgacgatgacaagactagtggctccggcgagggcagaggaagtctactaacctgcggagatgtggaagaaaatcctggcccacatatgaccgagtacaagcccacggtgcgcctcgccacccgcgacgacgtccccagggccgtacgcaccctcgccgccgcgttcgccgactaccccgccacgcgccacaccgtcgatccggaccgccacatcgagcgggtcaccgagctgcaagaactcttcctcacgcgcgtcgggctcgacatcggcaaggtgtgggtcgcggacgacggcgccgcggtggcggtctggaccacgccggagagcgtcgaagcgggggcggtgttcgccgagatcggcccgcgcatggccgagttgagcggttcccggctggccgcgcagcaacagatggaaggcctcctggcgccgcaccggcccaaggagcccgcgtggttcctggccaccgtcggcgtctcgcccgaccaccagggcaagggtctgggcagcgccgtcgtgctccccggagtggaggcggccgagcgcgccggggtgcccgccttcctggagacctccgcgccccgcaacctccccttctacgagcggctcggcttcaccgtcaccgccgacgtcgaggtgcccgaaggaccgcgcacctggtgcatgacccgcaagcccggtgcctga

SEQ ID NO: 1432 - DNA, 2853 bp, Artificial Sequence
  Synthetic Polynucleotides
atggccttaccagtgaccgccttgctcctgccgctggccttgctgctccacgccgccaggccggacatcctgctgacacagagccccgccatcctgtccgtgtctccaggcgagagagtgtcctttagctgccgggccagccagaacatcggcaccagcatccactggtatcagcagcggaccaacggcagccccagactgctgattaagtacgccagcgagtccgtgtccggcatccccagcagattttctggcagcggctccggcaccgacttcaccctgagcatcaacagcgtggaaagcgaggacattgccgactactactgccagcacaccaatagctggcccaccacctttggcggaggcaccaagctggaaatcaagagaggcggaggcggaagtggaggcggaggatctggcggcggaggctctcaggtgcaactccagcagtccgacgccgagcttgtgaagcctggcgcttccgtgaagattagctgcaaggccagcggctacaccttcaccgaccacgccattcactgggtcaagcagaagcccgagcagggcctggaatggatcggctacttcagccccggcaacggcgacatcaagtacaacgagaagttcaagggcaaggccaccctgaccgccgacaagagcagcagcacagcctacatgcaactgaacagcctgaccagcgaggactccgccgtgtacttctgcaagcggagctacggcaactacgactactggggccagggcaccacactgaccgtgtctagtacgcgtgagcagaaactgatctcggaagaggatctggcgaagcccaccacgacgccagcgccgcgaccaccaacaccggcgcccaccatcgcgtcgcagcccctgtccctgcgcccagaggcgtgccggccagcggcggggggcgcagtgcacacgagggggctggacttcgcctgtgacatctacatctgggcgcccttggccgggacttgtggggtccttctcctgtcactggttatcaccctttactgcaaacggggcagaaagaaactcctgtatatattcaaacaaccatttatgagaccagtacaaactactcaagaggaagatggctgtagctgccgatttccagaagaagaagaaggaggatgtgaactgagagtgaagttcagcaggagcgcagacgcccccgcgtaccagcagggccagaaccagctctataacgagctgaatctaggacgaagagaggagtacgatgttttggacaagagacgtggccgggaccctgagatggggggaaagccgagaaggaagaaccctcaggaaggcctgtacaatgaactgcagaaagataagatggcggaggcctacagtgagattgggatgaaaggcgagcgccggaggggcaaggggcacgatggcctttaccagggtctcagtacagccaccaaggacacctacgacgcccttcacatgcaggccctgccccctcgctctagaggatctggagcaacaaacttctcactactcaaacaagcaggtgacgtggaggagaatcccgggcctgggatccacatggccacttacgaggttctctgtgaggtggcgcggaaactgggcacggatgacagggaagtggtattgttcctcctaaacgtgttcatacctcaacccacactggcccaattaattggagctcttagagctttaaaggaggagggcaggttaacgtttcccctgttagcggaatgtctgtttcgtgcaggtcgcagagacctcttgcgcgacctgcttcacttagacccgcgttttttagagcgccacctagcgggcacaatgagttatttcagcccttatcagctcactgttctccacgtagacggggagctgtgtgcgagggatattaggtctttgatatttttaagcaaggacactatagggtctcgcagcacaccacagacattcttacactgggtgtactgtatggaaaacttagacctactgggtcccactgacgtggatgccctaatgtcaatgcttagatctttgtcaagagtagacctacagcgccaagtgcaaaccctaatgggccttcacctttccggcccatcacactcccaacactatcgccatacaccactcgagaccgatttctacgactacaaggacgacgatgacaagactagtggctccggcgagggcagaggaagtctactaacctgcggagatgtggaagaaaatcctggcccacatatgaccgagtacaagcccacggtgcgcctcgccacccgcgacgacgtccccagggccgtacgcaccctcgccgccgcgttcgccgactaccccgccacgcgccacaccgtcgatccggaccgccacatcgagcgggtcaccgagctgcaagaactcttcctcacgcgcgtcgggctcgacatcggcaaggtgtgggtcgcggacgacggcgccgcggtggcggtctggaccacgccggagagcgtcgaagcgggggcggtgttcgccgagatcggcccgcgcatggccgagttgagcggttcccggctggccgcgcagcaacagatggaaggcctcctggcgccgcaccggcccaaggagcccgcgtggttcctggccaccgtcggcgtctcgcccgaccaccagggcaagggtctgggcagcgccgtcgtgctccccggagtggaggcggccgagcgcgccggggtgcccgccttcctggagacctccgcgccccgcaacctccccttctacgagcggctcggcttcaccgtcaccgccgacgtcgaggtgcccgaaggaccgcgcacctggtgcatgacccgcaagcccggtgcctga

SEQ ID NO: 1433 - DNA, 2868 bp, Artificial Sequence
  Synthetic Polynucleotides
atggccttaccagtgaccgccttgctcctgccgctggccttgctgctccacgccgccaggccggacatcgtgatgacccagagccccgatagcctggccgtgtctctgggagagagagccaccatcaactgcaagagcagccagagcctgctgaacagcggcgaccagaagaactacctgacctggtatcagcagaagcccggccagccccccaagctgctgatctactgggccagcaccagagaaagcggcgtgcccgatagattcagcggcagcggaagtggcaccgacttcaccctgaccatcagttctcttcaggccgaggacgtggccgtgtactactgccagaacgactacagctaccccctgaccttcggccagggcaccaaggtggaaatcaagggcggaggcggaagtggaggcggaggatctggcggcggaggctctcaggtgcagctggtgcagtctggggccgaagtgaagaaaaccggcagcagcgtgaaggtgtcctgcaaggccagcggctacacctttaccgaccacgccattcacgtgtggcggcaggctccaggacaggccctggaatggatgggccacttcagccccggcaacaccgacatcaagtacaacgacaagttcaagggcagagtgaccctgaccgtggaccgcagcatgagcaccgcctacatggaactgagcagcctgcggagcgaggacaccgccatgtactattgcaagaccagcaccttctttttcgactactggggccagggaacaatggtcaccgtgtccagcacgcgtgagcagaaactgatctcggaagaggatctggcgaagcccaccacgacgccagcgccgcgaccaccaacaccggcgcccaccatcgcgtcgcagcccctgtccctgcgcccagaggcgtgccggccagcggcggggggcgcagtgcacacgagggggctggacttcgcctgtgacatctacatctgggcgcccttggccgggacttgtggggtccttctcctgtcactggttatcaccctttactgcaaacggggcagaaagaaactcctgtatatattcaaacaaccatttatgagaccagtacaaactactcaagaggaagatggctgtagctgccgatttccagaagaagaagaaggaggatgtgaactgagagtgaagttcagcaggagcgcagacgcccccgcgtaccagcagggccagaaccagctctataacgagctgaatctaggacgaagagaggagtacgatgttttggacaagagacgtggccgggaccctgagatggggggaaagccgagaaggaagaaccctcaggaaggcctgtacaatgaactgcagaaagataagatggcggaggcctacagtgagattgggatgaaaggcgagcgccggaggggcaaggggcacgatggcctttaccagggtctcagtacagccaccaaggacacctacgacgcccttcacatgcaggccctgccccctcgctctagaggatctggagcaacaaacttctcactactcaaacaagcaggtgacgtggaggagaatcccgggcctgggatccacatggccacttacgaggttctctgtgaggtggcgcggaaactgggcacggatgacagggaagtggtattgttcctcctaaacgtgttcatacctcaacccacactggcccaattaattggagctcttagagctttaaaggaggagggcaggttaacgtttcccctgttagcggaatgtctgtttcgtgcaggtcgcagagacctcttgcgcgacctgcttcacttagacccgcgttttttagagcgccacctagcgggcacaatgagttatttcagcccttatcagctcactgttctccacgtagacggggagctgtgtgcgagggatattaggtctttgatatttttaagcaaggacactatagggtctcgcagcacaccacagacattcttacactgggtgtactgtatggaaaacttagacctactgggtcccactgacgtggatgccctaatgtcaatgcttagatctttgtcaagagtagacctacagcgccaagtgcaaaccctaatgggccttcacctttccggcccatcacactcccaacactatcgccatacaccactcgagaccgatttctacgactacaaggacgacgatgacaagactagtggctccggcgagggcagaggaagtctactaacctgcggagatgtggaagaaaatcctggcccacatatgaccgagtacaagcccacggtgcgcctcgccacccgcgacgacgtccccagggccgtacgcaccctcgccgccgcgttcgccgactaccccgccacgcgccacaccgtcgatccggaccgccacatcgagcgggtcaccgagctgcaagaactcttcctcacgcgcgtcgggctcgacatcggcaaggtgtgggtcgcggacgacggcgccgcggtggcggtctggaccacgccggagagcgtcgaagcgggggcggtgttcgccgagatcggcccgcgcatggccgagttgagcggttcccggctggccgcgcagcaacagatggaaggcctcctggcgccgcaccggcccaaggagcccgcgtggttcctggccaccgtcggcgtctcgcccgaccaccagggcaagggtctgggcagcgccgtcgtgctccccggagtggaggcggccgagcgcgccggggtgcccgccttcctggagacctccgcgccccgcaacctccccttctacgagcggctcggcttcaccgtcaccgccgacgtcgaggtgcccgaaggaccgcgcacctggtgcatgacccgcaagcccggtgcctga

SEQ ID NO: 1434 - DNA, 2634 bp, Artificial Sequence
  Synthetic Polynucleotides
atggagctgactgaattgctcctcgtggtcatgcttctcctaactgcaaggctaacgctgtccagcccggctcctcctgcttgtgacctccgagtcctcagtaaactgcttcgtgactcccatgtccttcacagcagactgagccagtgcccagaggttcaccctttgcctacacctgtcctgctgcctgctgtggactttagcttgggagaatggaaaacccagatggaggagaccaaggcacaggacattctgggagcagtgacccttctgctggagggagtgatggcagcacggggacaactgggacccacttgcctctcatccctcctggggcagctttctggacaggtccgtctcctccttggggccctgcagagcctccttggaacccagcttcctccacagggcaggaccacagctcacaaggaccctaatgccatcttcctgagcttccaacacctgctccgaggaaaggtgcgtttcctgatgcttgtaggagggtccaccctctgcgtcaggcgggccccacccaccacagctgtccccagcagaacctctacgcgtgagcagaaactgatctcggaagaggatctggcgaagcccaccacgacgccagcgccgcgaccaccaacaccggcgcccaccatcgcgtcgcagcccctgtccctgcgcccagaggcgtgccggccagcggcggggggcgcagtgcacacgagggggctggacttcgcctgtgacatctacatctgggcgcccttggccgggacttgtggggtccttctcctgtcactggttatcaccctttactgcaaacggggcagaaagaaactcctgtatatattcaaacaaccatttatgagaccagtacaaactactcaagaggaagatggctgtagctgccgatttccagaagaagaagaaggaggatgtgaactgagagtgaagttcagcaggagcgcagacgcccccgcgtaccagcagggccagaaccagctctataacgagctgaatctaggacgaagagaggagtacgatgttttggacaagagacgtggccgggaccctgagatggggggaaagccgagaaggaagaaccctcaggaaggcctgtacaatgaactgcagaaagataagatggcggaggcctacagtgagattgggatgaaaggcgagcgccggaggggcaaggggcacgatggcctttaccagggtctcagtacagccaccaaggacacctacgacgcccttcacatgcaggccctgccccctcgctctagaggatctggagcaacaaacttctcactactcaaacaagcaggtgacgtggaggagaatcccgggcctgggatccacatggccacttacgaggttctctgtgaggtggcgcggaaactgggcacggatgacagggaagtggtattgttcctcctaaacgtgttcatacctcaacccacactggcccaattaattggagctcttagagctttaaaggaggagggcaggttaacgtttcccctgttagcggaatgtctgtttcgtgcaggtcgcagagacctcttgcgcgacctgcttcacttagacccgcgttttttagagcgccacctagcgggcacaatgagttatttcagcccttatcagctcactgttctccacgtagacggggagctgtgtgcgagggatattaggtctttgatatttttaagcaaggacactatagggtctcgcagcacaccacagacattcttacactgggtgtactgtatggaaaacttagacctactgggtcccactgacgtggatgccctaatgtcaatgcttagatctttgtcaagagtagacctacagcgccaagtgcaaaccctaatgggccttcacctttccggcccatcacactcccaacactatcgccatacaccactcgagaccgatttctacgactacaaggacgacgatgacaagactagtggctccggcgagggcagaggaagtctactaacctgcggagatgtggaagaaaatcctggcccacatatgaccgagtacaagcccacggtgcgcctcgccacccgcgacgacgtccccagggccgtacgcaccctcgccgccgcgttcgccgactaccccgccacgcgccacaccgtcgatccggaccgccacatcgagcgggtcaccgagctgcaagaactcttcctcacgcgcgtcgggctcgacatcggcaaggtgtgggtcgcggacgacggcgccgcggtggcggtctggaccacgccggagagcgtcgaagcgggggcggtgttcgccgagatcggcccgcgcatggccgagttgagcggttcccggctggccgcgcagcaacagatggaaggcctcctggcgccgcaccggcccaaggagcccgcgtggttcctggccaccgtcggcgtctcgcccgaccaccagggcaagggtctgggcagcgccgtcgtgctccccggagtggaggcggccgagcgcgccggggtgcccgccttcctggagacctccgcgccccgcaacctccccttctacgagcggctcggcttcaccgtcaccgccgacgtcgaggtgcccgaaggaccgcgcacctggtgcatgacccgcaagcccggtgcctga

SEQ ID NO: 1435 - DNA, 2865 bp, Artificial Sequence
  Synthetic Polynucleotides
atggccttaccagtgaccgccttgctcctgccgctggccttgctgctccacgccgccaggccggacatccagatgacccagagccccagcagcctgtctgccagcgtgggcgacagagtgaccatcacatgcaaggccagccaggacgtgtccattgccgtggcctggtatcagcagaagcccggcaaggcccccaaggtgctgatctacagcgccagctacagatacaccggcgtgcccgacagattcagcggctctggcagcggcaccgacttcaccttcaccatcagctccctccagcccgaggatattgccgtgtactactgccagcagcactacatcacccccctgacctttggcggaggcaccaaggtggaaatcaagggcggaggcggaagtggaggcggaggatctggcggcggaggctctcagatccaactggtgcagagcggccacgaagtgaagaaacctggggccagcgtgaaggtgtcctgcaaagccagcggctacacctttaccaactacggcatgaactgggtgcgccaggcccctggacagggcctggaatggatgggctggatcaacaccaagaccggcgagcccacctacgccgaagagttcaagggcagattcgtgttcagcctggaaaccagcgcctccaccgcctacctccagatcagctctctgaaggccgaggacaccgccatgtacttttgcggcagaggcggctacggcagcagctactggtacttcgatgtgtggggccagggcaccaccgtgaccgtgtcatctacgcgtgagcagaaactgatctcggaagaggatctggcgaagcccaccacgacgccagcgccgcgaccaccaacaccggcgcccaccatcgcgtcgcagcccctgtccctgcgcccagaggcgtgccggccagcggcggggggcgcagtgcacacgagggggctggacttcgcctgtgacatctacatctgggcgcccttggccgggacttgtggggtccttctcctgtcactggttatcaccctttactgcaaacggggcagaaagaaactcctgtatatattcaaacaaccatttatgagaccagtacaaactactcaagaggaagatggctgtagctgccgatttccagaagaagaagaaggaggatgtgaactgagagtgaagttcagcaggagcgcagacgcccccgcgtaccagcagggccagaaccagctctataacgagctgaatctaggacgaagagaggagtacgatgttttggacaagagacgtggccgggaccctgagatggggggaaagccgagaaggaagaaccctcaggaaggcctgtacaatgaactgcagaaagataagatggcggaggcctacagtgagattgggatgaaaggcgagcgccggaggggcaaggggcacgatggcctttaccagggtctcagtacagccaccaaggacacctacgacgcccttcacatgcaggccctgccccctcgctctagaggatctggagcaacaaacttctcactactcaaacaagcaggtgacgtggaggagaatcccgggcctgggatccacatggccacttacgaggttctctgtgaggtggcgcggaaactgggcacggatgacagggaagtggtattgttcctcctaaacgtgttcatacctcaacccacactggcccaattaattggagctcttagagctttaaaggaggagggcaggttaacgtttcccctgttagcggaatgtctgtttcgtgcaggtcgcagagacctcttgcgcgacctgcttcacttagacccgcgttttttagagcgccacctagcgggcacaatgagttatttcagcccttatcagctcactgttctccacgtagacggggagctgtgtgcgagggatattaggtctttgatatttttaagcaaggacactatagggtctcgcagcacaccacagacattcttacactgggtgtactgtatggaaaacttagacctactgggtcccactgacgtggatgccctaatgtcaatgcttagatctttgtcaagagtagacctacagcgccaagtgcaaaccctaatgggccttcacctttccggcccatcacactcccaacactatcgccatacaccactcgagaccgatttctacgactacaaggacgacgatgacaagactagtggctccggcgagggcagaggaagtctactaacctgcggagatgtggaagaaaatcctggcccacatatgaccgagtacaagcccacggtgcgcctcgccacccgcgacgacgtccccagggccgtacgcaccctcgccgccgcgttcgccgactaccccgccacgcgccacaccgtcgatccggaccgccacatcgagcgggtcaccgagctgcaagaactcttcctcacgcgcgtcgggctcgacatcggcaaggtgtgggtcgcggacgacggcgccgcggtggcggtctggaccacgccggagagcgtcgaagcgggggcggtgttcgccgagatcggcccgcgcatggccgagttgagcggttcccggctggccgcgcagcaacagatggaaggcctcctggcgccgcaccggcccaaggagcccgcgtggttcctggccaccgtcggcgtctcgcccgaccaccagggcaagggtctgggcagcgccgtcgtgctccccggagtggaggcggccgagcgcgccggggtgcccgccttcctggagacctccgcgccccgcaacctccccttctacgagcggctcggcttcaccgtcaccgccgacgtcgaggtgcccgaaggaccgcgcacctggtgcatgacccgcaagcccggtgcctga

SEQ ID NO: 1436 - DNA, 2871 bp, Artificial Sequence
  Synthetic Polynucleotides
atggccttaccagtgaccgccttgctcctgccgctggccttgctgctccacgccgccaggccggacatcgtgatgacccagagccccgatagcctggccgtgtctctgggagagagagccaccatcaactgccgggccagcaagagcgtgtccaccagcggctacagctacatgcactggtatcagcagaagcccggccagccccccaagctgctgatctacctggcctccaacctggaaagcggcgtgcccgatagattcagcggcagcggctctggcaccgacttcaccctgaccatcagttctcttcaggccgaggacgtggccgtgtactactgccagcacagcagagagctgccctacaccttcggccagggcaccaagctggaaatcaagggcggaggcggaagtggaggcggaggatctggcggcggaggctctcaggtgcaactccaggaatctggccctggccttgtgaagcccagcgagacactgagcctgacctgtaccgtgtccggcggcagcatcagctcttacggcgtgcactggattcggcagcctccaggcaagggcctggaatggatcggcgtgatctggacctccggcgtgaccgactacaacagcgccctgatgggcagagtgaccatctccgtggacaccagcaagaaccagttcagcctgaagctgagcagcgtgacagccgccgataccgccgtgtattattgcgccagagatggcgactacgaccgctacacaatggactactggggccagggaacccttgtgaccgtgtcctctacgcgtgagcagaaactgatctcggaagaggatctggcgaagcccaccacgacgccagcgccgcgaccaccaacaccggcgcccaccatcgcgtcgcagcccctgtccctgcgcccagaggcgtgccggccagcggcggggggcgcagtgcacacgagggggctggacttcgcctgtgacatctacatctgggcgcccttggccgggacttgtggggtccttctcctgtcactggttatcaccctttactgcaaacggggcagaaagaaactcctgtatatattcaaacaaccatttatgagaccagtacaaactactcaagaggaagatggctgtagctgccgatttccagaagaagaagaaggaggatgtgaactgagagtgaagttcagcaggagcgcagacgcccccgcgtaccagcagggccagaaccagctctataacgagctgaatctaggacgaagagaggagtacgatgttttggacaagagacgtggccgggaccctgagatggggggaaagccgagaaggaagaaccctcaggaaggcctgtacaatgaactgcagaaagataagatggcggaggcctacagtgagattgggatgaaaggcgagcgccggaggggcaaggggcacgatggcctttaccagggtctcagtacagccaccaaggacacctacgacgcccttcacatgcaggccctgccccctcgctctagaggatctggagcaacaaacttctcactactcaaacaagcaggtgacgtggaggagaatcccgggcctgggatccacatggccacttacgaggttctctgtgaggtggcgcggaaactgggcacggatgacagggaagtggtattgttcctcctaaacgtgttcatacctcaacccacactggcccaattaattggagctcttagagctttaaaggaggagggcaggttaacgtttcccctgttagcggaatgtctgtttcgtgcaggtcgcagagacctcttgcgcgacctgcttcacttagacccgcgttttttagagcgccacctagcgggcacaatgagttatttcagcccttatcagctcactgttctccacgtagacggggagctgtgtgcgagggatattaggtctttgatatttttaagcaaggacactatagggtctcgcagcacaccacagacattcttacactgggtgtactgtatggaaaacttagacctactgggtcccactgacgtggatgccctaatgtcaatgcttagatctttgtcaagagtagacctacagcgccaagtgcaaaccctaatgggccttcacctttccggcccatcacactcccaacactatcgccatacaccactcgagaccgatttctacgactacaaggacgacgatgacaagactagtggctccggcgagggcagaggaagtctactaacctgcggagatgtggaagaaaatcctggcccacatatgaccgagtacaagcccacggtgcgcctcgccacccgcgacgacgtccccagggccgtacgcaccctcgccgccgcgttcgccgactaccccgccacgcgccacaccgtcgatccggaccgccacatcgagcgggtcaccgagctgcaagaactcttcctcacgcgcgtcgggctcgacatcggcaaggtgtgggtcgcggacgacggcgccgcggtggcggtctggaccacgccggagagcgtcgaagcgggggcggtgttcgccgagatcggcccgcgcatggccgagttgagcggttcccggctggccgcgcagcaacagatggaaggcctcctggcgccgcaccggcccaaggagcccgcgtggttcctggccaccgtcggcgtctcgcccgaccaccagggcaagggtctgggcagcgccgtcgtgctccccggagtggaggcggccgagcgcgccggggtgcccgccttcctggagacctccgcgccccgcaacctccccttctacgagcggctcggcttcaccgtcaccgccgacgtcgaggtgcccgaaggaccgcgcacctggtgcatgacccgcaagcccggtgcctga

SEQ ID NO: 1437 - DNA, 2808 bp, Artificial Sequence
  Synthetic Polynucleotides
atgacagccctgttcctgatgtccatgctgttcggcctggcctgcggacaggccatgtctttctgtatccccaccgagtacaccatgcacatcgagagaagagagtgcgcctactgcctgaccatcaacaccacaatctgcgccggctactgcatgacacgggatattaacggcaagctgttcctgcctaagtacgccctgagccaggacgtgtgcacctaccgggacttcatctaccggaccgtggaaatccctggctgccctctgcatgtggccccttactttagctaccccgtggctctgagctgcaagtgcggcaagtgcaacaccgactacagcgactgtatccacgaggccatcaagaccaactactgcaccaagcctcagaaaagctacctcgtgggcttctctgttggcggaggcggaagtggaggcggaggatctggcggcggaggctctgctcctgatgtgcaggattgccctgagtgcaccctgcaagagaaccccttcttctcccaacctggcgctcctatcctccagtgcatgggctgctgcttcagccgggcttatcccacacctctgcggagcaagaaaaccatgctggtccagaaaaacgtgaccagcgagagcacctgttgtgtggctaagagctacaacagagtgaccgtgatgggcggcttcaaggtggaaaatcacaccgcctgccactgctccacctgttactaccacaagagcacgcgtgagcagaaactgatctcggaagaggatctggcgaagcccaccacgacgccagcgccgcgaccaccaacaccggcgcccaccatcgcgtcgcagcccctgtccctgcgcccagaggcgtgccggccagcggcggggggcgcagtgcacacgagggggctggacttcgcctgtgacatctacatctgggcgcccttggccgggacttgtggggtccttctcctgtcactggttatcaccctttactgcaaacggggcagaaagaaactcctgtatatattcaaacaaccatttatgagaccagtacaaactactcaagaggaagatggctgtagctgccgatttccagaagaagaagaaggaggatgtgaactgagagtgaagttcagcaggagcgcagacgcccccgcgtaccagcagggccagaaccagctctataacgagctgaatctaggacgaagagaggagtacgatgttttggacaagagacgtggccgggaccctgagatggggggaaagccgagaaggaagaaccctcaggaaggcctgtacaatgaactgcagaaagataagatggcggaggcctacagtgagattgggatgaaaggcgagcgccggaggggcaaggggcacgatggcctttaccagggtctcagtacagccaccaaggacacctacgacgcccttcacatgcaggccctgccccctcgctctagaggatctggagcaacaaacttctcactactcaaacaagcaggtgacgtggaggagaatcccgggcctgggatccacatggccacttacgaggttctctgtgaggtggcgcggaaactgggcacggatgacagggaagtggtattgttcctcctaaacgtgttcatacctcaacccacactggcccaattaattggagctcttagagctttaaaggaggagggcaggttaacgtttcccctgttagcggaatgtctgtttcgtgcaggtcgcagagacctcttgcgcgacctgcttcacttagacccgcgttttttagagcgccacctagcgggcacaatgagttatttcagcccttatcagctcactgttctccacgtagacggggagctgtgtgcgagggatattaggtctttgatatttttaagcaaggacactatagggtctcgcagcacaccacagacattcttacactgggtgtactgtatggaaaacttagacctactgggtcccactgacgtggatgccctaatgtcaatgcttagatctttgtcaagagtagacctacagcgccaagtgcaaaccctaatgggccttcacctttccggcccatcacactcccaacactatcgccatacaccactcgagaccgatttctacgactacaaggacgacgatgacaagactagtggctccggcgagggcagaggaagtctactaacctgcggagatgtggaagaaaatcctggcccacatatgaccgagtacaagcccacggtgcgcctcgccacccgcgacgacgtccccagggccgtacgcaccctcgccgccgcgttcgccgactaccccgccacgcgccacaccgtcgatccggaccgccacatcgagcgggtcaccgagctgcaagaactcttcctcacgcgcgtcgggctcgacatcggcaaggtgtgggtcgcggacgacggcgccgcggtggcggtctggaccacgccggagagcgtcgaagcgggggcggtgttcgccgagatcggcccgcgcatggccgagttgagcggttcccggctggccgcgcagcaacagatggaaggcctcctggcgccgcaccggcccaaggagcccgcgtggttcctggccaccgtcggcgtctcgcccgaccaccagggcaagggtctgggcagcgccgtcgtgctccccggagtggaggcggccgagcgcgccggggtgcccgccttcctggagacctccgcgccccgcaacctccccttctacgagcggctcggcttcaccgtcaccgccgacgtcgaggtgcccgaaggaccgcgcacctggtgcatgacccgcaagcccggtgcctga

SEQ ID NO: 1438 - DNA, 2859 bp, Artificial Sequence
  Synthetic Polynucleotides
atggccttaccagtgaccgccttgctcctgccgctggccttgctgctccacgccgccaggccgcagagcgtgctgacacagcctcctagcgtgtccgtgtctcctggccagaccgccagcatcacctgtagcggcgataagctgggcgataagtacgcctgctggtatcagcagaagcccggccagtctcccgtgctcgtgatctaccaggacagcaagaggcccagcggcatccccgagagattcagcggcagcaacagcggcaataccgccaccctgaccatcagcggcacccaggctatggacgaggccgactactactgccaggcttgggatagcagcaccgccgtggtgtttggcggaggcaccaagctgacagtgctgggcggaggcggaagtggaggcggaggatctggcggcggaggctctcaggtgcagctggtgcagtctggggccgaagtgaagaagcctggacagagcctgaagatcagctgcaaggccagcggctacagcctgaccgacaactggattggctgggtgcgccagaagccaggcaagggcctggaatggatgggcatcatctaccccggcgacagcgacaccagatacagccctagcttccagggccaagtgaccatctccgccgacaagagcatcaacaccgcctacctccagtggtccagcctgaaagcctccgacaccgccatctactactgtgtgggactggactggaactacaaccccctgcggtactggggacctggcacactcgtgaccgtgtcctctacgcgtgagcagaaactgatctcggaagaggatctggcgaagcccaccacgacgccagcgccgcgaccaccaacaccggcgcccaccatcgcgtcgcagcccctgtccctgcgcccagaggcgtgccggccagcggcggggggcgcagtgcacacgagggggctggacttcgcctgtgacatctacatctgggcgcccttggccgggacttgtggggtccttctcctgtcactggttatcaccctttactgcaaacggggcagaaagaaactcctgtatatattcaaacaaccatttatgagaccagtacaaactactcaagaggaagatggctgtagctgccgatttccagaagaagaagaaggaggatgtgaactgagagtgaagttcagcaggagcgcagacgcccccgcgtaccagcagggccagaaccagctctataacgagctgaatctaggacgaagagaggagtacgatgttttggacaagagacgtggccgggaccctgagatggggggaaagccgagaaggaagaaccctcaggaaggcctgtacaatgaactgcagaaagataagatggcggaggcctacagtgagattgggatgaaaggcgagcgccggaggggcaaggggcacgatggcctttaccagggtctcagtacagccaccaaggacacctacgacgcccttcacatgcaggccctgccccctcgctctagaggatctggagcaacaaacttctcactactcaaacaagcaggtgacgtggaggagaatcccgggcctgggatccacatggccacttacgaggttctctgtgaggtggcgcggaaactgggcacggatgacagggaagtggtattgttcctcctaaacgtgttcatacctcaacccacactggcccaattaattggagctcttagagctttaaaggaggagggcaggttaacgtttcccctgttagcggaatgtctgtttcgtgcaggtcgcagagacctcttgcgcgacctgcttcacttagacccgcgttttttagagcgccacctagcgggcacaatgagttatttcagcccttatcagctcactgttctccacgtagacggggagctgtgtgcgagggatattaggtctttgatatttttaagcaaggacactatagggtctcgcagcacaccacagacattcttacactgggtgtactgtatggaaaacttagacctactgggtcccactgacgtggatgccctaatgtcaatgcttagatctttgtcaagagtagacctacagcgccaagtgcaaaccctaatgggccttcacctttccggcccatcacactcccaacactatcgccatacaccactcgagaccgatttctacgactacaaggacgacgatgacaagactagtggctccggcgagggcagaggaagtctactaacctgcggagatgtggaagaaaatcctggcccacatatgaccgagtacaagcccacggtgcgcctcgccacccgcgacgacgtccccagggccgtacgcaccctcgccgccgcgttcgccgactaccccgccacgcgccacaccgtcgatccggaccgccacatcgagcgggtcaccgagctgcaagaactcttcctcacgcgcgtcgggctcgacatcggcaaggtgtgggtcgcggacgacggcgccgcggtggcggtctggaccacgccggagagcgtcgaagcgggggcggtgttcgccgagatcggcccgcgcatggccgagttgagcggttcccggctggccgcgcagcaacagatggaaggcctcctggcgccgcaccggcccaaggagcccgcgtggttcctggccaccgtcggcgtctcgcccgaccaccagggcaagggtctgggcagcgccgtcgtgctccccggagtggaggcggccgagcgcgccggggtgcccgccttcctggagacctccgcgccccgcaacctccccttctacgagcggctcggcttcaccgtcaccgccgacgtcgaggtgcccgaaggaccgcgcacctggtgcatgacccgcaagcccggtgcctga

SEQ ID NO: 1439 - DNA, 2853 bp, Artificial Sequence
  Synthetic Polynucleotides
atggccttaccagtgaccgccttgctcctgccgctggccttgctgctccacgccgccaggccggacatcgtgatgacccagagccagaaattcatgagcaccagcgtgggcgaccgggtgtccatcatctgcaaggccagccagaacgtgggcaccttcgtggcctggtatcagcagaagcctggccagagccccaagctgctggtgtacagcgccagcaacagatacaccggcgtgcccgatagattcaccggcagcggctctggcaccgacttcaccctgaccatcaacaacatgcagagcgaggacctggccgactacttctgtcggcagtacagcagctacccctacaccttcggcggaggcaccaagctggaaatcaagggcggaggcggaagtggaggcggaggatctggcggcggaggctctgaagtgcaactccagcagagcggccctgagcttgtgaagccaggggccagcatgaagattagctgcaaagccagcggctacagcttcagcgcctacaccatgaactgggtcaagcagagccacggcaagaacctggaatggatcggcctgattaacccctacaacggcggcaccaactacaaccaggaatttgagggcaaggccaccctgacagtgaacaagagcagcaacaccgccttcatggaactgctgagcctgaccagcgacgacagcgccgtgtactactgcgccagacgggactgggactacttcgactattggggccagggcaccacactgaccgtgtcctctacgcgtgagcagaaactgatctcggaagaggatctggcgaagcccaccacgacgccagcgccgcgaccaccaacaccggcgcccaccatcgcgtcgcagcccctgtccctgcgcccagaggcgtgccggccagcggcggggggcgcagtgcacacgagggggctggacttcgcctgtgacatctacatctgggcgcccttggccgggacttgtggggtccttctcctgtcactggttatcaccctttactgcaaacggggcagaaagaaactcctgtatatattcaaacaaccatttatgagaccagtacaaactactcaagaggaagatggctgtagctgccgatttccagaagaagaagaaggaggatgtgaactgagagtgaagttcagcaggagcgcagacgcccccgcgtaccagcagggccagaaccagctctataacgagctgaatctaggacgaagagaggagtacgatgttttggacaagagacgtggccgggaccctgagatggggggaaagccgagaaggaagaaccctcaggaaggcctgtacaatgaactgcagaaagataagatggcggaggcctacagtgagattgggatgaaaggcgagcgccggaggggcaaggggcacgatggcctttaccagggtctcagtacagccaccaaggacacctacgacgcccttcacatgcaggccctgccccctcgctctagaggatctggagcaacaaacttctcactactcaaacaagcaggtgacgtggaggagaatcccgggcctgggatccacatggccacttacgaggttctctgtgaggtggcgcggaaactgggcacggatgacagggaagtggtattgttcctcctaaacgtgttcatacctcaacccacactggcccaattaattggagctcttagagctttaaaggaggagggcaggttaacgtttcccctgttagcggaatgtctgtttcgtgcaggtcgcagagacctcttgcgcgacctgcttcacttagacccgcgttttttagagcgccacctagcgggcacaatgagttatttcagcccttatcagctcactgttctccacgtagacggggagctgtgtgcgagggatattaggtctttgatatttttaagcaaggacactatagggtctcgcagcacaccacagacattcttacactgggtgtactgtatggaaaacttagacctactgggtcccactgacgtggatgccctaatgtcaatgcttagatctttgtcaagagtagacctacagcgccaagtgcaaaccctaatgggccttcacctttccggcccatcacactcccaacactatcgccatacaccactcgagaccgatttctacgactacaaggacgacgatgacaagactagtggctccggcgagggcagaggaagtctactaacctgcggagatgtggaagaaaatcctggcccacatatgaccgagtacaagcccacggtgcgcctcgccacccgcgacgacgtccccagggccgtacgcaccctcgccgccgcgttcgccgactaccccgccacgcgccacaccgtcgatccggaccgccacatcgagcgggtcaccgagctgcaagaactcttcctcacgcgcgtcgggctcgacatcggcaaggtgtgggtcgcggacgacggcgccgcggtggcggtctggaccacgccggagagcgtcgaagcgggggcggtgttcgccgagatcggcccgcgcatggccgagttgagcggttcccggctggccgcgcagcaacagatggaaggcctcctggcgccgcaccggcccaaggagcccgcgtggttcctggccaccgtcggcgtctcgcccgaccaccagggcaagggtctgggcagcgccgtcgtgctccccggagtggaggcggccgagcgcgccggggtgcccgccttcctggagacctccgcgccccgcaacctccccttctacgagcggctcggcttcaccgtcaccgccgacgtcgaggtgcccgaaggaccgcgcacctggtgcatgacccgcaagcccggtgcctga

SEQ ID NO: 1440 - DNA, 2886 bp, Artificial Sequence
  Synthetic Polynucleotides
atggccttaccagtgaccgccttgctcctgccgctggccttgctgctccacgccgccaggccggccatccagatgacccagagccctagcagcctgagcgccagcgtgggcgacagagtgaccatcacctgtagagccagccagagcatcagcaactacctgaactggtatcagcagaagcccggcaaggcccccaagctgctgatctatgccgccagctctctccagagcggcgtgcccagcagattttctggcagcggctccggcaccgacttcaccctgacaatcagcagcctccagcccgaggacttcgccacctactactgccagcagagctacagcagcccctccaccacctttggacagggcaccaagctggaaatcaagagaggcggaggcggaagtggaggcggaggatctggcggcggaggctctgaagtgcagctggtggaatctggcggcggactgattcagcctggcggctctctgagactgagctgtgccgcctctggcttcaccgtgtcctccaactacatgagctgggtgcgccaggcccctggcaagggactggaatgggtgtccgtgacatacagcggcggcagcaccagctacgccgatagcgtgaagggccggttcaccatcagccgggacaacagcaagaacaccctgtacctccagatgaacagcctgcgggccgaggacaccgccgtgtactattgtgccaggggaggccggtactgctccagcatcagctgctatgccagaagcggctgcgactactggggccagggaacactcgtgaccgtgtccagtacgcgtgagcagaaactgatctcggaagaggatctggcgaagcccaccacgacgccagcgccgcgaccaccaacaccggcgcccaccatcgcgtcgcagcccctgtccctgcgcccagaggcgtgccggccagcggcggggggcgcagtgcacacgagggggctggacttcgcctgtgacatctacatctgggcgcccttggccgggacttgtggggtccttctcctgtcactggttatcaccctttactgcaaacggggcagaaagaaactcctgtatatattcaaacaaccatttatgagaccagtacaaactactcaagaggaagatggctgtagctgccgatttccagaagaagaagaaggaggatgtgaactgagagtgaagttcagcaggagcgcagacgcccccgcgtaccagcagggccagaaccagctctataacgagctgaatctaggacgaagagaggagtacgatgttttggacaagagacgtggccgggaccctgagatggggggaaagccgagaaggaagaaccctcaggaaggcctgtacaatgaactgcagaaagataagatggcggaggcctacagtgagattgggatgaaaggcgagcgccggaggggcaaggggcacgatggcctttaccagggtctcagtacagccaccaaggacacctacgacgcccttcacatgcaggccctgccccctcgctctagaggatctggagcaacaaacttctcactactcaaacaagcaggtgacgtggaggagaatcccgggcctgggatccacatggccacttacgaggttctctgtgaggtggcgcggaaactgggcacggatgacagggaagtggtattgttcctcctaaacgtgttcatacctcaacccacactggcccaattaattggagctcttagagctttaaaggaggagggcaggttaacgtttcccctgttagcggaatgtctgtttcgtgcaggtcgcagagacctcttgcgcgacctgcttcacttagacccgcgttttttagagcgccacctagcgggcacaatgagttatttcagcccttatcagctcactgttctccacgtagacggggagctgtgtgcgagggatattaggtctttgatatttttaagcaaggacactatagggtctcgcagcacaccacagacattcttacactgggtgtactgtatggaaaacttagacctactgggtcccactgacgtggatgccctaatgtcaatgcttagatctttgtcaagagtagacctacagcgccaagtgcaaaccctaatgggccttcacctttccggcccatcacactcccaacactatcgccatacaccactcgagaccgatttctacgactacaaggacgacgatgacaagactagtggctccggcgagggcagaggaagtctactaacctgcggagatgtggaagaaaatcctggcccacatatgaccgagtacaagcccacggtgcgcctcgccacccgcgacgacgtccccagggccgtacgcaccctcgccgccgcgttcgccgactaccccgccacgcgccacaccgtcgatccggaccgccacatcgagcgggtcaccgagctgcaagaactcttcctcacgcgcgtcgggctcgacatcggcaaggtgtgggtcgcggacgacggcgccgcggtggcggtctggaccacgccggagagcgtcgaagcgggggcggtgttcgccgagatcggcccgcgcatggccgagttgagcggttcccggctggccgcgcagcaacagatggaaggcctcctggcgccgcaccggcccaaggagcccgcgtggttcctggccaccgtcggcgtctcgcccgaccaccagggcaagggtctgggcagcgccgtcgtgctccccggagtggaggcggccgagcgcgccggggtgcccgccttcctggagacctccgcgccccgcaacctccccttctacgagcggctcggcttcaccgtcaccgccgacgtcgaggtgcccgaaggaccgcgcacctggtgcatgacccgcaagcccggtgcctga

SEQ ID NO: 1441 - DNA, 2871 bp, Artificial Sequence
  Synthetic Polynucleotides
atggccttaccagtgaccgccttgctcctgccgctggccttgctgctccacgccgccaggccggacatccagatgacccagagccccagcagcctgtctgccagcgtgggcgacagagtgaccatcacctgtagagccagccagagcatcggcaccagcctgcactggtatcagcagaagcctggcaaggcccccaagctgctgattaagttcgccagcagactgcagagcggcgtgcccagcagattttctggcagcggctccggcaccgacttcaccctgacaatcagctccctgcagcccgaggacttcgccacctactactgccagcagagccccggcttccctccaacctttggacagggcaccaagctggaaatcaagcggggcggaggcggaagtggaggcggaggatctggcggcggaggctctcaggtgcaactggtggaatctggcggcggacttgtgaagccaggcggcagcctgagactgagctgtgccgccagcggcttcagcatcaccaccagcggctactactggacctggatcagacagttccccggcaagggcctggaatggatgggctacatcggctacaacagcaagacctactacaaccccgccctgaagtcccggatcaccatcagcagagacaacgccaagaacagcctgtacctgcagatgaactccctgagagccgaggataccgccgtgtactactgcgccagatccctgtacggcggctacaaggacgccttcgatagctggggccagggaacccttgtgaccgtgtctagcacgcgtgagcagaaactgatctcggaagaggatctggcgaagcccaccacgacgccagcgccgcgaccaccaacaccggcgcccaccatcgcgtcgcagcccctgtccctgcgcccagaggcgtgccggccagcggcggggggcgcagtgcacacgagggggctggacttcgcctgtgacatctacatctgggcgcccttggccgggacttgtggggtccttctcctgtcactggttatcaccctttactgcaaacggggcagaaagaaactcctgtatatattcaaacaaccatttatgagaccagtacaaactactcaagaggaagatggctgtagctgccgatttccagaagaagaagaaggaggatgtgaactgagagtgaagttcagcaggagcgcagacgcccccgcgtaccagcagggccagaaccagctctataacgagctgaatctaggacgaagagaggagtacgatgttttggacaagagacgtggccgggaccctgagatggggggaaagccgagaaggaagaaccctcaggaaggcctgtacaatgaactgcagaaagataagatggcggaggcctacagtgagattgggatgaaaggcgagcgccggaggggcaaggggcacgatggcctttaccagggtctcagtacagccaccaaggacacctacgacgcccttcacatgcaggccctgccccctcgctctagaggatctggagcaacaaacttctcactactcaaacaagcaggtgacgtggaggagaatcccgggcctgggatccacatggccacttacgaggttctctgtgaggtggcgcggaaactgggcacggatgacagggaagtggtattgttcctcctaaacgtgttcatacctcaacccacactggcccaattaattggagctcttagagctttaaaggaggagggcaggttaacgtttcccctgttagcggaatgtctgtttcgtgcaggtcgcagagacctcttgcgcgacctgcttcacttagacccgcgttttttagagcgccacctagcgggcacaatgagttatttcagcccttatcagctcactgttctccacgtagacggggagctgtgtgcgagggatattaggtctttgatatttttaagcaaggacactatagggtctcgcagcacaccacagacattcttacactgggtgtactgtatggaaaacttagacctactgggtcccactgacgtggatgccctaatgtcaatgcttagatctttgtcaagagtagacctacagcgccaagtgcaaaccctaatgggccttcacctttccggcccatcacactcccaacactatcgccatacaccactcgagaccgatttctacgactacaaggacgacgatgacaagactagtggctccggcgagggcagaggaagtctactaacctgcggagatgtggaagaaaatcctggcccacatatgaccgagtacaagcccacggtgcgcctcgccacccgcgacgacgtccccagggccgtacgcaccctcgccgccgcgttcgccgactaccccgccacgcgccacaccgtcgatccggaccgccacatcgagcgggtcaccgagctgcaagaactcttcctcacgcgcgtcgggctcgacatcggcaaggtgtgggtcgcggacgacggcgccgcggtggcggtctggaccacgccggagagcgtcgaagcgggggcggtgttcgccgagatcggcccgcgcatggccgagttgagcggttcccggctggccgcgcagcaacagatggaaggcctcctggcgccgcaccggcccaaggagcccgcgtggttcctggccaccgtcggcgtctcgcccgaccaccagggcaagggtctgggcagcgccgtcgtgctccccggagtggaggcggccgagcgcgccggggtgcccgccttcctggagacctccgcgccccgcaacctccccttctacgagcggctcggcttcaccgtcaccgccgacgtcgaggtgcccgaaggaccgcgcacctggtgcatgacccgcaagcccggtgcctga

SEQ ID NO: 1442 - DNA, 2886 bp, Artificial Sequence
  Synthetic Polynucleotides
atggccttaccagtgaccgccttgctcctgccgctggccttgctgctccacgccgccaggccggacgagatcgtgctgacccagagccctctgagcctgcctgtgacacctggcgagcctgccagcatctcctgtagaagcagccagagcctgctgcacagcatcggctacaactacctggactggtatctccagaagcccggccagagcccccaactgctgatctacctgggcagcaacagagccagcggcgtgcccgatagattttccggcagcggctccggcaccgacttcaccctgaagatcagccgggtggaagccgaggacgtgggcgtgtactactgtatgcaggccctccagacccccctgacctttggcggaggcaccaaggtggaaatcaagcggggcggaggcggaagtggaggcggaggatctggcggcggaggctctgaagtgcaactggtggaaagcggaggcggcgtggtgcagcctggaagaagcctgagactgagctgtgccgccagcggcttcaccttccggtcctacggaatgcactgggtgcgccaggcccctggcaaaggactggaatgggtggccgtgatctcctacgacggctccaacaagtactacaccgacagcgtgaacggcagattcaccatcagcagagacaacagcaagaacaccctgtacctccagatgaacagcctgcgggccgaggacaccgccgtgtactattgtgctagaggcggaggctactacgagacaagcggccctgattactggggccagggcacactcgtgaccgtgtctagtacgcgtgagcagaaactgatctcggaagaggatctggcgaagcccaccacgacgccagcgccgcgaccaccaacaccggcgcccaccatcgcgtcgcagcccctgtccctgcgcccagaggcgtgccggccagcggcggggggcgcagtgcacacgagggggctggacttcgcctgtgacatctacatctgggcgcccttggccgggacttgtggggtccttctcctgtcactggttatcaccctttactgcaaacggggcagaaagaaactcctgtatatattcaaacaaccatttatgagaccagtacaaactactcaagaggaagatggctgtagctgccgatttccagaagaagaagaaggaggatgtgaactgagagtgaagttcagcaggagcgcagacgcccccgcgtaccagcagggccagaaccagctctataacgagctgaatctaggacgaagagaggagtacgatgttttggacaagagacgtggccgggaccctgagatggggggaaagccgagaaggaagaaccctcaggaaggcctgtacaatgaactgcagaaagataagatggcggaggcctacagtgagattgggatgaaaggcgagcgccggaggggcaaggggcacgatggcctttaccagggtctcagtacagccaccaaggacacctacgacgcccttcacatgcaggccctgccccctcgctctagaggatctggagcaacaaacttctcactactcaaacaagcaggtgacgtggaggagaatcccgggcctgggatccacatggccacttacgaggttctctgtgaggtggcgcggaaactgggcacggatgacagggaagtggtattgttcctcctaaacgtgttcatacctcaacccacactggcccaattaattggagctcttagagctttaaaggaggagggcaggttaacgtttcccctgttagcggaatgtctgtttcgtgcaggtcgcagagacctcttgcgcgacctgcttcacttagacccgcgttttttagagcgccacctagcgggcacaatgagttatttcagcccttatcagctcactgttctccacgtagacggggagctgtgtgcgagggatattaggtctttgatatttttaagcaaggacactatagggtctcgcagcacaccacagacattcttacactgggtgtactgtatggaaaacttagacctactgggtcccactgacgtggatgccctaatgtcaatgcttagatctttgtcaagagtagacctacagcgccaagtgcaaaccctaatgggccttcacctttccggcccatcacactcccaacactatcgccatacaccactcgagaccgatttctacgactacaaggacgacgatgacaagactagtggctccggcgagggcagaggaagtctactaacctgcggagatgtggaagaaaatcctggcccacatatgaccgagtacaagcccacggtgcgcctcgccacccgcgacgacgtccccagggccgtacgcaccctcgccgccgcgttcgccgactaccccgccacgcgccacaccgtcgatccggaccgccacatcgagcgggtcaccgagctgcaagaactcttcctcacgcgcgtcgggctcgacatcggcaaggtgtgggtcgcggacgacggcgccgcggtggcggtctggaccacgccggagagcgtcgaagcgggggcggtgttcgccgagatcggcccgcgcatggccgagttgagcggttcccggctggccgcgcagcaacagatggaaggcctcctggcgccgcaccggcccaaggagcccgcgtggttcctggccaccgtcggcgtctcgcccgaccaccagggcaagggtctgggcagcgccgtcgtgctccccggagtggaggcggccgagcgcgccggggtgcccgccttcctggagacctccgcgccccgcaacctccccttctacgagcggctcggcttcaccgtcaccgccgacgtcgaggtgcccgaaggaccgcgcacctggtgcatgacccgcaagcccggtgcctga

SEQ ID NO: 1443 - DNA, 2880 bp, Artificial Sequence
  Synthetic Polynucleotides
atggccttaccagtgaccgccttgctcctgccgctggccttgctgctccacgccgccaggccggacgacgtcgtgatgacccagagccctctgagcctgcctgtgacacctggcgagcctgccagcatctcctgtagaagcagccagagcctgctgcacagcatcggctacaactacctgcactggtttctccagaagcccggccagagcccccaactgctgatctacctgggcagcaacagagccagcggcgtgcccgatagattttccggcagcggctccggcaccgacttcaccctgaagatcagccgggtggaagccgaggacgtgggcgtgtactactgtatgcaggccctccagacccctcccacctttggacagggcaccagactggaaatcaagcggggcggaggcggaagtggaggcggaggatctggcggcggaggctctcaactccaactccaggaaagcggccctggcctcgtgaagcctagcggcacactgagcctgacatgtgccgtgtctggcggcagcatcagcagcagcaactggtggtcttgggtgcgccagcctcctggcaagggcctggaatggatcggcgaaatctaccacagcggcagcaccaactacaaccccagcctgaagtccagagtgaccatcagcgtggacaagagcaagaaccagttctccctgaagctgagcagcgtgacagccgccgataccgccgtgtactattgcgtgggcagcccctacggcgactacgtgctggattattggggccagggcaccctcgtgaccgtgtctagtacgcgtgagcagaaactgatctcggaagaggatctggcgaagcccaccacgacgccagcgccgcgaccaccaacaccggcgcccaccatcgcgtcgcagcccctgtccctgcgcccagaggcgtgccggccagcggcggggggcgcagtgcacacgagggggctggacttcgcctgtgacatctacatctgggcgcccttggccgggacttgtggggtccttctcctgtcactggttatcaccctttactgcaaacggggcagaaagaaactcctgtatatattcaaacaaccatttatgagaccagtacaaactactcaagaggaagatggctgtagctgccgatttccagaagaagaagaaggaggatgtgaactgagagtgaagttcagcaggagcgcagacgcccccgcgtaccagcagggccagaaccagctctataacgagctgaatctaggacgaagagaggagtacgatgttttggacaagagacgtggccgggaccctgagatggggggaaagccgagaaggaagaaccctcaggaaggcctgtacaatgaactgcagaaagataagatggcggaggcctacagtgagattgggatgaaaggcgagcgccggaggggcaaggggcacgatggcctttaccagggtctcagtacagccaccaaggacacctacgacgcccttcacatgcaggccctgccccctcgctctagaggatctggagcaacaaacttctcactactcaaacaagcaggtgacgtggaggagaatcccgggcctgggatccacatggccacttacgaggttctctgtgaggtggcgcggaaactgggcacggatgacagggaagtggtattgttcctcctaaacgtgttcatacctcaacccacactggcccaattaattggagctcttagagctttaaaggaggagggcaggttaacgtttcccctgttagcggaatgtctgtttcgtgcaggtcgcagagacctcttgcgcgacctgcttcacttagacccgcgttttttagagcgccacctagcgggcacaatgagttatttcagcccttatcagctcactgttctccacgtagacggggagctgtgtgcgagggatattaggtctttgatatttttaagcaaggacactatagggtctcgcagcacaccacagacattcttacactgggtgtactgtatggaaaacttagacctactgggtcccactgacgtggatgccctaatgtcaatgcttagatctttgtcaagagtagacctacagcgccaagtgcaaaccctaatgggccttcacctttccggcccatcacactcccaacactatcgccatacaccactcgagaccgatttctacgactacaaggacgacgatgacaagactagtggctccggcgagggcagaggaagtctactaacctgcggagatgtggaagaaaatcctggcccacatatgaccgagtacaagcccacggtgcgcctcgccacccgcgacgacgtccccagggccgtacgcaccctcgccgccgcgttcgccgactaccccgccacgcgccacaccgtcgatccggaccgccacatcgagcgggtcaccgagctgcaagaactcttcctcacgcgcgtcgggctcgacatcggcaaggtgtgggtcgcggacgacggcgccgcggtggcggtctggaccacgccggagagcgtcgaagcgggggcggtgttcgccgagatcggcccgcgcatggccgagttgagcggttcccggctggccgcgcagcaacagatggaaggcctcctggcgccgcaccggcccaaggagcccgcgtggttcctggccaccgtcggcgtctcgcccgaccaccagggcaagggtctgggcagcgccgtcgtgctccccggagtggaggcggccgagcgcgccggggtgcccgccttcctggagacctccgcgccccgcaacctccccttctacgagcggctcggcttcaccgtcaccgccgacgtcgaggtgcccgaaggaccgcgcacctggtgcatgacccgcaagcccggtgcctga

SEQ ID NO: 1444 - DNA, 2889 bp, Artificial Sequence
  Synthetic Polynucleotides
atggccttaccagtgaccgccttgctcctgccgctggccttgctgctccacgccgccaggccggacgtcgtgatgacccagagccctctgagcctgcctgtgacacctggcgagcctgccagcatcagctgtagaagcagccagagcctgctgcacagcaacggccacaactacctggactggtatctccagaagcccggccagagcccccagctgctgatctacctgggcagcaatagagccagcggcgtgcccgatagattcagcggctctggaagcggcaccgacttcaccctgaagatcagccgggtggaagccgaggacgtgggcgtgtactactgtatgcagaccctccagacccccctgacctttggccctggcaccaaggtggacatcaagagaggcggaggcggaagtggaggcggaggatctggcggcggaggctctgaagtgcagctggtggaaacaggcggaggcgtggtgcagcctggcagaagcctgagactgagctgtgccgccagcggcttcaccttcagcagctacggaatgcactgggtgcgccaggcccctggcaaaggactggaatgggtggccgtgatctcctacgacggcagcaacaagtattacgccgacagcgtgaagggccggttcaccatctccagagacaacagcaagaacaccctgtacctccagatgaacagcctgcgggccgaggacaccgccgtgtactattgcgccaaggacagatacggctggggcagcagcttcggccacttcgattattggggccagggcaccctcgtgaccgtgtctagtacgcgtgagcagaaactgatctcggaagaggatctggcgaagcccaccacgacgccagcgccgcgaccaccaacaccggcgcccaccatcgcgtcgcagcccctgtccctgcgcccagaggcgtgccggccagcggcggggggcgcagtgcacacgagggggctggacttcgcctgtgacatctacatctgggcgcccttggccgggacttgtggggtccttctcctgtcactggttatcaccctttactgcaaacggggcagaaagaaactcctgtatatattcaaacaaccatttatgagaccagtacaaactactcaagaggaagatggctgtagctgccgatttccagaagaagaagaaggaggatgtgaactgagagtgaagttcagcaggagcgcagacgcccccgcgtaccagcagggccagaaccagctctataacgagctgaatctaggacgaagagaggagtacgatgttttggacaagagacgtggccgggaccctgagatggggggaaagccgagaaggaagaaccctcaggaaggcctgtacaatgaactgcagaaagataagatggcggaggcctacagtgagattgggatgaaaggcgagcgccggaggggcaaggggcacgatggcctttaccagggtctcagtacagccaccaaggacacctacgacgcccttcacatgcaggccctgccccctcgctctagaggatctggagcaacaaacttctcactactcaaacaagcaggtgacgtggaggagaatcccgggcctgggatccacatggccacttacgaggttctctgtgaggtggcgcggaaactgggcacggatgacagggaagtggtattgttcctcctaaacgtgttcatacctcaacccacactggcccaattaattggagctcttagagctttaaaggaggagggcaggttaacgtttcccctgttagcggaatgtctgtttcgtgcaggtcgcagagacctcttgcgcgacctgcttcacttagacccgcgttttttagagcgccacctagcgggcacaatgagttatttcagcccttatcagctcactgttctccacgtagacggggagctgtgtgcgagggatattaggtctttgatatttttaagcaaggacactatagggtctcgcagcacaccacagacattcttacactgggtgtactgtatggaaaacttagacctactgggtcccactgacgtggatgccctaatgtcaatgcttagatctttgtcaagagtagacctacagcgccaagtgcaaaccctaatgggccttcacctttccggcccatcacactcccaacactatcgccatacaccactcgagaccgatttctacgactacaaggacgacgatgacaagactagtggctccggcgagggcagaggaagtctactaacctgcggagatgtggaagaaaatcctggcccacatatgaccgagtacaagcccacggtgcgcctcgccacccgcgacgacgtccccagggccgtacgcaccctcgccgccgcgttcgccgactaccccgccacgcgccacaccgtcgatccggaccgccacatcgagcgggtcaccgagctgcaagaactcttcctcacgcgcgtcgggctcgacatcggcaaggtgtgggtcgcggacgacggcgccgcggtggcggtctggaccacgccggagagcgtcgaagcgggggcggtgttcgccgagatcggcccgcgcatggccgagttgagcggttcccggctggccgcgcagcaacagatggaaggcctcctggcgccgcaccggcccaaggagcccgcgtggttcctggccaccgtcggcgtctcgcccgaccaccagggcaagggtctgggcagcgccgtcgtgctccccggagtggaggcggccgagcgcgccggggtgcccgccttcctggagacctccgcgccccgcaacctccccttctacgagcggctcggcttcaccgtcaccgccgacgtcgaggtgcccgaaggaccgcgcacctggtgcatgacccgcaagcccggtgcctga

SEQ ID NO: 1445 - DNA, 2874 bp, Artificial Sequence
  Synthetic Polynucleotides
atggccttaccagtgaccgccttgctcctgccgctggccttgctgctccacgccgccaggccggacgagatcgtgctgacacagagccctggcaccctgagcctgtctctgggagagagagccacactgagctgtcgggccagccagtctatcagcagcagcttcctggcctggtatcagcagaagcccggccaggcccctaagctgctgatctacgccgccagcacaagagccaccggcatccccgatagattcagcggctctggcagcggcaccgacttcaccctgaccatcagcagactggaacccgaggacttcgccgtgtactactgccagcagtacggcagaagcctgagcttcggcggaggcaccaaggtggaagtgaagggcggaggcggaagtggaggcggaggatctggcggcggaggctctcaggtgcaactccagcagtctggccccggactcgtgaagcctagccagacactgagcctgacctgcgccatcagcggcgatagcgtgtccggcaatagcgccacctggaactggatcagacagagcccatctcggggcctggaatggctgggccggacctactaccgcagcaagtggaaccacgactacgccgagagcgtgaagtcccggatcaccatcaaccccgacaccagcaagaaccagttctccttgcaactgaacagcgtgacccccgaggacacagccgtgtattattgcgccagaggcgacagcagctcttggtacgccttcgactattggggccagggcaccctcgtgaccgtgtctagtacgcgtgagcagaaactgatctcggaagaggatctggcgaagcccaccacgacgccagcgccgcgaccaccaacaccggcgcccaccatcgcgtcgcagcccctgtccctgcgcccagaggcgtgccggccagcggcggggggcgcagtgcacacgagggggctggacttcgcctgtgacatctacatctgggcgcccttggccgggacttgtggggtccttctcctgtcactggttatcaccctttactgcaaacggggcagaaagaaactcctgtatatattcaaacaaccatttatgagaccagtacaaactactcaagaggaagatggctgtagctgccgatttccagaagaagaagaaggaggatgtgaactgagagtgaagttcagcaggagcgcagacgcccccgcgtaccagcagggccagaaccagctctataacgagctgaatctaggacgaagagaggagtacgatgttttggacaagagacgtggccgggaccctgagatggggggaaagccgagaaggaagaaccctcaggaaggcctgtacaatgaactgcagaaagataagatggcggaggcctacagtgagattgggatgaaaggcgagcgccggaggggcaaggggcacgatggcctttaccagggtctcagtacagccaccaaggacacctacgacgcccttcacatgcaggccctgccccctcgctctagaggatctggagcaacaaacttctcactactcaaacaagcaggtgacgtggaggagaatcccgggcctgggatccacatggccacttacgaggttctctgtgaggtggcgcggaaactgggcacggatgacagggaagtggtattgttcctcctaaacgtgttcatacctcaacccacactggcccaattaattggagctcttagagctttaaaggaggagggcaggttaacgtttcccctgttagcggaatgtctgtttcgtgcaggtcgcagagacctcttgcgcgacctgcttcacttagacccgcgttttttagagcgccacctagcgggcacaatgagttatttcagcccttatcagctcactgttctccacgtagacggggagctgtgtgcgagggatattaggtctttgatatttttaagcaaggacactatagggtctcgcagcacaccacagacattcttacactgggtgtactgtatggaaaacttagacctactgggtcccactgacgtggatgccctaatgtcaatgcttagatctttgtcaagagtagacctacagcgccaagtgcaaaccctaatgggccttcacctttccggcccatcacactcccaacactatcgccatacaccactcgagaccgatttctacgactacaaggacgacgatgacaagactagtggctccggcgagggcagaggaagtctactaacctgcggagatgtggaagaaaatcctggcccacatatgaccgagtacaagcccacggtgcgcctcgccacccgcgacgacgtccccagggccgtacgcaccctcgccgccgcgttcgccgactaccccgccacgcgccacaccgtcgatccggaccgccacatcgagcgggtcaccgagctgcaagaactcttcctcacgcgcgtcgggctcgacatcggcaaggtgtgggtcgcggacgacggcgccgcggtggcggtctggaccacgccggagagcgtcgaagcgggggcggtgttcgccgagatcggcccgcgcatggccgagttgagcggttcccggctggccgcgcagcaacagatggaaggcctcctggcgccgcaccggcccaaggagcccgcgtggttcctggccaccgtcggcgtctcgcccgaccaccagggcaagggtctgggcagcgccgtcgtgctccccggagtggaggcggccgagcgcgccggggtgcccgccttcctggagacctccgcgccccgcaacctccccttctacgagcggctcggcttcaccgtcaccgccgacgtcgaggtgcccgaaggaccgcgcacctggtgcatgacccgcaagcccggtgcctga

SEQ ID NO: 1446 - DNA, 2874 bp, Artificial Sequence
  Synthetic Polynucleotides
atggccttaccagtgaccgccttgctcctgccgctggccttgctgctccacgccgccaggccggaccagaccgtcgtgacacagcctcctagcgcctctggcacaccaggccagagagtgaccatctcctgtagcggcagcagcagcaacatcggcagcaactacgtgtactggtatcagcaactgcccggcaccgcccccaagctgctgatctacagaagcaaccagcggcccagcggcgtgcccgatagattttctggcagcaagagcggcaccagcgccagcctggctatctctggacctagaagcgtggacgaggccgactactactgcgccgcctgggacgatagcctgaacggcgtggtgtttggcggaggcaccaagctgacagtgctgggtggcggaggcggaagtggaggcggaggatctggcggcggaggctctcaggtgcaactggtgcagtctggggccgaagtgaagaaacccggcagctccgtgaaggtgtcctgcaaggcttccggcggcaccttcagcagctacgccatttcttgggtgcgccaggcccctggacagggcctggaatggatgggcggcatcatccccatctttggcaccgccaactacgcccagaaattccagggccgcgtgaccatcaccgccgacgagtctacaagcaccgcctacatggaactgagcagcctgcggagcgaggataccgccgtgtactactgtgccagaagaatccccccctactacggcatggacgtgtggggccagggaaccaccgtgaccgtgtcatctacgcgtgagcagaaactgatctcggaagaggatctggcgaagcccaccacgacgccagcgccgcgaccaccaacaccggcgcccaccatcgcgtcgcagcccctgtccctgcgcccagaggcgtgccggccagcggcggggggcgcagtgcacacgagggggctggacttcgcctgtgacatctacatctgggcgcccttggccgggacttgtggggtccttctcctgtcactggttatcaccctttactgcaaacggggcagaaagaaactcctgtatatattcaaacaaccatttatgagaccagtacaaactactcaagaggaagatggctgtagctgccgatttccagaagaagaagaaggaggatgtgaactgagagtgaagttcagcaggagcgcagacgcccccgcgtaccagcagggccagaaccagctctataacgagctgaatctaggacgaagagaggagtacgatgttttggacaagagacgtggccgggaccctgagatggggggaaagccgagaaggaagaaccctcaggaaggcctgtacaatgaactgcagaaagataagatggcggaggcctacagtgagattgggatgaaaggcgagcgccggaggggcaaggggcacgatggcctttaccagggtctcagtacagccaccaaggacacctacgacgcccttcacatgcaggccctgccccctcgctctagaggatctggagcaacaaacttctcactactcaaacaagcaggtgacgtggaggagaatcccgggcctgggatccacatggccacttacgaggttctctgtgaggtggcgcggaaactgggcacggatgacagggaagtggtattgttcctcctaaacgtgttcatacctcaacccacactggcccaattaattggagctcttagagctttaaaggaggagggcaggttaacgtttcccctgttagcggaatgtctgtttcgtgcaggtcgcagagacctcttgcgcgacctgcttcacttagacccgcgttttttagagcgccacctagcgggcacaatgagttatttcagcccttatcagctcactgttctccacgtagacggggagctgtgtgcgagggatattaggtctttgatatttttaagcaaggacactatagggtctcgcagcacaccacagacattcttacactgggtgtactgtatggaaaacttagacctactgggtcccactgacgtggatgccctaatgtcaatgcttagatctttgtcaagagtagacctacagcgccaagtgcaaaccctaatgggccttcacctttccggcccatcacactcccaacactatcgccatacaccactcgagaccgatttctacgactacaaggacgacgatgacaagactagtggctccggcgagggcagaggaagtctactaacctgcggagatgtggaagaaaatcctggcccacatatgaccgagtacaagcccacggtgcgcctcgccacccgcgacgacgtccccagggccgtacgcaccctcgccgccgcgttcgccgactaccccgccacgcgccacaccgtcgatccggaccgccacatcgagcgggtcaccgagctgcaagaactcttcctcacgcgcgtcgggctcgacatcggcaaggtgtgggtcgcggacgacggcgccgcggtggcggtctggaccacgccggagagcgtcgaagcgggggcggtgttcgccgagatcggcccgcgcatggccgagttgagcggttcccggctggccgcgcagcaacagatggaaggcctcctggcgccgcaccggcccaaggagcccgcgtggttcctggccaccgtcggcgtctcgcccgaccaccagggcaagggtctgggcagcgccgtcgtgctccccggagtggaggcggccgagcgcgccggggtgcccgccttcctggagacctccgcgccccgcaacctccccttctacgagcggctcggcttcaccgtcaccgccgacgtcgaggtgcccgaaggaccgcgcacctggtgcatgacccgcaagcccggtgcctga

SEQ ID NO: 1447 - DNA, 2874 bp, Artificial Sequence
  Synthetic Polynucleotides
atggccttaccagtgaccgccttgctcctgccgctggccttgctgctccacgccgccaggccggaccagagcgtcgtgacacagcctcctagcgtgtcagtggcccctggcaagaccgccagaatcacctgtggccggaacaacatcggcagcaagagcgtgcactggtatcagcagaagcccggccaggctcctgtgctggtggtgtacgacgacagcgacagacccagcggcatccccgagagattcagcggcagcaactccggcaataccgccaccctgaccatcagcagagtggaagccggcgacgaggccgactactactgccaagtgtgggacagcagcagcgatcacgtggtgtttggcggaggcaccaagctgacagtgctgggtggcggaggcggaagtggaggcggaggatctggcggcggaggctctgaagtgcaactggtgcagtctggcggaggggtcgtgcggcctggcggatctctgagactgtcttgtgccgccagcggcttcaccttcgacgactacggcatgagctgggtgcgccaggcccctggaaaaggcctggaatgggtgtccggcatcaactggaatggcggcagcaccggctacgccgattctgtgcggggcagattcaccatcagccgggacaacgccaagaacagcctgtacctgcagatgaactccctgcgggccgaggacaccgccctgtactattgcgccagagagcggggctacggctaccacgaccctcacgattattggggccagggcacccttgtcaccgtgtcctctacgcgtgagcagaaactgatctcggaagaggatctggcgaagcccaccacgacgccagcgccgcgaccaccaacaccggcgcccaccatcgcgtcgcagcccctgtccctgcgcccagaggcgtgccggccagcggcggggggcgcagtgcacacgagggggctggacttcgcctgtgacatctacatctgggcgcccttggccgggacttgtggggtccttctcctgtcactggttatcaccctttactgcaaacggggcagaaagaaactcctgtatatattcaaacaaccatttatgagaccagtacaaactactcaagaggaagatggctgtagctgccgatttccagaagaagaagaaggaggatgtgaactgagagtgaagttcagcaggagcgcagacgcccccgcgtaccagcagggccagaaccagctctataacgagctgaatctaggacgaagagaggagtacgatgttttggacaagagacgtggccgggaccctgagatggggggaaagccgagaaggaagaaccctcaggaaggcctgtacaatgaactgcagaaagataagatggcggaggcctacagtgagattgggatgaaaggcgagcgccggaggggcaaggggcacgatggcctttaccagggtctcagtacagccaccaaggacacctacgacgcccttcacatgcaggccctgccccctcgctctagaggatctggagcaacaaacttctcactactcaaacaagcaggtgacgtggaggagaatcccgggcctgggatccacatggccacttacgaggttctctgtgaggtggcgcggaaactgggcacggatgacagggaagtggtattgttcctcctaaacgtgttcatacctcaacccacactggcccaattaattggagctcttagagctttaaaggaggagggcaggttaacgtttcccctgttagcggaatgtctgtttcgtgcaggtcgcagagacctcttgcgcgacctgcttcacttagacccgcgttttttagagcgccacctagcgggcacaatgagttatttcagcccttatcagctcactgttctccacgtagacggggagctgtgtgcgagggatattaggtctttgatatttttaagcaaggacactatagggtctcgcagcacaccacagacattcttacactgggtgtactgtatggaaaacttagacctactgggtcccactgacgtggatgccctaatgtcaatgcttagatctttgtcaagagtagacctacagcgccaagtgcaaaccctaatgggccttcacctttccggcccatcacactcccaacactatcgccatacaccactcgagaccgatttctacgactacaaggacgacgatgacaagactagtggctccggcgagggcagaggaagtctactaacctgcggagatgtggaagaaaatcctggcccacatatgaccgagtacaagcccacggtgcgcctcgccacccgcgacgacgtccccagggccgtacgcaccctcgccgccgcgttcgccgactaccccgccacgcgccacaccgtcgatccggaccgccacatcgagcgggtcaccgagctgcaagaactcttcctcacgcgcgtcgggctcgacatcggcaaggtgtgggtcgcggacgacggcgccgcggtggcggtctggaccacgccggagagcgtcgaagcgggggcggtgttcgccgagatcggcccgcgcatggccgagttgagcggttcccggctggccgcgcagcaacagatggaaggcctcctggcgccgcaccggcccaaggagcccgcgtggttcctggccaccgtcggcgtctcgcccgaccaccagggcaagggtctgggcagcgccgtcgtgctccccggagtggaggcggccgagcgcgccggggtgcccgccttcctggagacctccgcgccccgcaacctccccttctacgagcggctcggcttcaccgtcaccgccgacgtcgaggtgcccgaaggaccgcgcacctggtgcatgacccgcaagcccggtgcctga

SEQ ID NO: 1448 - DNA, 2910 bp, Artificial Sequence
  Synthetic Polynucleotides
atggccttaccagtgaccgccttgctcctgccgctggccttgctgctccacgccgccaggccggaacagaaactcatcagtgaagaagacctggaattccaggctgtcgtgacacagcctcctagcgcctctggcacaccaggccagagagtgaccatctcctgtagcggcagcagcagcaacatcggcagcaacaccgtgaactggtatcagcaggtgcccggcaccgctcccaagctgctgatctacagcaacaaccagcggcccagcggcgtgcccgatagattttctggcagcaagagcggcaccagcgccagcctggctatctctggactccagtccgaggacgaggccgactactattgcgccgcctgggacgatagcctgaacggctgggtgttcggcggaggcaccaagctgacagtgctgggcggaggcggaagtggaggcggaggatctggcggcggaggctctcagatgcaactggtgcagagcggagccgaagtgaaagagcctggcgagagcctgcggatctcctgcaagggcagcggctacagcttcaccaatttctggatctcttgggtgcgccagatgcccggcaagggcctggaatggatgggcagagtggaccccggctactcctacagcacctacagccctagcttccagggccacgtgaccatcagcgccgacaagagcaccagcaccgcctacctccagtggaacagcctgaaggccagcgacaccgccatgtactactgcgccagagtgcagtacagcggctattacgattggttcgacccctggggccagggcacactcgtgacagtgtcaagcacgcgtgagcagaaactgatctcggaagaggatctggcgaagcccaccacgacgccagcgccgcgaccaccaacaccggcgcccaccatcgcgtcgcagcccctgtccctgcgcccagaggcgtgccggccagcggcggggggcgcagtgcacacgagggggctggacttcgcctgtgacatctacatctgggcgcccttggccgggacttgtggggtccttctcctgtcactggttatcaccctttactgcaaacggggcagaaagaaactcctgtatatattcaaacaaccatttatgagaccagtacaaactactcaagaggaagatggctgtagctgccgatttccagaagaagaagaaggaggatgtgaactgagagtgaagttcagcaggagcgcagacgcccccgcgtaccagcagggccagaaccagctctataacgagctgaatctaggacgaagagaggagtacgatgttttggacaagagacgtggccgggaccctgagatggggggaaagccgagaaggaagaaccctcaggaaggcctgtacaatgaactgcagaaagataagatggcggaggcctacagtgagattgggatgaaaggcgagcgccggaggggcaaggggcacgatggcctttaccagggtctcagtacagccaccaaggacacctacgacgcccttcacatgcaggccctgccccctcgctctagaggatctggagcaacaaacttctcactactcaaacaagcaggtgacgtggaggagaatcccgggcctgggatccacatggccacttacgaggttctctgtgaggtggcgcggaaactgggcacggatgacagggaagtggtattgttcctcctaaacgtgttcatacctcaacccacactggcccaattaattggagctcttagagctttaaaggaggagggcaggttaacgtttcccctgttagcggaatgtctgtttcgtgcaggtcgcagagacctcttgcgcgacctgcttcacttagacccgcgttttttagagcgccacctagcgggcacaatgagttatttcagcccttatcagctcactgttctccacgtagacggggagctgtgtgcgagggatattaggtctttgatatttttaagcaaggacactatagggtctcgcagcacaccacagacattcttacactgggtgtactgtatggaaaacttagacctactgggtcccactgacgtggatgccctaatgtcaatgcttagatctttgtcaagagtagacctacagcgccaagtgcaaaccctaatgggccttcacctttccggcccatcacactcccaacactatcgccatacaccactcgagaccgatttctacgactacaaggacgacgatgacaagactagtggctccggcgagggcagaggaagtctactaacctgcggagatgtggaagaaaatcctggcccacatatgaccgagtacaagcccacggtgcgcctcgccacccgcgacgacgtccccagggccgtacgcaccctcgccgccgcgttcgccgactaccccgccacgcgccacaccgtcgatccggaccgccacatcgagcgggtcaccgagctgcaagaactcttcctcacgcgcgtcgggctcgacatcggcaaggtgtgggtcgcggacgacggcgccgcggtggcggtctggaccacgccggagagcgtcgaagcgggggcggtgttcgccgagatcggcccgcgcatggccgagttgagcggttcccggctggccgcgcagcaacagatggaaggcctcctggcgccgcaccggcccaaggagcccgcgtggttcctggccaccgtcggcgtctcgcccgaccaccagggcaagggtctgggcagcgccgtcgtgctccccggagtggaggcggccgagcgcgccggggtgcccgccttcctggagacctccgcgccccgcaacctccccttctacgagcggctcggcttcaccgtcaccgccgacgtcgaggtgcccgaaggaccgcgcacctggtgcatgacccgcaagcccggtgcctga

SEQ ID NO: 1449 - DNA, 2892 bp, Artificial Sequence
  Synthetic Polynucleotides
atggccttaccagtgaccgccttgctcctgccgctggccttgctgctccacgccgccaggccggaacagaaactcatcagtgaagaagacctggaattcgacatccagatgacccagagccccagcacactgagcgccagcgtgggcgacagagtgaccatcacctgtcgggccagccagaacatcaacaagtggctggcctggtatcagcagaggcccggaaaagccccccagctgctgatctacaaggccagcagcctggaaagcggcgtgcccagcagattttctggcagcggctctggcaccgagtacaccctgaccatcagctccctccagcccgacgacttcgccacctactactgccagcagtacaacagctacgccaccttcggccagggcaccaaggtggaaatcaagagaggcggaggcggaagtggaggcggaggatctggcggcggaggctctcaggtgcagctggtgcagtctggggccgaagtgaagaagcctggcgagagcctgaagatcagctgcaagggctccggctacaacttctctaacaagtggatcggctgggtgcgccagctgcctggcagaggactggaatggatcgccatcatctaccccggctacagcgacatcacctacagccccagcttccagggccgcgtgacaatcagcgccgacaccagcatcaacaccgcctacctgcactggcacagcctgaaggccagcgacaccgccatgtactactgcgtgcggcatacagccctggctggcttcgattattggggcctgggcaccctcgtgaccgtgtctagtacgcgtgagcagaaactgatctcggaagaggatctggcgaagcccaccacgacgccagcgccgcgaccaccaacaccggcgcccaccatcgcgtcgcagcccctgtccctgcgcccagaggcgtgccggccagcggcggggggcgcagtgcacacgagggggctggacttcgcctgtgacatctacatctgggcgcccttggccgggacttgtggggtccttctcctgtcactggttatcaccctttactgcaaacggggcagaaagaaactcctgtatatattcaaacaaccatttatgagaccagtacaaactactcaagaggaagatggctgtagctgccgatttccagaagaagaagaaggaggatgtgaactgagagtgaagttcagcaggagcgcagacgcccccgcgtaccagcagggccagaaccagctctataacgagctgaatctaggacgaagagaggagtacgatgttttggacaagagacgtggccgggaccctgagatggggggaaagccgagaaggaagaaccctcaggaaggcctgtacaatgaactgcagaaagataagatggcggaggcctacagtgagattgggatgaaaggcgagcgccggaggggcaaggggcacgatggcctttaccagggtctcagtacagccaccaaggacacctacgacgcccttcacatgcaggccctgccccctcgctctagaggatctggagcaacaaacttctcactactcaaacaagcaggtgacgtggaggagaatcccgggcctgggatccacatggccacttacgaggttctctgtgaggtggcgcggaaactgggcacggatgacagggaagtggtattgttcctcctaaacgtgttcatacctcaacccacactggcccaattaattggagctcttagagctttaaaggaggagggcaggttaacgtttcccctgttagcggaatgtctgtttcgtgcaggtcgcagagacctcttgcgcgacctgcttcacttagacccgcgttttttagagcgccacctagcgggcacaatgagttatttcagcccttatcagctcactgttctccacgtagacggggagctgtgtgcgagggatattaggtctttgatatttttaagcaaggacactatagggtctcgcagcacaccacagacattcttacactgggtgtactgtatggaaaacttagacctactgggtcccactgacgtggatgccctaatgtcaatgcttagatctttgtcaagagtagacctacagcgccaagtgcaaaccctaatgggccttcacctttccggcccatcacactcccaacactatcgccatacaccactcgagaccgatttctacgactacaaggacgacgatgacaagactagtggctccggcgagggcagaggaagtctactaacctgcggagatgtggaagaaaatcctggcccacatatgaccgagtacaagcccacggtgcgcctcgccacccgcgacgacgtccccagggccgtacgcaccctcgccgccgcgttcgccgactaccccgccacgcgccacaccgtcgatccggaccgccacatcgagcgggtcaccgagctgcaagaactcttcctcacgcgcgtcgggctcgacatcggcaaggtgtgggtcgcggacgacggcgccgcggtggcggtctggaccacgccggagagcgtcgaagcgggggcggtgttcgccgagatcggcccgcgcatggccgagttgagcggttcccggctggccgcgcagcaacagatggaaggcctcctggcgccgcaccggcccaaggagcccgcgtggttcctggccaccgtcggcgtctcgcccgaccaccagggcaagggtctgggcagcgccgtcgtgctccccggagtggaggcggccgagcgcgccggggtgcccgccttcctggagacctccgcgccccgcaacctccccttctacgagcggctcggcttcaccgtcaccgccgacgtcgaggtgcccgaaggaccgcgcacctggtgcatgacccgcaagcccggtgcctga

SEQ ID NO: 1450 - DNA, 2862 bp, Artificial Sequence
  Synthetic Polynucleotides
atggccttaccagtgaccgccttgctcctgccgctggccttgctgctccacgccgccaggccggagatcgtgctgacacagagccctggcaccctgagcctgtctccaggcgaaagagccacactgagctgtcgggccagccagagcgtgtccaatacctacctggcctggtatcaccagaggcccggacaggctccccggctgctgatctatggcgcttctagcagagccaccggcatccccgatagattcagcggctctggcagcggcaccgacttcgccctgacaatcagctccctggaacccgaggacttcgccgtgtactactgccagcagtacagcaactcctggaccttcggccagggcaccaaggtggaaatcaagagaggcggaggcggaagtggaggcggaggatctggcggcggaggctctcaggtgcaactggtggaatctggcgggggagtggtgcagcctggcagaagcctgagactgtcttgtgccgccagcggcttcaccttcagcagctacgacatgcactgggtgcgccaggcccctggcaaaggactggaatgggtggccgtgatctcctacgacggcaccaacgagtattacgccgacagcgtgaagggccggttcaccatctccagagacaccagcaagaacaccctgtacctccagatgaacagcctgcgggccgaggacacagccgtgtattattgcgccagagagcggtacttcgactggtccttcgactactggggccagggaaccctggtgtccgtgtctagtacgcgtgagcagaaactgatctcggaagaggatctggcgaagcccaccacgacgccagcgccgcgaccaccaacaccggcgcccaccatcgcgtcgcagcccctgtccctgcgcccagaggcgtgccggccagcggcggggggcgcagtgcacacgagggggctggacttcgcctgtgacatctacatctgggcgcccttggccgggacttgtggggtccttctcctgtcactggttatcaccctttactgcaaacggggcagaaagaaactcctgtatatattcaaacaaccatttatgagaccagtacaaactactcaagaggaagatggctgtagctgccgatttccagaagaagaagaaggaggatgtgaactgagagtgaagttcagcaggagcgcagacgcccccgcgtaccagcagggccagaaccagctctataacgagctgaatctaggacgaagagaggagtacgatgttttggacaagagacgtggccgggaccctgagatggggggaaagccgagaaggaagaaccctcaggaaggcctgtacaatgaactgcagaaagataagatggcggaggcctacagtgagattgggatgaaaggcgagcgccggaggggcaaggggcacgatggcctttaccagggtctcagtacagccaccaaggacacctacgacgcccttcacatgcaggccctgccccctcgctctagaggatctggagcaacaaacttctcactactcaaacaagcaggtgacgtggaggagaatcccgggcctgggatccacatggccacttacgaggttctctgtgaggtggcgcggaaactgggcacggatgacagggaagtggtattgttcctcctaaacgtgttcatacctcaacccacactggcccaattaattggagctcttagagctttaaaggaggagggcaggttaacgtttcccctgttagcggaatgtctgtttcgtgcaggtcgcagagacctcttgcgcgacctgcttcacttagacccgcgttttttagagcgccacctagcgggcacaatgagttatttcagcccttatcagctcactgttctccacgtagacggggagctgtgtgcgagggatattaggtctttgatatttttaagcaaggacactatagggtctcgcagcacaccacagacattcttacactgggtgtactgtatggaaaacttagacctactgggtcccactgacgtggatgccctaatgtcaatgcttagatctttgtcaagagtagacctacagcgccaagtgcaaaccctaatgggccttcacctttccggcccatcacactcccaacactatcgccatacaccactcgagaccgatttctacgactacaaggacgacgatgacaagactagtggctccggcgagggcagaggaagtctactaacctgcggagatgtggaagaaaatcctggcccacatatgaccgagtacaagcccacggtgcgcctcgccacccgcgacgacgtccccagggccgtacgcaccctcgccgccgcgttcgccgactaccccgccacgcgccacaccgtcgatccggaccgccacatcgagcgggtcaccgagctgcaagaactcttcctcacgcgcgtcgggctcgacatcggcaaggtgtgggtcgcggacgacggcgccgcggtggcggtctggaccacgccggagagcgtcgaagcgggggcggtgttcgccgagatcggcccgcgcatggccgagttgagcggttcccggctggccgcgcagcaacagatggaaggcctcctggcgccgcaccggcccaaggagcccgcgtggttcctggccaccgtcggcgtctcgcccgaccaccagggcaagggtctgggcagcgccgtcgtgctccccggagtggaggcggccgagcgcgccggggtgcccgccttcctggagacctccgcgccccgcaacctccccttctacgagcggctcggcttcaccgtcaccgccgacgtcgaggtgcccgaaggaccgcgcacctggtgcatgacccgcaagcccggtgcctga

SEQ ID NO: 1451 - DNA, 2859 bp, Artificial Sequence
  Synthetic Polynucleotides
atggccttaccagtgaccgccttgctcctgccgctggccttgctgctccacgccgccaggccggagctgacacaggaccctgctgtgtctgttgccctgggccagacagtgcggattacctgtcaaggcgacagcctgagaagcaactacgccaactggtatcagcagaagcccggacaggctcccgtgctggttatctacggccagaacaacagacccagcggcatccccgatagattcagcggctctagctctggcaataccgccagcctgacaatcactggcgctcaggctgccgatgaggccgactactactgcgatagcagagtgtccaccggcaatcacgtggtgtttggcggcggaacaaagctgacagtgctcggacaaggcggaggcggaagtggaggcggaggatctggcggcggaggctctgaagttcagctggtgcagagcggagccgaagtgaagaaacctggggcctctgtgaaggtgtcctgcaaggcttccggctacacctttaccagctacgccatgcactgggtccgacaggcacctggacaacggcttgaatggatgggctggatcaacgccggcaacggcaacaccaagtacagccagaaattccagggccgcgtgaccatcaccagagatacaagcgccagcaccgcctacatggaactgtctagcctgagatccgaggacaccgccgtgtactactgtgccagagacatcagctacggcagcttcgactattggggccagggcacactggtcaccgttagctctacgcgtgagcagaaactgatctcggaagaggatctggcgaagcccaccacgacgccagcgccgcgaccaccaacaccggcgcccaccatcgcgtcgcagcccctgtccctgcgcccagaggcgtgccggccagcggcggggggcgcagtgcacacgagggggctggacttcgcctgtgacatctacatctgggcgcccttggccgggacttgtggggtccttctcctgtcactggttatcaccctttactgcaaacggggcagaaagaaactcctgtatatattcaaacaaccatttatgagaccagtacaaactactcaagaggaagatggctgtagctgccgatttccagaagaagaagaaggaggatgtgaactgagagtgaagttcagcaggagcgcagacgcccccgcgtaccagcagggccagaaccagctctataacgagctgaatctaggacgaagagaggagtacgatgttttggacaagagacgtggccgggaccctgagatggggggaaagccgagaaggaagaaccctcaggaaggcctgtacaatgaactgcagaaagataagatggcggaggcctacagtgagattgggatgaaaggcgagcgccggaggggcaaggggcacgatggcctttaccagggtctcagtacagccaccaaggacacctacgacgcccttcacatgcaggccctgccccctcgctctagaggatctggagcaacaaacttctcactactcaaacaagcaggtgacgtggaggagaatcccgggcctgggatccacatggccacttacgaggttctctgtgaggtggcgcggaaactgggcacggatgacagggaagtggtattgttcctcctaaacgtgttcatacctcaacccacactggcccaattaattggagctcttagagctttaaaggaggagggcaggttaacgtttcccctgttagcggaatgtctgtttcgtgcaggtcgcagagacctcttgcgcgacctgcttcacttagacccgcgttttttagagcgccacctagcgggcacaatgagttatttcagcccttatcagctcactgttctccacgtagacggggagctgtgtgcgagggatattaggtctttgatatttttaagcaaggacactatagggtctcgcagcacaccacagacattcttacactgggtgtactgtatggaaaacttagacctactgggtcccactgacgtggatgccctaatgtcaatgcttagatctttgtcaagagtagacctacagcgccaagtgcaaaccctaatgggccttcacctttccggcccatcacactcccaacactatcgccatacaccactcgagaccgatttctacgactacaaggacgacgatgacaagactagtggctccggcgagggcagaggaagtctactaacctgcggagatgtggaagaaaatcctggcccacatatgaccgagtacaagcccacggtgcgcctcgccacccgcgacgacgtccccagggccgtacgcaccctcgccgccgcgttcgccgactaccccgccacgcgccacaccgtcgatccggaccgccacatcgagcgggtcaccgagctgcaagaactcttcctcacgcgcgtcgggctcgacatcggcaaggtgtgggtcgcggacgacggcgccgcggtggcggtctggaccacgccggagagcgtcgaagcgggggcggtgttcgccgagatcggcccgcgcatggccgagttgagcggttcccggctggccgcgcagcaacagatggaaggcctcctggcgccgcaccggcccaaggagcccgcgtggttcctggccaccgtcggcgtctcgcccgaccaccagggcaagggtctgggcagcgccgtcgtgctccccggagtggaggcggccgagcgcgccggggtgcccgccttcctggagacctccgcgccccgcaacctccccttctacgagcggctcggcttcaccgtcaccgccgacgtcgaggtgcccgaaggaccgcgcacctggtgcatgacccgcaagcccggtgcctga

SEQ ID NO: 1452 - DNA, 2865 bp, Artificial Sequence
  Synthetic Polynucleotides
atggccttaccagtgaccgccttgctcctgccgctggccttgctgctccacgccgccaggccggacatcgtgctgacacagacaccagccacactgagcgtgacacctggcgattctgtgtccctgagctgtagagccagccagagcatcagcaacaacctgcactggtatcagcagaagtcccacgagagccccagactgctgattaagaacgccagccagtctatcagcggcatccccagcaagtttagcggctctggcagcggcaccgacttcaccctgagaatcaacagcgtggaaaccgaggacttcgggatgtacttctgccagcagagcaatagctggccctacacatttggctccggcaccaagctggaaatcaaaggcggaggcggaagtggaggcggaggatctggcggcggaggctctcaagtgaagctgcaacagagcggacccgagctggttaagccaggcgcttccgtgaagattagctgcaaggccagcggctacagcttcaccggctactacatgcactgggtcaagcagagccacggcaacatcctggactggatcggctacatctacccctacaacggcgtgtccagctacaaccagaagttcaagggcaaagccactctgaccgtggacaagagcagcagcaccgcctacatggaactgagaagcctgaccagcgaggacagcgccgtgtactattgtgccagagagcggggcctgtaccagctcagagcaatggattattggggccagggcaccagcgtgaccgtttcttctacgcgtgagcagaaactgatctcggaagaggatctggcgaagcccaccacgacgccagcgccgcgaccaccaacaccggcgcccaccatcgcgtcgcagcccctgtccctgcgcccagaggcgtgccggccagcggcggggggcgcagtgcacacgagggggctggacttcgcctgtgacatctacatctgggcgcccttggccgggacttgtggggtccttctcctgtcactggttatcaccctttactgcaaacggggcagaaagaaactcctgtatatattcaaacaaccatttatgagaccagtacaaactactcaagaggaagatggctgtagctgccgatttccagaagaagaagaaggaggatgtgaactgagagtgaagttcagcaggagcgcagacgcccccgcgtaccagcagggccagaaccagctctataacgagctgaatctaggacgaagagaggagtacgatgttttggacaagagacgtggccgggaccctgagatggggggaaagccgagaaggaagaaccctcaggaaggcctgtacaatgaactgcagaaagataagatggcggaggcctacagtgagattgggatgaaaggcgagcgccggaggggcaaggggcacgatggcctttaccagggtctcagtacagccaccaaggacacctacgacgcccttcacatgcaggccctgccccctcgctctagaggatctggagcaacaaacttctcactactcaaacaagcaggtgacgtggaggagaatcccgggcctgggatccacatggccacttacgaggttctctgtgaggtggcgcggaaactgggcacggatgacagggaagtggtattgttcctcctaaacgtgttcatacctcaacccacactggcccaattaattggagctcttagagctttaaaggaggagggcaggttaacgtttcccctgttagcggaatgtctgtttcgtgcaggtcgcagagacctcttgcgcgacctgcttcacttagacccgcgttttttagagcgccacctagcgggcacaatgagttatttcagcccttatcagctcactgttctccacgtagacggggagctgtgtgcgagggatattaggtctttgatatttttaagcaaggacactatagggtctcgcagcacaccacagacattcttacactgggtgtactgtatggaaaacttagacctactgggtcccactgacgtggatgccctaatgtcaatgcttagatctttgtcaagagtagacctacagcgccaagtgcaaaccctaatgggccttcacctttccggcccatcacactcccaacactatcgccatacaccactcgagaccgatttctacgactacaaggacgacgatgacaagactagtggctccggcgagggcagaggaagtctactaacctgcggagatgtggaagaaaatcctggcccacatatgaccgagtacaagcccacggtgcgcctcgccacccgcgacgacgtccccagggccgtacgcaccctcgccgccgcgttcgccgactaccccgccacgcgccacaccgtcgatccggaccgccacatcgagcgggtcaccgagctgcaagaactcttcctcacgcgcgtcgggctcgacatcggcaaggtgtgggtcgcggacgacggcgccgcggtggcggtctggaccacgccggagagcgtcgaagcgggggcggtgttcgccgagatcggcccgcgcatggccgagttgagcggttcccggctggccgcgcagcaacagatggaaggcctcctggcgccgcaccggcccaaggagcccgcgtggttcctggccaccgtcggcgtctcgcccgaccaccagggcaagggtctgggcagcgccgtcgtgctccccggagtggaggcggccgagcgcgccggggtgcccgccttcctggagacctccgcgccccgcaacctccccttctacgagcggctcggcttcaccgtcaccgccgacgtcgaggtgcccgaaggaccgcgcacctggtgcatgacccgcaagcccggtgcctga

SEQ ID NO: 1453 - DNA, 2838 bp, Artificial Sequence
  Synthetic Polynucleotides
atggccttaccagtgaccgccttgctcctgccgctggccttgctgctccacgccgccaggccggacatcgtgatgacacagacccctgccatcatgagcgcctctccaggccagaaagtgaccatcacatgtagcgccagcagcagcgtgaactacatgcactggtatcagcagaagctgggcagcagccccaagctgtggatctacgataccagcaaactggcccctggcgtgccagccagattttctggttctggcagcggcaccagctacagcctgacaatcagcagcatggaagccgaggatgccgccagctacttctgccatcagtggtctagctacccctacacctttggctccggcaccaagctggaaatcaaaggcggaggcggaagtggaggcggaggatctggcggcggaggctctgaagttcagctccaagagtctggccccgacctggtcaagcctagccaaagcctgagcctgacctgtaccgtgaccggctacagcatcacaagcggctatggatggcactggatcagacagttccccggcaacaaactggaatggatgggctacatccactacagcggcagcaccacctacaatcccagcctgaagtcccggatcagcatcagcagagacaccagcaagaaccagttcttcctgcaactgaacagcgtgaccaccgaggacaccgccacctactattgtgctcggagcctgagatattggggccagggcacaaccctgaccgtgtcatctacgcgtgagcagaaactgatctcggaagaggatctggcgaagcccaccacgacgccagcgccgcgaccaccaacaccggcgcccaccatcgcgtcgcagcccctgtccctgcgcccagaggcgtgccggccagcggcggggggcgcagtgcacacgagggggctggacttcgcctgtgacatctacatctgggcgcccttggccgggacttgtggggtccttctcctgtcactggttatcaccctttactgcaaacggggcagaaagaaactcctgtatatattcaaacaaccatttatgagaccagtacaaactactcaagaggaagatggctgtagctgccgatttccagaagaagaagaaggaggatgtgaactgagagtgaagttcagcaggagcgcagacgcccccgcgtaccagcagggccagaaccagctctataacgagctgaatctaggacgaagagaggagtacgatgttttggacaagagacgtggccgggaccctgagatggggggaaagccgagaaggaagaaccctcaggaaggcctgtacaatgaactgcagaaagataagatggcggaggcctacagtgagattgggatgaaaggcgagcgccggaggggcaaggggcacgatggcctttaccagggtctcagtacagccaccaaggacacctacgacgcccttcacatgcaggccctgccccctcgctctagaggatctggagcaacaaacttctcactactcaaacaagcaggtgacgtggaggagaatcccgggcctgggatccacatggccacttacgaggttctctgtgaggtggcgcggaaactgggcacggatgacagggaagtggtattgttcctcctaaacgtgttcatacctcaacccacactggcccaattaattggagctcttagagctttaaaggaggagggcaggttaacgtttcccctgttagcggaatgtctgtttcgtgcaggtcgcagagacctcttgcgcgacctgcttcacttagacccgcgttttttagagcgccacctagcgggcacaatgagttatttcagcccttatcagctcactgttctccacgtagacggggagctgtgtgcgagggatattaggtctttgatatttttaagcaaggacactatagggtctcgcagcacaccacagacattcttacactgggtgtactgtatggaaaacttagacctactgggtcccactgacgtggatgccctaatgtcaatgcttagatctttgtcaagagtagacctacagcgccaagtgcaaaccctaatgggccttcacctttccggcccatcacactcccaacactatcgccatacaccactcgagaccgatttctacgactacaaggacgacgatgacaagactagtggctccggcgagggcagaggaagtctactaacctgcggagatgtggaagaaaatcctggcccacatatgaccgagtacaagcccacggtgcgcctcgccacccgcgacgacgtccccagggccgtacgcaccctcgccgccgcgttcgccgactaccccgccacgcgccacaccgtcgatccggaccgccacatcgagcgggtcaccgagctgcaagaactcttcctcacgcgcgtcgggctcgacatcggcaaggtgtgggtcgcggacgacggcgccgcggtggcggtctggaccacgccggagagcgtcgaagcgggggcggtgttcgccgagatcggcccgcgcatggccgagttgagcggttcccggctggccgcgcagcaacagatggaaggcctcctggcgccgcaccggcccaaggagcccgcgtggttcctggccaccgtcggcgtctcgcccgaccaccagggcaagggtctgggcagcgccgtcgtgctccccggagtggaggcggccgagcgcgccggggtgcccgccttcctggagacctccgcgccccgcaacctccccttctacgagcggctcggcttcaccgtcaccgccgacgtcgaggtgcccgaaggaccgcgcacctggtgcatgacccgcaagcccggtgcctga

SEQ ID NO: 1454 - DNA, 2847 bp, Artificial Sequence
  Synthetic Polynucleotides
atggccttaccagtgaccgccttgctcctgccgctggccttgctgctccacgccgccaggccggacatccagatgacacagagccctagcagcctgtctgccagcgtgggagacagagtgaccatcacctgtagcgccaccagcagcatcagctacatgcactggtatcagcagaagcccggcaaggcccctaaaggctggatctacgataccagcaaactggcccacggcgtgcccagcagattttctggttctggcagcggcaccgacttcaccctgacaatatctagcctccagcctgaggacttcgccacctactactgccaccagagaagaagctaccccttcaccttcggccagggcaccaaggtggaaatcaaaggcggaggcggaagtggaggcggaggatctggcggcggaggctctgaagtgcaactggttcagagcggagccgaagtgaagaaacctggggcctctgtgaaggtgtcctgcaaggcttccggctacacctttaccaatttctggattcactgggtccgacaggctccaggccaaggactggaatggatcggagagatcgaccccagcgacagctacaccaactacaaccagaaattcaaaggccgggtcaccatcaccagagacaccagcacaagcaccgcctacctggaactgagcagcctgagaagcgaggacaccgccgtgtactactgcgccagggaaatcaccaccgtggattattggggccagggaaccctggtcaccgtgtcatctacgcgtgagcagaaactgatctcggaagaggatctggcgaagcccaccacgacgccagcgccgcgaccaccaacaccggcgcccaccatcgcgtcgcagcccctgtccctgcgcccagaggcgtgccggccagcggcggggggcgcagtgcacacgagggggctggacttcgcctgtgacatctacatctgggcgcccttggccgggacttgtggggtccttctcctgtcactggttatcaccctttactgcaaacggggcagaaagaaactcctgtatatattcaaacaaccatttatgagaccagtacaaactactcaagaggaagatggctgtagctgccgatttccagaagaagaagaaggaggatgtgaactgagagtgaagttcagcaggagcgcagacgcccccgcgtaccagcagggccagaaccagctctataacgagctgaatctaggacgaagagaggagtacgatgttttggacaagagacgtggccgggaccctgagatggggggaaagccgagaaggaagaaccctcaggaaggcctgtacaatgaactgcagaaagataagatggcggaggcctacagtgagattgggatgaaaggcgagcgccggaggggcaaggggcacgatggcctttaccagggtctcagtacagccaccaaggacacctacgacgcccttcacatgcaggccctgccccctcgctctagaggatctggagcaacaaacttctcactactcaaacaagcaggtgacgtggaggagaatcccgggcctgggatccacatggccacttacgaggttctctgtgaggtggcgcggaaactgggcacggatgacagggaagtggtattgttcctcctaaacgtgttcatacctcaacccacactggcccaattaattggagctcttagagctttaaaggaggagggcaggttaacgtttcccctgttagcggaatgtctgtttcgtgcaggtcgcagagacctcttgcgcgacctgcttcacttagacccgcgttttttagagcgccacctagcgggcacaatgagttatttcagcccttatcagctcactgttctccacgtagacggggagctgtgtgcgagggatattaggtctttgatatttttaagcaaggacactatagggtctcgcagcacaccacagacattcttacactgggtgtactgtatggaaaacttagacctactgggtcccactgacgtggatgccctaatgtcaatgcttagatctttgtcaagagtagacctacagcgccaagtgcaaaccctaatgggccttcacctttccggcccatcacactcccaacactatcgccatacaccactcgagaccgatttctacgactacaaggacgacgatgacaagactagtggctccggcgagggcagaggaagtctactaacctgcggagatgtggaagaaaatcctggcccacatatgaccgagtacaagcccacggtgcgcctcgccacccgcgacgacgtccccagggccgtacgcaccctcgccgccgcgttcgccgactaccccgccacgcgccacaccgtcgatccggaccgccacatcgagcgggtcaccgagctgcaagaactcttcctcacgcgcgtcgggctcgacatcggcaaggtgtgggtcgcggacgacggcgccgcggtggcggtctggaccacgccggagagcgtcgaagcgggggcggtgttcgccgagatcggcccgcgcatggccgagttgagcggttcccggctggccgcgcagcaacagatggaaggcctcctggcgccgcaccggcccaaggagcccgcgtggttcctggccaccgtcggcgtctcgcccgaccaccagggcaagggtctgggcagcgccgtcgtgctccccggagtggaggcggccgagcgcgccggggtgcccgccttcctggagacctccgcgccccgcaacctccccttctacgagcggctcggcttcaccgtcaccgccgacgtcgaggtgcccgaaggaccgcgcacctggtgcatgacccgcaagcccggtgcctga

SEQ ID NO: 1455 - DNA, 2868 bp, Artificial Sequence
  Synthetic Polynucleotides
atggccttaccagtgaccgccttgctcctgccgctggccttgctgctccacgccgccaggccggacatccagatgacacagagccctagcagcctgtctgccagcgtgggagacagagtgaccatcacatgcaaggccagccagggcttcaacaaatacgtggcctggtatcagcagaagcccggcaaggctcctaagctgctgatctactacaccagcacactccagcctggcgtgcccagcagattttctggctctggcagcggcagagactacaccctgacaatatccagcctccagccagaggacttcgccacctactactgtctccagtacggcaacctgctgtacgcctttggacagggcaccaaggtggaaatcaagagaggcggaggcggaagtggaggcggaggatctggcggcggaggctctgaagttcagcttgtgcagagcggagccgaagtgaagaaacctggggcctctgtgaaggtgtcctgcaaagccagcggctacacctttaccagctactggatcggctgggtccgacaggctcctggacaaggactggaatggatcggcgacatctatcccggcggaggctacaccaactacaacgagaagttcaagggccgcgtgacaatcaccagagacacctctacaagcaccgcctacctggaactgagcagcctgagaagcgaggacaccgccgtgtactactgcgccagactggatggcagcagctacagaggcgctatggattcttggggccagggcacactggtcaccgtttcttctacgcgtgagcagaaactgatctcggaagaggatctggcgaagcccaccacgacgccagcgccgcgaccaccaacaccggcgcccaccatcgcgtcgcagcccctgtccctgcgcccagaggcgtgccggccagcggcggggggcgcagtgcacacgagggggctggacttcgcctgtgacatctacatctgggcgcccttggccgggacttgtggggtccttctcctgtcactggttatcaccctttactgcaaacggggcagaaagaaactcctgtatatattcaaacaaccatttatgagaccagtacaaactactcaagaggaagatggctgtagctgccgatttccagaagaagaagaaggaggatgtgaactgagagtgaagttcagcaggagcgcagacgcccccgcgtaccagcagggccagaaccagctctataacgagctgaatctaggacgaagagaggagtacgatgttttggacaagagacgtggccgggaccctgagatggggggaaagccgagaaggaagaaccctcaggaaggcctgtacaatgaactgcagaaagataagatggcggaggcctacagtgagattgggatgaaaggcgagcgccggaggggcaaggggcacgatggcctttaccagggtctcagtacagccaccaaggacacctacgacgcccttcacatgcaggccctgccccctcgctctagaggatctggagcaacaaacttctcactactcaaacaagcaggtgacgtggaggagaatcccgggcctgggatccacatggccacttacgaggttctctgtgaggtggcgcggaaactgggcacggatgacagggaagtggtattgttcctcctaaacgtgttcatacctcaacccacactggcccaattaattggagctcttagagctttaaaggaggagggcaggttaacgtttcccctgttagcggaatgtctgtttcgtgcaggtcgcagagacctcttgcgcgacctgcttcacttagacccgcgttttttagagcgccacctagcgggcacaatgagttatttcagcccttatcagctcactgttctccacgtagacggggagctgtgtgcgagggatattaggtctttgatatttttaagcaaggacactatagggtctcgcagcacaccacagacattcttacactgggtgtactgtatggaaaacttagacctactgggtcccactgacgtggatgccctaatgtcaatgcttagatctttgtcaagagtagacctacagcgccaagtgcaaaccctaatgggccttcacctttccggcccatcacactcccaacactatcgccatacaccactcgagaccgatttctacgactacaaggacgacgatgacaagactagtggctccggcgagggcagaggaagtctactaacctgcggagatgtggaagaaaatcctggcccacatatgaccgagtacaagcccacggtgcgcctcgccacccgcgacgacgtccccagggccgtacgcaccctcgccgccgcgttcgccgactaccccgccacgcgccacaccgtcgatccggaccgccacatcgagcgggtcaccgagctgcaagaactcttcctcacgcgcgtcgggctcgacatcggcaaggtgtgggtcgcggacgacggcgccgcggtggcggtctggaccacgccggagagcgtcgaagcgggggcggtgttcgccgagatcggcccgcgcatggccgagttgagcggttcccggctggccgcgcagcaacagatggaaggcctcctggcgccgcaccggcccaaggagcccgcgtggttcctggccaccgtcggcgtctcgcccgaccaccagggcaagggtctgggcagcgccgtcgtgctccccggagtggaggcggccgagcgcgccggggtgcccgccttcctggagacctccgcgccccgcaacctccccttctacgagcggctcggcttcaccgtcaccgccgacgtcgaggtgcccgaaggaccgcgcacctggtgcatgacccgcaagcccggtgcctga

SEQ ID NO: 1456 - DNA, 2880 bp, Artificial Sequence
  Synthetic Polynucleotides
atggccttaccagtgaccgccttgctcctgccgctggccttgctgctccacgccgccaggccggacatccagctcacacagagcccttctagcctgtctgccagcgtgggcgacagagtgaccatcacatgtagagccagccagagcgtggactacgacggcgacagctacatgaactggtatcagcagaagcccggcaaggcccctaagctgctgatctacgccgccagctatctggaaagcggcgtgccaagcagattttccggctctggcagcggcaccgatttcaccctgacaatatccagcctccagcctgaggacttcgccacctactactgccagcagagccatgaggacccctacacctttggacagggcaccaaggtggaaatcaagagaggcggaggcggaagtggaggcggaggatctggcggcggaggctctgaagtgcaactggttgaatctggcggcggactggttcagcctggcggatctctgagactgagctgtgccgtgtctggctacagcatcaccagcggctactcttggaactggatcagacaggcccctggcaaaggactggaatgggtcgcctccatcacctacgatggcagcaccaactacaaccccagcgtgaagggcagaatcaccatcagcagggacgacagcaagaacaccttctacctgcaaatgaacagcctgagagccgaggacaccgccgtgtactattgtgccagaggcagccactacttcggccactggcattttgctgtgtggggccagggaaccctggtcacagtttcttctacgcgtgagcagaaactgatctcggaagaggatctggcgaagcccaccacgacgccagcgccgcgaccaccaacaccggcgcccaccatcgcgtcgcagcccctgtccctgcgcccagaggcgtgccggccagcggcggggggcgcagtgcacacgagggggctggacttcgcctgtgacatctacatctgggcgcccttggccgggacttgtggggtccttctcctgtcactggttatcaccctttactgcaaacggggcagaaagaaactcctgtatatattcaaacaaccatttatgagaccagtacaaactactcaagaggaagatggctgtagctgccgatttccagaagaagaagaaggaggatgtgaactgagagtgaagttcagcaggagcgcagacgcccccgcgtaccagcagggccagaaccagctctataacgagctgaatctaggacgaagagaggagtacgatgttttggacaagagacgtggccgggaccctgagatggggggaaagccgagaaggaagaaccctcaggaaggcctgtacaatgaactgcagaaagataagatggcggaggcctacagtgagattgggatgaaaggcgagcgccggaggggcaaggggcacgatggcctttaccagggtctcagtacagccaccaaggacacctacgacgcccttcacatgcaggccctgccccctcgctctagaggatctggagcaacaaacttctcactactcaaacaagcaggtgacgtggaggagaatcccgggcctgggatccacatggccacttacgaggttctctgtgaggtggcgcggaaactgggcacggatgacagggaagtggtattgttcctcctaaacgtgttcatacctcaacccacactggcccaattaattggagctcttagagctttaaaggaggagggcaggttaacgtttcccctgttagcggaatgtctgtttcgtgcaggtcgcagagacctcttgcgcgacctgcttcacttagacccgcgttttttagagcgccacctagcgggcacaatgagttatttcagcccttatcagctcactgttctccacgtagacggggagctgtgtgcgagggatattaggtctttgatatttttaagcaaggacactatagggtctcgcagcacaccacagacattcttacactgggtgtactgtatggaaaacttagacctactgggtcccactgacgtggatgccctaatgtcaatgcttagatctttgtcaagagtagacctacagcgccaagtgcaaaccctaatgggccttcacctttccggcccatcacactcccaacactatcgccatacaccactcgagaccgatttctacgactacaaggacgacgatgacaagactagtggctccggcgagggcagaggaagtctactaacctgcggagatgtggaagaaaatcctggcccacatatgaccgagtacaagcccacggtgcgcctcgccacccgcgacgacgtccccagggccgtacgcaccctcgccgccgcgttcgccgactaccccgccacgcgccacaccgtcgatccggaccgccacatcgagcgggtcaccgagctgcaagaactcttcctcacgcgcgtcgggctcgacatcggcaaggtgtgggtcgcggacgacggcgccgcggtggcggtctggaccacgccggagagcgtcgaagcgggggcggtgttcgccgagatcggcccgcgcatggccgagttgagcggttcccggctggccgcgcagcaacagatggaaggcctcctggcgccgcaccggcccaaggagcccgcgtggttcctggccaccgtcggcgtctcgcccgaccaccagggcaagggtctgggcagcgccgtcgtgctccccggagtggaggcggccgagcgcgccggggtgcccgccttcctggagacctccgcgccccgcaacctccccttctacgagcggctcggcttcaccgtcaccgccgacgtcgaggtgcccgaaggaccgcgcacctggtgcatgacccgcaagcccggtgcctga

SEQ ID NO: 1457 - DNA, 2856 bp, Artificial Sequence
  Synthetic Polynucleotides
atggccttaccagtgaccgccttgctcctgccgctggccttgctgctccacgccgccaggccggacatccagatgacacagagccctagcagcctgtctgccagcgtgggagacagagtgaccatcacctgtagagccagccaggacatccggtactacctgaactggtatcagcagaagcccggcaaggcccctaagctgctgatctatgtggcctccagcctccagagcggagtgccttctagattttctggcagcggctccggcaccgagtttaccctgacagtgtctagcttgcagcccgaggacttcgccacctactactgcctgcaagtgtacagcacccctcggacctttggacagggcaccaaggtggaaatcaaaggcggaggcggaagtggaggcggaggatctggcggcggaggctctgaagtgcagcttgttgaatctggcggcggactggctaagcctggcggatctctgagactgtcttgtgccgccagcggcttccggttcaccttcaacaactactacatggactgggtccgacaggcccctggacaaggacttgaatgggtgtccagaatcagcagcagcggcgaccctacttggtacgccgattctgtgaagggcagattcaccatcagcagagagaacgccaagaacaccctgttcctccagatgaactccctgagagccgaggacaccgccgtgtactattgtgcctctctgaccaccggcagcgattcttggggacagggcgtgctggttaccgtgtcatctacgcgtgagcagaaactgatctcggaagaggatctggcgaagcccaccacgacgccagcgccgcgaccaccaacaccggcgcccaccatcgcgtcgcagcccctgtccctgcgcccagaggcgtgccggccagcggcggggggcgcagtgcacacgagggggctggacttcgcctgtgacatctacatctgggcgcccttggccgggacttgtggggtccttctcctgtcactggttatcaccctttactgcaaacggggcagaaagaaactcctgtatatattcaaacaaccatttatgagaccagtacaaactactcaagaggaagatggctgtagctgccgatttccagaagaagaagaaggaggatgtgaactgagagtgaagttcagcaggagcgcagacgcccccgcgtaccagcagggccagaaccagctctataacgagctgaatctaggacgaagagaggagtacgatgttttggacaagagacgtggccgggaccctgagatggggggaaagccgagaaggaagaaccctcaggaaggcctgtacaatgaactgcagaaagataagatggcggaggcctacagtgagattgggatgaaaggcgagcgccggaggggcaaggggcacgatggcctttaccagggtctcagtacagccaccaaggacacctacgacgcccttcacatgcaggccctgccccctcgctctagaggatctggagcaacaaacttctcactactcaaacaagcaggtgacgtggaggagaatcccgggcctgggatccacatggccacttacgaggttctctgtgaggtggcgcggaaactgggcacggatgacagggaagtggtattgttcctcctaaacgtgttcatacctcaacccacactggcccaattaattggagctcttagagctttaaaggaggagggcaggttaacgtttcccctgttagcggaatgtctgtttcgtgcaggtcgcagagacctcttgcgcgacctgcttcacttagacccgcgttttttagagcgccacctagcgggcacaatgagttatttcagcccttatcagctcactgttctccacgtagacggggagctgtgtgcgagggatattaggtctttgatatttttaagcaaggacactatagggtctcgcagcacaccacagacattcttacactgggtgtactgtatggaaaacttagacctactgggtcccactgacgtggatgccctaatgtcaatgcttagatctttgtcaagagtagacctacagcgccaagtgcaaaccctaatgggccttcacctttccggcccatcacactcccaacactatcgccatacaccactcgagaccgatttctacgactacaaggacgacgatgacaagactagtggctccggcgagggcagaggaagtctactaacctgcggagatgtggaagaaaatcctggcccacatatgaccgagtacaagcccacggtgcgcctcgccacccgcgacgacgtccccagggccgtacgcaccctcgccgccgcgttcgccgactaccccgccacgcgccacaccgtcgatccggaccgccacatcgagcgggtcaccgagctgcaagaactcttcctcacgcgcgtcgggctcgacatcggcaaggtgtgggtcgcggacgacggcgccgcggtggcggtctggaccacgccggagagcgtcgaagcgggggcggtgttcgccgagatcggcccgcgcatggccgagttgagcggttcccggctggccgcgcagcaacagatggaaggcctcctggcgccgcaccggcccaaggagcccgcgtggttcctggccaccgtcggcgtctcgcccgaccaccagggcaagggtctgggcagcgccgtcgtgctccccggagtggaggcggccgagcgcgccggggtgcccgccttcctggagacctccgcgccccgcaacctccccttctacgagcggctcggcttcaccgtcaccgccgacgtcgaggtgcccgaaggaccgcgcacctggtgcatgacccgcaagcccggtgcctga

SEQ ID NO: 1458 - DNA, 2859 bp, Artificial Sequence
  Synthetic Polynucleotides
atggccttaccagtgaccgccttgctcctgccgctggccttgctgctccacgccgccaggccggagatcgtgatgacacagagccccgccacactgagtgtgtctccaggcgaaagagccacactgtcctgtagagccagccagagcgtgtccagaaacctggcctggtatcagcagaagcctggacaggctccccggctgttgatctacggcgcttctacaagagccaccggcattcccgccagattttctggctctggcagcggcaccgagttcaccctgacaatcggaagcctccagagcgaggacttcgccgtgtactactgccagcagtacaagacctggcctcggacctttggacagggcaccaacgtggaaatcaaaggcggaggcggaagtggaggcggaggatctggcggcggaggctctcaagttcagctgcaacaatggggagccggcctgctgaagcctagcgaaacactgtctctgacctgcgccgtgttcggcggctctttcagcggctactactggtcctggatcagacagcctcctggcaaaggactggaatggatcggcgagatcaaccaccggggcaacaccaacgacaaccccagcctgaaaagcagagtgaccatcagcgtggacaccagcaagaaccagttcgccctgaagctgagcagcgtgacagccgctgataccgccgtgtattattgcgccagagagcggggctacacctacggcaatttcgatcactggggccagggcaccctggtcacagtttcttctacgcgtgagcagaaactgatctcggaagaggatctggcgaagcccaccacgacgccagcgccgcgaccaccaacaccggcgcccaccatcgcgtcgcagcccctgtccctgcgcccagaggcgtgccggccagcggcggggggcgcagtgcacacgagggggctggacttcgcctgtgacatctacatctgggcgcccttggccgggacttgtggggtccttctcctgtcactggttatcaccctttactgcaaacggggcagaaagaaactcctgtatatattcaaacaaccatttatgagaccagtacaaactactcaagaggaagatggctgtagctgccgatttccagaagaagaagaaggaggatgtgaactgagagtgaagttcagcaggagcgcagacgcccccgcgtaccagcagggccagaaccagctctataacgagctgaatctaggacgaagagaggagtacgatgttttggacaagagacgtggccgggaccctgagatggggggaaagccgagaaggaagaaccctcaggaaggcctgtacaatgaactgcagaaagataagatggcggaggcctacagtgagattgggatgaaaggcgagcgccggaggggcaaggggcacgatggcctttaccagggtctcagtacagccaccaaggacacctacgacgcccttcacatgcaggccctgccccctcgctctagaggatctggagcaacaaacttctcactactcaaacaagcaggtgacgtggaggagaatcccgggcctgggatccacatggccacttacgaggttctctgtgaggtggcgcggaaactgggcacggatgacagggaagtggtattgttcctcctaaacgtgttcatacctcaacccacactggcccaattaattggagctcttagagctttaaaggaggagggcaggttaacgtttcccctgttagcggaatgtctgtttcgtgcaggtcgcagagacctcttgcgcgacctgcttcacttagacccgcgttttttagagcgccacctagcgggcacaatgagttatttcagcccttatcagctcactgttctccacgtagacggggagctgtgtgcgagggatattaggtctttgatatttttaagcaaggacactatagggtctcgcagcacaccacagacattcttacactgggtgtactgtatggaaaacttagacctactgggtcccactgacgtggatgccctaatgtcaatgcttagatctttgtcaagagtagacctacagcgccaagtgcaaaccctaatgggccttcacctttccggcccatcacactcccaacactatcgccatacaccactcgagaccgatttctacgactacaaggacgacgatgacaagactagtggctccggcgagggcagaggaagtctactaacctgcggagatgtggaagaaaatcctggcccacatatgaccgagtacaagcccacggtgcgcctcgccacccgcgacgacgtccccagggccgtacgcaccctcgccgccgcgttcgccgactaccccgccacgcgccacaccgtcgatccggaccgccacatcgagcgggtcaccgagctgcaagaactcttcctcacgcgcgtcgggctcgacatcggcaaggtgtgggtcgcggacgacggcgccgcggtggcggtctggaccacgccggagagcgtcgaagcgggggcggtgttcgccgagatcggcccgcgcatggccgagttgagcggttcccggctggccgcgcagcaacagatggaaggcctcctggcgccgcaccggcccaaggagcccgcgtggttcctggccaccgtcggcgtctcgcccgaccaccagggcaagggtctgggcagcgccgtcgtgctccccggagtggaggcggccgagcgcgccggggtgcccgccttcctggagacctccgcgccccgcaacctccccttctacgagcggctcggcttcaccgtcaccgccgacgtcgaggtgcccgaaggaccgcgcacctggtgcatgacccgcaagcccggtgcctga

SEQ ID NO: 1459 - DNA, 2862 bp, Artificial Sequence
  Synthetic Polynucleotides
atggccttaccagtgaccgccttgctcctgccgctggccttgctgctccacgccgccaggccggagatcgtgatgacccctagcagcgccacactgagtgtgtctccaggcgaaagagccacactgtcctgtagagccagccagagcgtgtccagaaacctggcctggtatcagcagaagcctggacaggctccccggctgttgatctacggcgcttctacaagagccaccggcattcccgccagattttctggctctggcagcggcaccgagttcaccctgacaatctctagcctccagagcgaggacttcgccgtgtactactgccaccagtacagcaactggatgtgcagcttcggccagggcaccaagctggaaatcaaaggcggaggcggaagtggaggcggaggatctggcggcggaggctctgaagttcagctccttgagtcaggtggcggcctggttcaacctggcggatctctgagactgagctgtgccgccagcggcttcacctttagcagatacgccatgaactgggtccgacaggcccctggcaaaggactggaatgggtgtccggcatctctggaagcggcggcagaacctactacgccgattctgtgaagggcagattcaccatcagccgggacaacagcaagaacaccctgtacctccagatgaacagcctgagagccgaggacacagccgtgtattattgcgccaaggaccgggacttttggagcggcccttttgactattggggccagggaaccctggtcaccgttagctctacgcgtgagcagaaactgatctcggaagaggatctggcgaagcccaccacgacgccagcgccgcgaccaccaacaccggcgcccaccatcgcgtcgcagcccctgtccctgcgcccagaggcgtgccggccagcggcggggggcgcagtgcacacgagggggctggacttcgcctgtgacatctacatctgggcgcccttggccgggacttgtggggtccttctcctgtcactggttatcaccctttactgcaaacggggcagaaagaaactcctgtatatattcaaacaaccatttatgagaccagtacaaactactcaagaggaagatggctgtagctgccgatttccagaagaagaagaaggaggatgtgaactgagagtgaagttcagcaggagcgcagacgcccccgcgtaccagcagggccagaaccagctctataacgagctgaatctaggacgaagagaggagtacgatgttttggacaagagacgtggccgggaccctgagatggggggaaagccgagaaggaagaaccctcaggaaggcctgtacaatgaactgcagaaagataagatggcggaggcctacagtgagattgggatgaaaggcgagcgccggaggggcaaggggcacgatggcctttaccagggtctcagtacagccaccaaggacacctacgacgcccttcacatgcaggccctgccccctcgctctagaggatctggagcaacaaacttctcactactcaaacaagcaggtgacgtggaggagaatcccgggcctgggatccacatggccacttacgaggttctctgtgaggtggcgcggaaactgggcacggatgacagggaagtggtattgttcctcctaaacgtgttcatacctcaacccacactggcccaattaattggagctcttagagctttaaaggaggagggcaggttaacgtttcccctgttagcggaatgtctgtttcgtgcaggtcgcagagacctcttgcgcgacctgcttcacttagacccgcgttttttagagcgccacctagcgggcacaatgagttatttcagcccttatcagctcactgttctccacgtagacggggagctgtgtgcgagggatattaggtctttgatatttttaagcaaggacactatagggtctcgcagcacaccacagacattcttacactgggtgtactgtatggaaaacttagacctactgggtcccactgacgtggatgccctaatgtcaatgcttagatctttgtcaagagtagacctacagcgccaagtgcaaaccctaatgggccttcacctttccggcccatcacactcccaacactatcgccatacaccactcgagaccgatttctacgactacaaggacgacgatgacaagactagtggctccggcgagggcagaggaagtctactaacctgcggagatgtggaagaaaatcctggcccacatatgaccgagtacaagcccacggtgcgcctcgccacccgcgacgacgtccccagggccgtacgcaccctcgccgccgcgttcgccgactaccccgccacgcgccacaccgtcgatccggaccgccacatcgagcgggtcaccgagctgcaagaactcttcctcacgcgcgtcgggctcgacatcggcaaggtgtgggtcgcggacgacggcgccgcggtggcggtctggaccacgccggagagcgtcgaagcgggggcggtgttcgccgagatcggcccgcgcatggccgagttgagcggttcccggctggccgcgcagcaacagatggaaggcctcctggcgccgcaccggcccaaggagcccgcgtggttcctggccaccgtcggcgtctcgcccgaccaccagggcaagggtctgggcagcgccgtcgtgctccccggagtggaggcggccgagcgcgccggggtgcccgccttcctggagacctccgcgccccgcaacctccccttctacgagcggctcggcttcaccgtcaccgccgacgtcgaggtgcccgaaggaccgcgcacctggtgcatgacccgcaagcccggtgcctga

SEQ ID NO: 1460 - DNA, 2862 bp, Artificial Sequence; identical to SEQ ID NO: 1459
  Synthetic Polynucleotides

SEQ ID NO: 1461 - DNA, 2868 bp, Artificial Sequence
  Synthetic Polynucleotides
atggccttaccagtgaccgccttgctcctgccgctggccttgctgctccacgccgccaggccgcaggttcagctccagcagtctgatgccgagctggtcaagcctggcagcagcgtgaagattagctgcaaggccagcggctacaccttcaccgatcacgccatccactgggtcaagcagaagcctgagcagggcctcgaatggatcggccactttagccctggcaacaccgacatcaagtacaacgacaagttcaagggcaaagccacactgaccgtggacagaagcagcagcacagcctacatgcagctgaacagcctgaccagcgaggacagcgccgtgtacttctgcaagaccagcaccttctttttcgactactggggccagggcacaaccctgacagtttcttctggcggaggcggaagtggaggcggaggatctggcggcggaggctctgaactggttatgacacagagccccagcagcctgacagtgacagccggcgagaaagtgaccatgatctgcaagtctagccagagcctgctgaactccggcgatcagaagaactacctgacctggtatcagcagaaacccggccagcctcctaagctgctgatcttctgggccagcaccagagaaagcggcgtgcccgatagattcacaggcagcggcagcggaaccgacttcaccctgacaatcagctctgtgcaggccgaggacctggccgtgtattactgccagaacgactacagctaccctctgacctttggagccggcaccaagctggaactgaagacgcgtgagcagaaactgatctcggaagaggatctggcgaagcccaccacgacgccagcgccgcgaccaccaacaccggcgcccaccatcgcgtcgcagcccctgtccctgcgcccagaggcgtgccggccagcggcggggggcgcagtgcacacgagggggctggacttcgcctgtgacatctacatctgggcgcccttggccgggacttgtggggtccttctcctgtcactggttatcaccctttactgcaaacggggcagaaagaaactcctgtatatattcaaacaaccatttatgagaccagtacaaactactcaagaggaagatggctgtagctgccgatttccagaagaagaagaaggaggatgtgaactgagagtgaagttcagcaggagcgcagacgcccccgcgtaccagcagggccagaaccagctctataacgagctgaatctaggacgaagagaggagtacgatgttttggacaagagacgtggccgggaccctgagatggggggaaagccgagaaggaagaaccctcaggaaggcctgtacaatgaactgcagaaagataagatggcggaggcctacagtgagattgggatgaaaggcgagcgccggaggggcaaggggcacgatggcctttaccagggtctcagtacagccaccaaggacacctacgacgcccttcacatgcaggccctgccccctcgctctagaggatctggagcaacaaacttctcactactcaaacaagcaggtgacgtggaggagaatcccgggcctgggatccacatggccacttacgaggttctctgtgaggtggcgcggaaactgggcacggatgacagggaagtggtattgttcctcctaaacgtgttcatacctcaacccacactggcccaattaattggagctcttagagctttaaaggaggagggcaggttaacgtttcccctgttagcggaatgtctgtttcgtgcaggtcgcagagacctcttgcgcgacctgcttcacttagacccgcgttttttagagcgccacctagcgggcacaatgagttatttcagcccttatcagctcactgttctccacgtagacggggagctgtgtgcgagggatattaggtctttgatatttttaagcaaggacactatagggtctcgcagcacaccacagacattcttacactgggtgtactgtatggaaaacttagacctactgggtcccactgacgtggatgccctaatgtcaatgcttagatctttgtcaagagtagacctacagcgccaagtgcaaaccctaatgggccttcacctttccggcccatcacactcccaacactatcgccatacaccactcgagaccgatttctacgactacaaggacgacgatgacaagactagtggctccggcgagggcagaggaagtctactaacctgcggagatgtggaagaaaatcctggcccacatatgaccgagtacaagcccacggtgcgcctcgccacccgcgacgacgtccccagggccgtacgcaccctcgccgccgcgttcgccgactaccccgccacgcgccacaccgtcgatccggaccgccacatcgagcgggtcaccgagctgcaagaactcttcctcacgcgcgtcgggctcgacatcggcaaggtgtgggtcgcggacgacggcgccgcggtggcggtctggaccacgccggagagcgtcgaagcgggggcggtgttcgccgagatcggcccgcgcatggccgagttgagcggttcccggctggccgcgcagcaacagatggaaggcctcctggcgccgcaccggcccaaggagcccgcgtggttcctggccaccgtcggcgtctcgcccgaccaccagggcaagggtctgggcagcgccgtcgtgctccccggagtggaggcggccgagcgcgccggggtgcccgccttcctggagacctccgcgccccgcaacctccccttctacgagcggctcggcttcaccgtcaccgccgacgtcgaggtgcccgaaggaccgcgcacctggtgcatgacccgcaagcccggtgcctga

SEQ ID NO: 1462 - DNA, 2871 bp, Artificial Sequence
  Synthetic Polynucleotides
atggccttaccagtgaccgccttgctcctgccgctggccttgctgctccacgccgccaggccggaggtgcaactggttgagtctggcggaggactggtgcagcctggaagaagcctgagactgtcttgtgccgccagcggcttcaccttcgacgattatgccatgcactgggtccgacaggcccctggcaaaggacttgaatgggtgtccggcatctcctggaacagcggctctatcggctacgccgattccgtgaagggcagattcaccatcagccgggacaacgccaagaacagcctgtacctccagatgaactccctgagagccgaggacacagccctgtactactgcgccaaagacaaaggcggaggctactacgacttttggagcggcagcgattattggggccagggcacactggtcacagtgtctagcggcggaggcggaagtggaggcggaggatctggcggcggaggctcttcttctgagctgacacaggaccctgccgtgtctgttgctctgggccagacagtgcggattacctgtcagggcgatagcctgagaagctactacgcctcctggtatcagcagaagccaggccaggctcctgtgctggtcatctacggcaagaacaacagacccagcggcatccccgatagattcagcggaagcagctctggcaataccgccagcctgacaattactggcgctcaggccgaggacgaggccgactactactgcaacagcagagatagcagcggctgggttttcggcggaggcacaaaactgacagtgctgacgcgtgagcagaaactgatctcggaagaggatctggcgaagcccaccacgacgccagcgccgcgaccaccaacaccggcgcccaccatcgcgtcgcagcccctgtccctgcgcccagaggcgtgccggccagcggcggggggcgcagtgcacacgagggggctggacttcgcctgtgacatctacatctgggcgcccttggccgggacttgtggggtccttctcctgtcactggttatcaccctttactgcaaacggggcagaaagaaactcctgtatatattcaaacaaccatttatgagaccagtacaaactactcaagaggaagatggctgtagctgccgatttccagaagaagaagaaggaggatgtgaactgagagtgaagttcagcaggagcgcagacgcccccgcgtaccagcagggccagaaccagctctataacgagctgaatctaggacgaagagaggagtacgatgttttggacaagagacgtggccgggaccctgagatggggggaaagccgagaaggaagaaccctcaggaaggcctgtacaatgaactgcagaaagataagatggcggaggcctacagtgagattgggatgaaaggcgagcgccggaggggcaaggggcacgatggcctttaccagggtctcagtacagccaccaaggacacctacgacgcccttcacatgcaggccctgccccctcgctctagaggatctggagcaacaaacttctcactactcaaacaagcaggtgacgtggaggagaatcccgggcctgggatccacatggccacttacgaggttctctgtgaggtggcgcggaaactgggcacggatgacagggaagtggtattgttcctcctaaacgtgttcatacctcaacccacactggcccaattaattggagctcttagagctttaaaggaggagggcaggttaacgtttcccctgttagcggaatgtctgtttcgtgcaggtcgcagagacctcttgcgcgacctgcttcacttagacccgcgttttttagagcgccacctagcgggcacaatgagttatttcagcccttatcagctcactgttctccacgtagacggggagctgtgtgcgagggatattaggtctttgatatttttaagcaaggacactatagggtctcgcagcacaccacagacattcttacactgggtgtactgtatggaaaacttagacctactgggtcccactgacgtggatgccctaatgtcaatgcttagatctttgtcaagagtagacctacagcgccaagtgcaaaccctaatgggccttcacctttccggcccatcacactcccaacactatcgccatacaccactcgagaccgatttctacgactacaaggacgacgatgacaagactagtggctccggcgagggcagaggaagtctactaacctgcggagatgtggaagaaaatcctggcccacatatgaccgagtacaagcccacggtgcgcctcgccacccgcgacgacgtccccagggccgtacgcaccctcgccgccgcgttcgccgactaccccgccacgcgccacaccgtcgatccggaccgccacatcgagcgggtcaccgagctgcaagaactcttcctcacgcgcgtcgggctcgacatcggcaaggtgtgggtcgcggacgacggcgccgcggtggcggtctggaccacgccggagagcgtcgaagcgggggcggtgttcgccgagatcggcccgcgcatggccgagttgagcggttcccggctggccgcgcagcaacagatggaaggcctcctggcgccgcaccggcccaaggagcccgcgtggttcctggccaccgtcggcgtctcgcccgaccaccagggcaagggtctgggcagcgccgtcgtgctccccggagtggaggcggccgagcgcgccggggtgcccgccttcctggagacctccgcgccccgcaacctccccttctacgagcggctcggcttcaccgtcaccgccgacgtcgaggtgcccgaaggaccgcgcacctggtgcatgacccgcaagcccggtgcctga

SEQ ID NO: 1463 - DNA, 2898 bp, Artificial Sequence; identical to SEQ ID NO: 1193
  Synthetic Polynucleotides

SEQ ID NO: 1464 - DNA, 2892 bp, Artificial Sequence
  Synthetic Polynucleotides
atggccttaccagtgaccgccttgctcctgccgctggccttgctgctccacgccgccaggccgcaggtgcaactggttcagtctggggccgaagtgaagaaacctggggcctctgtgaaggtgtcctgcaaggcttccggctacacctttaccagctacgacatcaactgggtccgacaggccacaggccaaggactggaatggatgggctggatgaaccccaacagcggcaataccggctacgcccagaaattccagggcagagtgaccatgaccagaaacaccagcatcagcaccgcctacatggaactgagcagcctgagaagcgaggacaccgccgtgtactattgcgccagaggcgacagcaactactggtcctactacggcatggacgtgtggggccagggaacactggttacagtttctagcggcggaggcggaagtggaggcggaggatctggcggcggaggctctggcggtggtggatctcaatctgtgctgacccagcctagatccgtgtctggctctcctggacagagcgtgaccatctcttgtaccggcaccagctctgatgtcggcggctacaattacgtgtcctggtatcagcagcaccccggcgaagcccctaagctgattatctacgacgccgacaagcggcccagcggcatcagcaatagattcagctctggcaagagcggcaacaccgccagcctgacaatcagcggactccaggtggaagatgaggccgactactactgctgctcctatgccggcggaagcacctgggttttcggaggcggtacaaaagtgaccgtgctgacgcgtgagcagaaactgatctcggaagaggatctggcgaagcccaccacgacgccagcgccgcgaccaccaacaccggcgcccaccatcgcgtcgcagcccctgtccctgcgcccagaggcgtgccggccagcggcggggggcgcagtgcacacgagggggctggacttcgcctgtgacatctacatctgggcgcccttggccgggacttgtggggtccttctcctgtcactggttatcaccctttactgcaaacggggcagaaagaaactcctgtatatattcaaacaaccatttatgagaccagtacaaactactcaagaggaagatggctgtagctgccgatttccagaagaagaagaaggaggatgtgaactgagagtgaagttcagcaggagcgcagacgcccccgcgtaccagcagggccagaaccagctctataacgagctgaatctaggacgaagagaggagtacgatgttttggacaagagacgtggccgggaccctgagatggggggaaagccgagaaggaagaaccctcaggaaggcctgtacaatgaactgcagaaagataagatggcggaggcctacagtgagattgggatgaaaggcgagcgccggaggggcaaggggcacgatggcctttaccagggtctcagtacagccaccaaggacacctacgacgcccttcacatgcaggccctgccccctcgctctagaggatctggagcaacaaacttctcactactcaaacaagcaggtgacgtggaggagaatcccgggcctgggatccacatggccacttacgaggttctctgtgaggtggcgcggaaactgggcacggatgacagggaagtggtattgttcctcctaaacgtgttcatacctcaacccacactggcccaattaattggagctcttagagctttaaaggaggagggcaggttaacgtttcccctgttagcggaatgtctgtttcgtgcaggtcgcagagacctcttgcgcgacctgcttcacttagacccgcgttttttagagcgccacctagcgggcacaatgagttatttcagcccttatcagctcactgttctccacgtagacggggagctgtgtgcgagggatattaggtctttgatatttttaagcaaggacactatagggtctcgcagcacaccacagacattcttacactgggtgtactgtatggaaaacttagacctactgggtcccactgacgtggatgccctaatgtcaatgcttagatctttgtcaagagtagacctacagcgccaagtgcaaaccctaatgggccttcacctttccggcccatcacactcccaacactatcgccatacaccactcgagaccgatttctacgactacaaggacgacgatgacaagactagtggctccggcgagggcagaggaagtctactaacctgcggagatgtggaagaaaatcctggcccacatatgaccgagtacaagcccacggtgcgcctcgccacccgcgacgacgtccccagggccgtacgcaccctcgccgccgcgttcgccgactaccccgccacgcgccacaccgtcgatccggaccgccacatcgagcgggtcaccgagctgcaagaactcttcctcacgcgcgtcgggctcgacatcggcaaggtgtgggtcgcggacgacggcgccgcggtggcggtctggaccacgccggagagcgtcgaagcgggggcggtgttcgccgagatcggcccgcgcatggccgagttgagcggttcccggctggccgcgcagcaacagatggaaggcctcctggcgccgcaccggcccaaggagcccgcgtggttcctggccaccgtcggcgtctcgcccgaccaccagggcaagggtctgggcagcgccgtcgtgctccccggagtggaggcggccgagcgcgccggggtgcccgccttcctggagacctccgcgccccgcaacctccccttctacgagcggctcggcttcaccgtcaccgccgacgtcgaggtgcccgaaggaccgcgcacctggtgcatgacccgcaagcccggtgcctga

SEQ ID NO: 1465 - DNA, 2898 bp, Artificial Sequence
  Synthetic Polynucleotides
atggccttaccagtgaccgccttgctcctgccgctggccttgctgctccacgccgccaggccggaagtgcagctccagcagtctggacctggcctggttaagcctagccagacactgagcctgacctgtgccatcagcggcgatagcgtgtcctctaatagcgccgcctggaactggatcagacagagccctagcagaggactggaatggctgggcagaacctactaccgcagcaagtggtacagcgactacgccgtgtccgtgaagtcccggatcaccatcaatcccgacaccagcaagaaccagttcagcctgcaactgaacagcgtgacccctgaggataccgccgtgtactactgcgccagagatccctacgacttttggagcggctaccccgacgcctttgacatctggggacagggcacaatggtcaccgtttctagcggcggaggcggaagtggaggcggaggatctggcggcggaggctctcaatctgctctgacacagcctgccagcgtgtcaggatctcctggacagagcatcaccatctcttgcaccggcaccagctctgatgtcggcggctacaattacgtgtcctggtatcagcagcaccccggcaaggcccctaaagtgattatcagcgaagtgaacaacagacccagcggcgtgtcccacagattcagcggctctaagtctggcaacaccgccagcctgacaatctctggactgcaagccgaggacgaggccgactacttctgtagcagctacaccagcggcagaaccctgtacgtgttcggcacaggcagcaaagtgacagtgctgggaacgcgtgagcagaaactgatctcggaagaggatctggcgaagcccaccacgacgccagcgccgcgaccaccaacaccggcgcccaccatcgcgtcgcagcccctgtccctgcgcccagaggcgtgccggccagcggcggggggcgcagtgcacacgagggggctggacttcgcctgtgacatctacatctgggcgcccttggccgggacttgtggggtccttctcctgtcactggttatcaccctttactgcaaacggggcagaaagaaactcctgtatatattcaaacaaccatttatgagaccagtacaaactactcaagaggaagatggctgtagctgccgatttccagaagaagaagaaggaggatgtgaactgagagtgaagttcagcaggagcgcagacgcccccgcgtaccagcagggccagaaccagctctataacgagctgaatctaggacgaagagaggagtacgatgttttggacaagagacgtggccgggaccctgagatggggggaaagccgagaaggaagaaccctcaggaaggcctgtacaatgaactgcagaaagataagatggcggaggcctacagtgagattgggatgaaaggcgagcgccggaggggcaaggggcacgatggcctttaccagggtctcagtacagccaccaaggacacctacgacgcccttcacatgcaggccctgccccctcgctctagaggatctggagcaacaaacttctcactactcaaacaagcaggtgacgtggaggagaatcccgggcctgggatccacatggccacttacgaggttctctgtgaggtggcgcggaaactgggcacggatgacagggaagtggtattgttcctcctaaacgtgttcatacctcaacccacactggcccaattaattggagctcttagagctttaaaggaggagggcaggttaacgtttcccctgttagcggaatgtctgtttcgtgcaggtcgcagagacctcttgcgcgacctgcttcacttagacccgcgttttttagagcgccacctagcgggcacaatgagttatttcagcccttatcagctcactgttctccacgtagacggggagctgtgtgcgagggatattaggtctttgatatttttaagcaaggacactatagggtctcgcagcacaccacagacattcttacactgggtgtactgtatggaaaacttagacctactgggtcccactgacgtggatgccctaatgtcaatgcttagatctttgtcaagagtagacctacagcgccaagtgcaaaccctaatgggccttcacctttccggcccatcacactcccaacactatcgccatacaccactcgagaccgatttctacgactacaaggacgacgatgacaagactagtggctccggcgagggcagaggaagtctactaacctgcggagatgtggaagaaaatcctggcccacatatgaccgagtacaagcccacggtgcgcctcgccacccgcgacgacgtccccagggccgtacgcaccctcgccgccgcgttcgccgactaccccgccacgcgccacaccgtcgatccggaccgccacatcgagcgggtcaccgagctgcaagaactcttcctcacgcgcgtcgggctcgacatcggcaaggtgtgggtcgcggacgacggcgccgcggtggcggtctggaccacgccggagagcgtcgaagcgggggcggtgttcgccgagatcggcccgcgcatggccgagttgagcggttcccggctggccgcgcagcaacagatggaaggcctcctggcgccgcaccggcccaaggagcccgcgtggttcctggccaccgtcggcgtctcgcccgaccaccagggcaagggtctgggcagcgccgtcgtgctccccggagtggaggcggccgagcgcgccggggtgcccgccttcctggagacctccgcgccccgcaacctccccttctacgagcggctcggcttcaccgtcaccgccgacgtcgaggtgcccgaaggaccgcgcacctggtgcatgacccgcaagcccggtgcctga

SEQ ID NO: 1466 - DNA, 2895 bp, Artificial Sequence
  Synthetic Polynucleotides
atggccttaccagtgaccgccttgctcctgccgctggccttgctgctccacgccgccaggccggaagtgcagctccagcagtctggacctggcctggttaagcctagccagacactgagcctgacctgtgccatcagcggcgattccatgctgagcaacagcgacacctggaactggatcagacagagccccagcagaggcctggaatggctgggcagaacataccacagaagcacttggtacgacgactacgccagctctgtgcggggcagagtgtccatcaatgtggacaccagcaagaaccagtacagcctgcaactgaacgccgtgacacctgaggataccggcgtgtactactgtgccagagtgcggctccaggacggcaattcttggagcgacgcctttgatgtgtggggccagggcacaatggtcaccgtttctagcggcggaggcggaagtggaggcggaggatctggcggcggaggctctcaatctgctctgacacagcctgccagcgcctctggatctcctggacagagcgtgaccatctcctgtaccggcacctcttctgatgtcggcggctacaactacgtgtcctggtatcagcagcaccccggcaaggcccctaagctgatgatctacgacgtgtccaacagacccagcggcgtgtccaatagattctccggcagcaagagcggcaacaccgccagcctgacaatttctggactgcaagccgaggacgaggccgactactactgtagcagctacaccagcagcagcacactgtacgtgttcggcacaggcacccagctcacagttcttacgcgtgagcagaaactgatctcggaagaggatctggcgaagcccaccacgacgccagcgccgcgaccaccaacaccggcgcccaccatcgcgtcgcagcccctgtccctgcgcccagaggcgtgccggccagcggcggggggcgcagtgcacacgagggggctggacttcgcctgtgacatctacatctgggcgcccttggccgggacttgtggggtccttctcctgtcactggttatcaccctttactgcaaacggggcagaaagaaactcctgtatatattcaaacaaccatttatgagaccagtacaaactactcaagaggaagatggctgtagctgccgatttccagaagaagaagaaggaggatgtgaactgagagtgaagttcagcaggagcgcagacgcccccgcgtaccagcagggccagaaccagctctataacgagctgaatctaggacgaagagaggagtacgatgttttggacaagagacgtggccgggaccctgagatggggggaaagccgagaaggaagaaccctcaggaaggcctgtacaatgaactgcagaaagataagatggcggaggcctacagtgagattgggatgaaaggcgagcgccggaggggcaaggggcacgatggcctttaccagggtctcagtacagccaccaaggacacctacgacgcccttcacatgcaggccctgccccctcgctctagaggatctggagcaacaaacttctcactactcaaacaagcaggtgacgtggaggagaatcccgggcctgggatccacatggccacttacgaggttctctgtgaggtggcgcggaaactgggcacggatgacagggaagtggtattgttcctcctaaacgtgttcatacctcaacccacactggcccaattaattggagctcttagagctttaaaggaggagggcaggttaacgtttcccctgttagcggaatgtctgtttcgtgcaggtcgcagagacctcttgcgcgacctgcttcacttagacccgcgttttttagagcgccacctagcgggcacaatgagttatttcagcccttatcagctcactgttctccacgtagacggggagctgtgtgcgagggatattaggtctttgatatttttaagcaaggacactatagggtctcgcagcacaccacagacattcttacactgggtgtactgtatggaaaacttagacctactgggtcccactgacgtggatgccctaatgtcaatgcttagatctttgtcaagagtagacctacagcgccaagtgcaaaccctaatgggccttcacctttccggcccatcacactcccaacactatcgccatacaccactcgagaccgatttctacgactacaaggacgacgatgacaagactagtggctccggcgagggcagaggaagtctactaacctgcggagatgtggaagaaaatcctggcccacatatgaccgagtacaagcccacggtgcgcctcgccacccgcgacgacgtccccagggccgtacgcaccctcgccgccgcgttcgccgactaccccgccacgcgccacaccgtcgatccggaccgccacatcgagcgggtcaccgagctgcaagaactcttcctcacgcgcgtcgggctcgacatcggcaaggtgtgggtcgcggacgacggcgccgcggtggcggtctggaccacgccggagagcgtcgaagcgggggcggtgttcgccgagatcggcccgcgcatggccgagttgagcggttcccggctggccgcgcagcaacagatggaaggcctcctggcgccgcaccggcccaaggagcccgcgtggttcctggccaccgtcggcgtctcgcccgaccaccagggcaagggtctgggcagcgccgtcgtgctccccggagtggaggcggccgagcgcgccggggtgcccgccttcctggagacctccgcgccccgcaacctccccttctacgagcggctcggcttcaccgtcaccgccgacgtcgaggtgcccgaaggaccgcgcacctggtgcatgacccgcaagcccggtgcctga

SEQ ID NO: 1467 - DNA, 2175 bp, Artificial Sequence
  Synthetic Polynucleotides
atggccttaccagtgaccgccttgctcctgccgctggccttgctgctccacgccgccaggccggacatccagatgacacagactacatcctccctgtctgcctctctgggagacagagtcaccatcagttgcagggcaagtcaggacattagtaaatatttaaattggtatcagcagaaaccagatggaactgttaaactcctgatctaccatacatcaagattacactcaggagtcccatcaaggttcagtggcagtgggtctggaacagattattctctcaccattagcaacctggagcaagaagatattgccacttacttttgccaacagggtaatacgcttccgtacacgttcggaggggggaccaagctggagatcacaggtggcggtggctcgggcggtggtgggtcgggtggcggcggatctgaggtgaaactgcaggagtcaggacctggcctggtggcgccctcacagagcctgtccgtcacatgcactgtctcaggggtctcattacccgactatggtgtaagctggattcgccagcctccacgaaagggtctggagtggctgggagtaatatggggtagtgaaaccacatactataattcagctctcaaatccagactgaccatcatcaaggacaactccaagagccaagttttcttaaaaatgaacagtctgcaaactgatgacacagccatttactactgtgccaaacattattactacggtggtagctatgctatggactactggggtcaaggaacctcagtcaccgtctcctcacgcgtagagcagaaactgatctcggaagaggatctggcgaagcccaccacgacgccagcgccgcgaccaccaacaccggcgcccaccatcgcgtcgcagcccctgtccctgcgcccagaggcgtgccggccagcggcggggggcgcagtgcacacgagggggctggacttcgcctgtgacatctacatctgggcgcccttggccgggacttgtggggtccttctcctgtcactggttatcaccctttactgcaaacggggcagaaagaaactcctgtatatattcaaacaaccatttatgagaccagtacaaactactcaagaggaagatggctgtagctgccgatttccagaagaagaagaaggaggatgtgaactgagagtgaagttcagcaggagcgcagacgcccccgcgtaccagcagggccagaaccagctctataacgagctgaatctaggacgaagagaggagtacgatgttttggacaagagacgtggccgggaccctgagatggggggaaagccgagaaggaagaaccctcaggaaggcctgtacaatgaactgcagaaagataagatggcggaggcctacagtgagattgggatgaaaggcgagcgccggaggggcaaggggcacgatggcctttaccagggtctcagtacagccaccaaggacacctacgacgcccttcacatgcaggccctgccccctcgctctagtggctccggcgagggcagaggaagtctactaacctgcggagatgtggaagaaaatcctggcccacatatgaccgagtacaagcccacggtgcgcctcgccacccgcgacgacgtccccagggccgtacgcaccctcgccgccgcgttcgccgactaccccgccacgcgccacaccgtcgatccggaccgccacatcgagcgggtcaccgagctgcaagaactcttcctcacgcgcgtcgggctcgacatcggcaaggtgtgggtcgcggacgacggcgccgcggtggcggtctggaccacgccggagagcgtcgaagcgggggcggtgttcgccgagatcggcccgcgcatggccgagttgagcggttcccggctggccgcgcagcaacagatggaaggcctcctggcgccgcaccggcccaaggagcccgcgtggttcctggccaccgtcggcgtctcgcccgaccaccagggcaagggtctgggcagcgccgtcgtgctccccggagtggaggcggccgagcgcgccggggtgcccgccttcctggagacctccgcgccccgcaacctccccttctacgagcggctcggcttcaccgtcaccgccgacgtcgaggtgcccgaaggaccgcgcacctggtgcatgacccgcaagcccggtgcctga

SEQ ID NO: 1468 - DNA, 2175 bp, Artificial Sequence
  Synthetic Polynucleotides
atggccttaccagtgaccgccttgctcctgccgctggccttgctgctccacgccgccaggccggagatcgtgatgacccagagccctgccaccctgtctctgagccctggcgaaagagccaccctgagctgtagagccagccaggacatcagcaagtacctgaactggtatcagcagaagcccggccaggcccccagactgctgatctaccacaccagcagactgcacagcggcatccccgccagattttctggctctggcagcggcaccgactacaccctgacaatcagcagcctccagcccgaggacttcgccgtgtacttctgtcagcaaggcaacaccctgccctacaccttcggccagggcaccaagctggaaatcaagggcggaggcggaagtggaggcggaggatctggcggcggaggctctcaggtgcaactccaggaatctggccctggcctcgtgaagcccagcgagacactgagcctgacctgtaccgtgtccggcgtgtccctgcctgactatggcgtgtcctggatcagacagccccctggcaagggcctggaatggatcggagtgatttggggcagcgaaaccacctactacaacagctccctgaagtccagagtgaccatctccaaggacaactccaagaaccaggtgtccctgaagctgagcagcgtgacagccgccgacaccgccgtgtattactgcgccaagcactactactacggcggcagctacgctatggactactggggccagggaaccctcgtgaccgtgtctagtacgcgtgagcagaaactgatctcggaagaggatctggcgaagcccaccacgacgccagcgccgcgaccaccaacaccggcgcccaccatcgcgtcgcagcccctgtccctgcgcccagaggcgtgccggccagcggcggggggcgcagtgcacacgagggggctggacttcgcctgtgacatctacatctgggcgcccttggccgggacttgtggggtccttctcctgtcactggttatcaccctttactgcaaacggggcagaaagaaactcctgtatatattcaaacaaccatttatgagaccagtacaaactactcaagaggaagatggctgtagctgccgatttccagaagaagaagaaggaggatgtgaactgagagtgaagttcagcaggagcgcagacgcccccgcgtaccagcagggccagaaccagctctataacgagctgaatctaggacgaagagaggagtacgatgttttggacaagagacgtggccgggaccctgagatggggggaaagccgagaaggaagaaccctcaggaaggcctgtacaatgaactgcagaaagataagatggcggaggcctacagtgagattgggatgaaaggcgagcgccggaggggcaaggggcacgatggcctttaccagggtctcagtacagccaccaaggacacctacgacgcccttcacatgcaggccctgccccctcgctctagtggctccggcgagggcagaggaagtctactaacctgcggagatgtggaagaaaatcctggcccacatatgaccgagtacaagcccacggtgcgcctcgccacccgcgacgacgtccccagggccgtacgcaccctcgccgccgcgttcgccgactaccccgccacgcgccacaccgtcgatccggaccgccacatcgagcgggtcaccgagctgcaagaactcttcctcacgcgcgtcgggctcgacatcggcaaggtgtgggtcgcggacgacggcgccgcggtggcggtctggaccacgccggagagcgtcgaagcgggggcggtgttcgccgagatcggcccgcgcatggccgagttgagcggttcccggctggccgcgcagcaacagatggaaggcctcctggcgccgcaccggcccaaggagcccgcgtggttcctggccaccgtcggcgtctcgcccgaccaccagggcaagggtctgggcagcgccgtcgtgctccccggagtggaggcggccgagcgcgccggggtgcccgccttcctggagacctccgcgccccgcaacctccccttctacgagcggctcggcttcaccgtcaccgccgacgtcgaggtgcccgaaggaccgcgcacctggtgcatgacccgcaagcccggtgcctga

SEQ ID NO: 1469 - DNA, 2175 bp, Artificial Sequence
  Synthetic Polynucleotides
atggccttaccagtgaccgccttgctcctgccgctggccttgctgctccacgccgccaggccggagatcgtgatgacccagagccctgccaccctgtctctgagccctggcgaaagagccaccctgagctgtagagccagccaggacatcagcaagtacctgaactggtatcagcagaagcccggccaggcccccagactgctgatctaccacaccagcagactgcacagcggcatccccgccagattttctggctctggcagcggcaccgactacaccctgacaatcagcagcctccagcccgaggacttcgccgtgtacttctgtcagcaaggcaacaccctgccctacaccttcggccagggcaccaagctggaaatcaagggcggaggcggaagtggaggcggaggatctggcggcggaggctctcaggtgcaactccaggaatctggccctggcctcgtgaagcccagcgagacactgagcctgacctgtaccgtgtccggcgtgtccctgcctgactatggcgtgtcctggatcagacagccccctggcaagggcctggaatggatcggagtgatttggggcagcgaaaccacctactaccaaagctccctgaagtccagagtgaccatctccaaggacaactccaagaaccaggtgtccctgaagctgagcagcgtgacagccgccgacaccgccgtgtattactgcgccaagcactactactacggcggcagctacgctatggactactggggccagggaaccctcgtgaccgtgtctagtacgcgtgagcagaaactgatctcggaagaggatctggcgaagcccaccacgacgccagcgccgcgaccaccaacaccggcgcccaccatcgcgtcgcagcccctgtccctgcgcccagaggcgtgccggccagcggcggggggcgcagtgcacacgagggggctggacttcgcctgtgacatctacatctgggcgcccttggccgggacttgtggggtccttctcctgtcactggttatcaccctttactgcaaacggggcagaaagaaactcctgtatatattcaaacaaccatttatgagaccagtacaaactactcaagaggaagatggctgtagctgccgatttccagaagaagaagaaggaggatgtgaactgagagtgaagttcagcaggagcgcagacgcccccgcgtaccagcagggccagaaccagctctataacgagctgaatctaggacgaagagaggagtacgatgttttggacaagagacgtggccgggaccctgagatggggggaaagccgagaaggaagaaccctcaggaaggcctgtacaatgaactgcagaaagataagatggcggaggcctacagtgagattgggatgaaaggcgagcgccggaggggcaaggggcacgatggcctttaccagggtctcagtacagccaccaaggacacctacgacgcccttcacatgcaggccctgccccctcgctctagtggctccggcgagggcagaggaagtctactaacctgcggagatgtggaagaaaatcctggcccacatatgaccgagtacaagcccacggtgcgcctcgccacccgcgacgacgtccccagggccgtacgcaccctcgccgccgcgttcgccgactaccccgccacgcgccacaccgtcgatccggaccgccacatcgagcgggtcaccgagctgcaagaactcttcctcacgcgcgtcgggctcgacatcggcaaggtgtgggtcgcggacgacggcgccgcggtggcggtctggaccacgccggagagcgtcgaagcgggggcggtgttcgccgagatcggcccgcgcatggccgagttgagcggttcccggctggccgcgcagcaacagatggaaggcctcctggcgccgcaccggcccaaggagcccgcgtggttcctggccaccgtcggcgtctcgcccgaccaccagggcaagggtctgggcagcgccgtcgtgctccccggagtggaggcggccgagcgcgccggggtgcccgccttcctggagacctccgcgccccgcaacctccccttctacgagcggctcggcttcaccgtcaccgccgacgtcgaggtgcccgaaggaccgcgcacctggtgcatgacccgcaagcccggtgcctga

SEQ ID NO: 1470 - DNA, 2178 bp, Artificial Sequence
  Synthetic Polynucleotides
atggccttaccagtgaccgccttgctcctgccgctggccttgctgctccacgccgccaggccggacgagatcgtgctgacacagagccccgccaccctgtcactgtctccaggcgaaagagccaccctgagctgtagcgccagcagcagcgtgtcctacatgcactggtatcagcagaagcccggccaggcccccagactgctgatctacgataccagcaagctggcctccggcatccccgccagattttctggcagcggctccggcaccgacttcaccctgacaatcagcagcctggaacccgaggacgtggccgtgtactactgttttcaaggcagcgtgtaccccttcaccttcggccagggcaccaagctggaaatcaagagaggtggcggtggctcgggcggtggtgggtcgggtggcggcggatctcaggtgcagctccaggaatctggccctggcctcgtgaagcctagccagaccctgagcctgacctgtaccgtgtctggcggcagcatcagcacaagcggcatgggcgtgggctggatcagacagcaccctggcaagggcctggaatggatcggccacatttggtgggacgacgacaagcggtacaaccccgccctgaagtccagagtgaccatcagcgtggacaccagcaagaaccagttcagcctgaagctgagcagcgtgacagccgccgataccgccgtgtattattgcgcccggatggaactgtggtcctactacttcgactactggggccagggaaccctcgtgaccgtgtctagtacgcgtgagcagaaactgatctcggaagaggatctggcgaagcccaccacgacgccagcgccgcgaccaccaacaccggcgcccaccatcgcgtcgcagcccctgtccctgcgcccagaggcgtgccggccagcggcggggggcgcagtgcacacgagggggctggacttcgcctgtgacatctacatctgggcgcccttggccgggacttgtggggtccttctcctgtcactggttatcaccctttactgcaaacggggcagaaagaaactcctgtatatattcaaacaaccatttatgagaccagtacaaactactcaagaggaagatggctgtagctgccgatttccagaagaagaagaaggaggatgtgaactgagagtgaagttcagcaggagcgcagacgcccccgcgtaccagcagggccagaaccagctctataacgagctgaatctaggacgaagagaggagtacgatgttttggacaagagacgtggccgggaccctgagatggggggaaagccgagaaggaagaaccctcaggaaggcctgtacaatgaactgcagaaagataagatggcggaggcctacagtgagattgggatgaaaggcgagcgccggaggggcaaggggcacgatggcctttaccagggtctcagtacagccaccaaggacacctacgacgcccttcacatgcaggccctgccccctcgctctagtggctccggcgagggcagaggaagtctactaacctgcggagatgtggaagaaaatcctggcccacatatgaccgagtacaagcccacggtgcgcctcgccacccgcgacgacgtccccagggccgtacgcaccctcgccgccgcgttcgccgactaccccgccacgcgccacaccgtcgatccggaccgccacatcgagcgggtcaccgagctgcaagaactcttcctcacgcgcgtcgggctcgacatcggcaaggtgtgggtcgcggacgacggcgccgcggtggcggtctggaccacgccggagagcgtcgaagcgggggcggtgttcgccgagatcggcccgcgcatggccgagttgagcggttcccggctggccgcgcagcaacagatggaaggcctcctggcgccgcaccggcccaaggagcccgcgtggttcctggccaccgtcggcgtctcgcccgaccaccagggcaagggtctgggcagcgccgtcgtgctccccggagtggaggcggccgagcgcgccggggtgcccgccttcctggagacctccgcgccccgcaacctccccttctacgagcggctcggcttcaccgtcaccgccgacgtcgaggtgcccgaaggaccgcgcacctggtgcatgacccgcaagcccggtgcctga

SEQ ID NO: 1471 - DNA, 2199 bp, Artificial Sequence
  Synthetic Polynucleotides
atggccctgcctgtgacagctctgctgctgcctctggcactgctgctgcacgccgccagacctgacatccagctgacacagagccctgccagcctggccgtgtctctgggacagagagccaccatcagctgcaaggccagccagagcgtggactacgacggcgacagctacctgaactggtatcagcagatccccggccagccccccaagctgctgatctacgatgccagcaacctggtgtccggcatcccccctagattttccggcagcggctccggcaccgacttcaccctgaatatccaccccgtggaaaaggtggacgccgccacctaccactgccagcagagcaccgaagatccctggacctttggcggaggcaccaagctggaaatcaagggaggcggaggaagtggcggcggaggatctgggggaggcggaagccaggtacagctccaacagtcaggggccgagctggtacgcccagggtccagcgtcaaaatatcatgtaaggcatctggctacgccttcagctcttactggatgaattgggtgaaacaacggccaggccagggactggagtggattggtcaaatttggccaggagacggggacacaaattacaacggaaaattcaagggaaaggccacacttaccgccgatgaaagtagttcaaccgcttatatgcagctgtcctccctcgcttctgaggactctgctgtgtacttttgcgcacgccgagaaaccaccactgtgggaagatactactacgctatggattattggggacagggcacaaccgtgaccgttagcagtacgcgtgagcagaaactgatctcggaagaggatctggcgaagcccaccacgacgccagcgccgcgaccaccaacaccggcgcccaccatcgcgtcgcagcccctgtccctgcgcccagaggcgtgccggccagcggcggggggcgcagtgcacacgagggggctggacttcgcctgtgacatctacatctgggcgcccttggccgggacttgtggggtccttctcctgtcactggttatcaccctttactgcaaacggggcagaaagaaactcctgtatatattcaaacaaccatttatgagaccagtacaaactactcaagaggaagatggctgtagctgccgatttccagaagaagaagaaggaggatgtgaactgagagtgaagttcagcaggagcgcagacgcccccgcgtaccagcagggccagaaccagctctataacgagctgaatctaggacgaagagaggagtacgatgttttggacaagagacgtggccgggaccctgagatggggggaaagccgagaaggaagaaccctcaggaaggcctgtacaatgaactgcagaaagataagatggcggaggcctacagtgagattgggatgaaaggcgagcgccggaggggcaaggggcacgatggcctttaccagggtctcagtacagccaccaaggacacctacgacgcccttcacatgcaggccctgccccctcgctctagtggctccggcgagggcagaggaagtctactaacctgcggagatgtggaagaaaatcctggcccacatatgaccgagtacaagcccacggtgcgcctcgccacccgcgacgacgtccccagggccgtacgcaccctcgccgccgcgttcgccgactaccccgccacgcgccacaccgtcgatccggaccgccacatcgagcgggtcaccgagctgcaagaactcttcctcacgcgcgtcgggctcgacatcggcaaggtgtgggtcgcggacgacggcgccgcggtggcggtctggaccacgccggagagcgtcgaagcgggggcggtgttcgccgagatcggcccgcgcatggccgagttgagcggttcccggctggccgcgcagcaacagatggaaggcctcctggcgccgcaccggcccaaggagcccgcgtggttcctggccaccgtcggcgtctcgcccgaccaccagggcaagggtctgggcagcgccgtcgtgctccccggagtggaggcggccgagcgcgccggggtgcccgccttcctggagacctccgcgccccgcaacctccccttctacgagcggctcggcttcaccgtcaccgccgacgtcgaggtgcccgaaggaccgcgcacctggtgcatgacccgcaagcccggtgcctga

SEQ ID NO: 1472 - DNA, 2196 bp, Artificial Sequence
  Synthetic Polynucleotides
atggccttaccagtgaccgccttgctcctgccgctggccttgctgctccacgccgccaggccggacatcgtgatgacccaggccgctcccagcatccctgtgacacctggcgagagcgtgtccatctcctgccggtctagcaagagcctgctgaacagcaacggcaatacctacctgtactggttcctccagcggccaggccagtctccccaactgctgatctaccggatgagcaacctggcctccggcgtgcccgatagattttctggcagcggctccggcaccgccttcaccctgagaatcagcagagtggaagccgaggacgtgggcgtgtactactgtatgcagcacctggaataccccttcaccttcggagccggcaccaagctggaactgaagagaggcggaggcggaagtggaggcggaggatctggcggcggaggctctgaagtgcaactccagcagagcggccctgagctgattaagcctggggccagcgtgaagatgagctgcaaggccagcggctacaccttcaccagctacgtgatgcactgggtcaagcagaagcccggccagggcctggaatggatcggctacatcaacccctacaacgatggcaccaagtacaacgagaagttcaagggcaaggccaccctgaccagcgacaagagcagcagcaccgcctacatggaactgagcagcctgacaagcgaggacagcgccgtgtactattgcgccagaggcacctactactacggcagccgggtgttcgactattggggccagggcaccacactgaccgtgtcctctacgcgtgagcagaaactgatctcggaagaggatctggcgaagcccaccacgacgccagcgccgcgaccaccaacaccggcgcccaccatcgcgtcgcagcccctgtccctgcgcccagaggcgtgccggccagcggcggggggcgcagtgcacacgagggggctggacttcgcctgtgacatctacatctgggcgcccttggccgggacttgtggggtccttctcctgtcactggttatcaccctttactgcaaacggggcagaaagaaactcctgtatatattcaaacaaccatttatgagaccagtacaaactactcaagaggaagatggctgtagctgccgatttccagaagaagaagaaggaggatgtgaactgagagtgaagttcagcaggagcgcagacgcccccgcgtaccagcagggccagaaccagctctataacgagctgaatctaggacgaagagaggagtacgatgttttggacaagagacgtggccgggaccctgagatggggggaaagccgagaaggaagaaccctcaggaaggcctgtacaatgaactgcagaaagataagatggcggaggcctacagtgagattgggatgaaaggcgagcgccggaggggcaaggggcacgatggcctttaccagggtctcagtacagccaccaaggacacctacgacgcccttcacatgcaggccctgccccctcgctctagtggctccggcgagggcagaggaagtctactaacctgcggagatgtggaagaaaatcctggcccacatatgaccgagtacaagcccacggtgcgcctcgccacccgcgacgacgtccccagggccgtacgcaccctcgccgccgcgttcgccgactaccccgccacgcgccacaccgtcgatccggaccgccacatcgagcgggtcaccgagctgcaagaactcttcctcacgcgcgtcgggctcgacatcggcaaggtgtgggtcgcggacgacggcgccgcggtggcggtctggaccacgccggagagcgtcgaagcgggggcggtgttcgccgagatcggcccgcgcatggccgagttgagcggttcccggctggccgcgcagcaacagatggaaggcctcctggcgccgcaccggcccaaggagcccgcgtggttcctggccaccgtcggcgtctcgcccgaccaccagggcaagggtctgggcagcgccgtcgtgctccccggagtggaggcggccgagcgcgccggggtgcccgccttcctggagacctccgcgccccgcaacctccccttctacgagcggctcggcttcaccgtcaccgccgacgtcgaggtgcccgaaggaccgcgcacctggtgcatgacccgcaagcccggtgcctga

SEQ ID NO: 1473 - DNA, 2190 bp, Artificial Sequence
  Synthetic Polynucleotides
atggccttaccagtgaccgccttgctcctgccgctggccttgctgctccacgccgccaggccggagatcgtgctgacacagagccccgatttccagagcgtgacccctaaagaaaaagtgaccatcacctgtcgggccagcgagagcgtggacacattcggcatcagcttcatgaactggttccagcagaagcccgatcagagccccaagctgctgattcacgccgccagcaatcaaggcagcggagtgcctagcagattttccggctctggcagcggcaccgatttcaccctgaccatcaatagcctggaagccgaggatgccgccacctactactgccagcagagcaaagaggtgcccttcacctttggcggaggcaccaaggtggaaatcaaaggcggaggcggaagtggaggcggaggatctggcggcggaggctctgaagtgcagctcgttgagtctggtggcggactggttcaacctggcggaagcctgagactgtcttgtgccgccagcggcttcaccttcagcagctcttggatgaactgggtccgacaggcccctggcaaaggactggaatgggtcggaagaatctaccccggcgacggcgacaccaactacaacggcaagttcaagggcagattcaccatcagccgggacgacagcaagaacagcctgtacctgcagatgaactccctgaaaaccgaggacaccgccgtgtactactgtgccagatccggcttcatcaccaccgtgctggacttcgattattggggccagggcaccctggtcaccgtttcttctacgcgtgagcagaaactgatctcggaagaggatctggcgaagcccaccacgacgccagcgccgcgaccaccaacaccggcgcccaccatcgcgtcgcagcccctgtccctgcgcccagaggcgtgccggccagcggcggggggcgcagtgcacacgagggggctggacttcgcctgtgacatctacatctgggcgcccttggccgggacttgtggggtccttctcctgtcactggttatcaccctttactgcaaacggggcagaaagaaactcctgtatatattcaaacaaccatttatgagaccagtacaaactactcaagaggaagatggctgtagctgccgatttccagaagaagaagaaggaggatgtgaactgagagtgaagttcagcaggagcgcagacgcccccgcgtaccagcagggccagaaccagctctataacgagctgaatctaggacgaagagaggagtacgatgttttggacaagagacgtggccgggaccctgagatggggggaaagccgagaaggaagaaccctcaggaaggcctgtacaatgaactgcagaaagataagatggcggaggcctacagtgagattgggatgaaaggcgagcgccggaggggcaaggggcacgatggcctttaccagggtctcagtacagccaccaaggacacctacgacgcccttcacatgcaggccctgccccctcgctctagtggctccggcgagggcagaggaagtctactaacctgcggagatgtggaagaaaatcctggcccacatatgaccgagtacaagcccacggtgcgcctcgccacccgcgacgacgtccccagggccgtacgcaccctcgccgccgcgttcgccgactaccccgccacgcgccacaccgtcgatccggaccgccacatcgagcgggtcaccgagctgcaagaactcttcctcacgcgcgtcgggctcgacatcggcaaggtgtgggtcgcggacgacggcgccgcggtggcggtctggaccacgccggagagcgtcgaagcgggggcggtgttcgccgagatcggcccgcgcatggccgagttgagcggttcccggctggccgcgcagcaacagatggaaggcctcctggcgccgcaccggcccaaggagcccgcgtggttcctggccaccgtcggcgtctcgcccgaccaccagggcaagggtctgggcagcgccgtcgtgctccccggagtggaggcggccgagcgcgccggggtgcccgccttcctggagacctccgcgccccgcaacctccccttctacgagcggctcggcttcaccgtcaccgccgacgtcgaggtgcccgaaggaccgcgcacctggtgcatgacccgcaagcccggtgcctga

SEQ ID NO: 1474 - DNA, 2178 bp, Artificial Sequence
  Synthetic Polynucleotides
atggccttaccagtgaccgccttgctcctgccgctggccttgctgctccacgccgccaggccggccattcagctcacacagagcccttctagcctgagcgcctctgtgggcgacagagtgaccatcacatgtagagccagccagggcatcagcagcgcccagcagaaacctggaaaggcccctaagctgctgatcctggcctggtacagcagcctggaaagcggagtgcctagcagattcagcggctacgatgcctctggcagcggcaccgatttcaccctgacaatatccagcctccagcctgaggacttcgccacctactactgccagcagttcaacagctacccctacaccttcggccagggcaccaagctggaaatcaaaggcggaggcggaagtggaggcggaggatctggcggcggaggctctgaagtgcaactggttcagagcggagccgaagtgaagaagcctggcgagagcctgaagattagctgcaaaggctccggctacagcttcagcagctcttggatcggctgggtccgacagatgcctggcaaaggactggaatggatgggcatcatctaccccgacgacagcgacaccagatacagccctagcttccagggccaagtgacaatcagcgccgacaagagcatcagaaccgcctacctccagtggtcctctctgaaggccagcgataccgccatgtactactgcgccagacacgtgaccatgatctggggagtgattatcgacttctggggccagggaaccctggtcacagtctcttctacgcgtgagcagaaactgatctcggaagaggatctggcgaagcccaccacgacgccagcgccgcgaccaccaacaccggcgcccaccatcgcgtcgcagcccctgtccctgcgcccagaggcgtgccggccagcggcggggggcgcagtgcacacgagggggctggacttcgcctgtgacatctacatctgggcgcccttggccgggacttgtggggtccttctcctgtcactggttatcaccctttactgcaaacggggcagaaagaaactcctgtatatattcaaacaaccatttatgagaccagtacaaactactcaagaggaagatggctgtagctgccgatttccagaagaagaagaaggaggatgtgaactgagagtgaagttcagcaggagcgcagacgcccccgcgtaccagcagggccagaaccagctctataacgagctgaatctaggacgaagagaggagtacgatgttttggacaagagacgtggccgggaccctgagatggggggaaagccgagaaggaagaaccctcaggaaggcctgtacaatgaactgcagaaagataagatggcggaggcctacagtgagattgggatgaaaggcgagcgccggaggggcaaggggcacgatggcctttaccagggtctcagtacagccaccaaggacacctacgacgcccttcacatgcaggccctgccccctcgctctagtggctccggcgagggcagaggaagtctactaacctgcggagatgtggaagaaaatcctggcccacatatgaccgagtacaagcccacggtgcgcctcgccacccgcgacgacgtccccagggccgtacgcaccctcgccgccgcgttcgccgactaccccgccacgcgccacaccgtcgatccggaccgccacatcgagcgggtcaccgagctgcaagaactcttcctcacgcgcgtcgggctcgacatcggcaaggtgtgggtcgcggacgacggcgccgcggtggcggtctggaccacgccggagagcgtcgaagcgggggcggtgttcgccgagatcggcccgcgcatggccgagttgagcggttcccggctggccgcgcagcaacagatggaaggcctcctggcgccgcaccggcccaaggagcccgcgtggttcctggccaccgtcggcgtctcgcccgaccaccagggcaagggtctgggcagcgccgtcgtgctccccggagtggaggcggccgagcgcgccggggtgcccgccttcctggagacctccgcgccccgcaacctccccttctacgagcggctcggcttcaccgtcaccgccgacgtcgaggtgcccgaaggaccgcgcacctggtgcatgacccgcaagcccggtgcctga

SEQ ID NO: 1475 - DNA, 2250 bp, Artificial Sequence
  Synthetic Polynucleotides
atggccttaccagtgaccgccttgctcctgccgctggccttgctgctccacgccgccaggccgatcaacatctacaacgccgagcctgccaatcctagcgagaagaacagccccgaattcgacatcgtgatgacacagagccccgccacactgtcactgtctccaggcgaaagagccacactgagctgtcggagcagcaagagcctccagaacgtgaacggcaacacctacctgtactggttccagcagaagcccggccagtctcctcagctcctgatctacagaatgagcaacctgaacagcggcgtgcccgacagattttctggcagcggaagcggcaccgagttcaccctgaccataagcagcctggaacctgaggacttcgccgtgtactactgtatgcagcacctggaataccccatcaccttcggagccggcaccaagctggaaatcaaaggcggaggcggaagtggaggcggaggatctggcggcggaggctctgaagtgcaactggttgaatctggcggcggactggttaagcctggcggatctctgaagctgagctgtgccgccagcggctacacctttaccagctacgtgatgcactgggtccgacaggcccctggcaaaggacttgagtggatcggctacatcaacccctacaacgatggcaccaagtacaacgagaagttccagggcagagtgaccatcagctccgacaagagcatcagcaccgcctacatggaactgagcagcctgagaagcgaggataccgccatgtactattgcgccagaggcacctactactacggcaccagagtgttcgactactggggccagggaaccctggtcacagtctcttctacgcgtgagcagaaactgatctcggaagaggatctggcgaagcccaccacgacgccagcgccgcgaccaccaacaccggcgcccaccatcgcgtcgcagcccctgtccctgcgcccagaggcgtgccggccagcggcggggggcgcagtgcacacgagggggctggacttcgcctgtgacatctacatctgggcgcccttggccgggacttgtggggtccttctcctgtcactggttatcaccctttactgcaaacggggcagaaagaaactcctgtatatattcaaacaaccatttatgagaccagtacaaactactcaagaggaagatggctgtagctgccgatttccagaagaagaagaaggaggatgtgaactgagagtgaagttcagcaggagcgcagacgcccccgcgtaccagcagggccagaaccagctctataacgagctgaatctaggacgaagagaggagtacgatgttttggacaagagacgtggccgggaccctgagatggggggaaagccgagaaggaagaaccctcaggaaggcctgtacaatgaactgcagaaagataagatggcggaggcctacagtgagattgggatgaaaggcgagcgccggaggggcaaggggcacgatggcctttaccagggtctcagtacagccaccaaggacacctacgacgcccttcacatgcaggccctgccccctcgctctagtggctccggcgagggcagaggaagtctactaacctgcggagatgtggaagaaaatcctggcccacatatgaccgagtacaagcccacggtgcgcctcgccacccgcgacgacgtccccagggccgtacgcaccctcgccgccgcgttcgccgactaccccgccacgcgccacaccgtcgatccggaccgccacatcgagcgggtcaccgagctgcaagaactcttcctcacgcgcgtcgggctcgacatcggcaaggtgtgggtcgcggacgacggcgccgcggtggcggtctggaccacgccggagagcgtcgaagcgggggcggtgttcgccgagatcggcccgcgcatggccgagttgagcggttcccggctggccgcgcagcaacagatggaaggcctcctggcgccgcaccggcccaaggagcccgcgtggttcctggccaccgtcggcgtctcgcccgaccaccagggcaagggtctgggcagcgccgtcgtgctccccggagtggaggcggccgagcgcgccggggtgcccgccttcctggagacctccgcgccccgcaacctccccttctacgagcggctcggcttcaccgtcaccgccgacgtcgaggtgcccgaaggaccgcgcacctggtgcatgacccgcaagcccggtgcctga

SEQ ID NO: 1476 - DNA, 2196 bp, Artificial Sequence
  Synthetic Polynucleotides
atggccttaccagtgaccgccttgctcctgccgctggccttgctgctccacgccgccaggccggacatcctgctgacacagtctcccgccacactgtcactgtctccaggcgaaagagccacactgagctgtagagccagccagagcgtggactacgacggcgacagctacctgaactggtatcagcagaagcccggccagcctcctaagctgctgatctacgatgccagcaacctggtgtctggcatccctcctagattttccggcagcggctctggcaccgatttcaccctgaccatcagcagactggaacccgaggacttcgccgtgtaccactgtcagcagagcacagaggacccctggacatttggcggaggcaccaagctggaaatcaaaggcggaggcggaagtggaggcggaggatctggcggcggaggctctcaggtgcagctggttgaatctggcggcggacttgttgagcctggcggatctctgagactgagctgcatgagcggctacgccttcagcagctactggatgaactgggtccgacagatgcccggcaaaggactggaatggatgggccagatttggcctggcgacggcgataccaactacaaccccagcctgaagtccagagtgaccatcaccgccgatgagagcaccagcaccgcctacatggaactgtctagcctgaaggccgaggatacagccgtgtacttctgcgccagacgggaaaccacaaccgtgggcagatattactacgctatggactactggggccagggcaccctggttacagtctcttctacgcgtgagcagaaactgatctcggaagaggatctggcgaagcccaccacgacgccagcgccgcgaccaccaacaccggcgcccaccatcgcgtcgcagcccctgtccctgcgcccagaggcgtgccggccagcggcggggggcgcagtgcacacgagggggctggacttcgcctgtgacatctacatctgggcgcccttggccgggacttgtggggtccttctcctgtcactggttatcaccctttactgcaaacggggcagaaagaaactcctgtatatattcaaacaaccatttatgagaccagtacaaactactcaagaggaagatggctgtagctgccgatttccagaagaagaagaaggaggatgtgaactgagagtgaagttcagcaggagcgcagacgcccccgcgtaccagcagggccagaaccagctctataacgagctgaatctaggacgaagagaggagtacgatgttttggacaagagacgtggccgggaccctgagatggggggaaagccgagaaggaagaaccctcaggaaggcctgtacaatgaactgcagaaagataagatggcggaggcctacagtgagattgggatgaaaggcgagcgccggaggggcaaggggcacgatggcctttaccagggtctcagtacagccaccaaggacacctacgacgcccttcacatgcaggccctgccccctcgctctagtggctccggcgagggcagaggaagtctactaacctgcggagatgtggaagaaaatcctggcccacatatgaccgagtacaagcccacggtgcgcctcgccacccgcgacgacgtccccagggccgtacgcaccctcgccgccgcgttcgccgactaccccgccacgcgccacaccgtcgatccggaccgccacatcgagcgggtcaccgagctgcaagaactcttcctcacgcgcgtcgggctcgacatcggcaaggtgtgggtcgcggacgacggcgccgcggtggcggtctggaccacgccggagagcgtcgaagcgggggcggtgttcgccgagatcggcccgcgcatggccgagttgagcggttcccggctggccgcgcagcaacagatggaaggcctcctggcgccgcaccggcccaaggagcccgcgtggttcctggccaccgtcggcgtctcgcccgaccaccagggcaagggtctgggcagcgccgtcgtgctccccggagtggaggcggccgagcgcgccggggtgcccgccttcctggagacctccgcgccccgcaacctccccttctacgagcggctcggcttcaccgtcaccgccgacgtcgaggtgcccgaaggaccgcgcacctggtgcatgacccgcaagcccggtgcctga

SEQ ID NO: 1477 - DNA, 2187 bp, Artificial Sequence
  Synthetic Polynucleotides
atggccttaccagtgaccgccttgctcctgccgctggccttgctgctccacgccgccaggccggacatcctgctgacacagtctcccgccacactgtcactgtctccaggcgaaagagccacactgagctgtagagccagccagagcgtggacaactacggcatcagcttcatgaactggtatcagcagaagcccggccagcctcctaagctgctgatctacgccgccagcaatcaaggctctggcatccccagcagattttccggctctggaagcggcaccgacttcaccctgaccataagcagcctggaacctgaggacttcgccatgtacttttgccagcagagcaacgaggtgcccagaacctttggcggaggcaccaagctggaaatcaaaggcggaggcggaagtggaggcggaggatctggcggcggaggctctcaggtgcaactggttgagtctggcggcggacttgttgaacctggcggaagcctgagactgagctgcatgagcggctacgcctttagcagctcctggatgaactgggtccgacagatgcctggcaaaggactggaatggatgggcagaatctaccccggcgacggcgacaccaactacaacggcaagttcaaagaacgggtcaccatcaccgccgacgagagcacaagcaccgcctacatggaactgagcagcctgaaggccgaggataccgccgtgtacttctgcgccagaagcgagtattggggcaactactgggctatggactactggggccagggcacactggtcacagtgtctagcacgcgtgagcagaaactgatctcggaagaggatctggcgaagcccaccacgacgccagcgccgcgaccaccaacaccggcgcccaccatcgcgtcgcagcccctgtccctgcgcccagaggcgtgccggccagcggcggggggcgcagtgcacacgagggggctggacttcgcctgtgacatctacatctgggcgcccttggccgggacttgtggggtccttctcctgtcactggttatcaccctttactgcaaacggggcagaaagaaactcctgtatatattcaaacaaccatttatgagaccagtacaaactactcaagaggaagatggctgtagctgccgatttccagaagaagaagaaggaggatgtgaactgagagtgaagttcagcaggagcgcagacgcccccgcgtaccagcagggccagaaccagctctataacgagctgaatctaggacgaagagaggagtacgatgttttggacaagagacgtggccgggaccctgagatggggggaaagccgagaaggaagaaccctcaggaaggcctgtacaatgaactgcagaaagataagatggcggaggcctacagtgagattgggatgaaaggcgagcgccggaggggcaaggggcacgatggcctttaccagggtctcagtacagccaccaaggacacctacgacgcccttcacatgcaggccctgccccctcgctctagtggctccggcgagggcagaggaagtctactaacctgcggagatgtggaagaaaatcctggcccacatatgaccgagtacaagcccacggtgcgcctcgccacccgcgacgacgtccccagggccgtacgcaccctcgccgccgcgttcgccgactaccccgccacgcgccacaccgtcgatccggaccgccacatcgagcgggtcaccgagctgcaagaactcttcctcacgcgcgtcgggctcgacatcggcaaggtgtgggtcgcggacgacggcgccgcggtggcggtctggaccacgccggagagcgtcgaagcgggggcggtgttcgccgagatcggcccgcgcatggccgagttgagcggttcccggctggccgcgcagcaacagatggaaggcctcctggcgccgcaccggcccaaggagcccgcgtggttcctggccaccgtcggcgtctcgcccgaccaccagggcaagggtctgggcagcgccgtcgtgctccccggagtggaggcggccgagcgcgccggggtgcccgccttcctggagacctccgcgccccgcaacctccccttctacgagcggctcggcttcaccgtcaccgccgacgtcgaggtgcccgaaggaccgcgcacctggtgcatgacccgcaagcccggtgcctga

SEQ ID NO: 1478 - DNA, 2184 bp, Artificial Sequence
  Synthetic Polynucleotides
atggccttaccagtgaccgccttgctcctgccgctggccttgctgctccacgccgccaggccggacatcctgctgacacagtctcccgccacactgtcactgtctccaggcgaaagagccacactgagctgcaaggccagtcagaacgtgggcacaaacgtggcctggtatcagcagaagcctggacagcctcctaagctgctgatctacagcgccacctaccggaactctggcatccctgccagattttctggcagcggctctggcaccgagttcaccctgaccatcaccaacgtgcagagcaaggacctggccgactacttctacttctgccagtacaacagatacccctacaccagcggcggaggcaccaagctggaaatcaaaagaggcggaggcggaagtggaggcggaggatctggcggcggaggctctcaggtgcaactggttgaatcaggcggaggactggtggaacctggcggatctctgagactgagctgtatgagcggctacgccttcagcagctactggatgaactgggtccgacagatgcccggcaaaggactggaatggatgggccaaatctaccccggcgacggcgacaccaactacaacggcaagttcaagggcagagtgacaatcaccgccgacgagagcacaagcaccgcctacatggaactgagcagcctgaaggccgaggataccgccgtgtacttctgcgccagaaagaccatcagcagcgtggtggatttctacttcgacaactggggccagggcaccctggtcacagtttcttctacgcgtgagcagaaactgatctcggaagaggatctggcgaagcccaccacgacgccagcgccgcgaccaccaacaccggcgcccaccatcgcgtcgcagcccctgtccctgcgcccagaggcgtgccggccagcggcggggggcgcagtgcacacgagggggctggacttcgcctgtgacatctacatctgggcgcccttggccgggacttgtggggtccttctcctgtcactggttatcaccctttactgcaaacggggcagaaagaaactcctgtatatattcaaacaaccatttatgagaccagtacaaactactcaagaggaagatggctgtagctgccgatttccagaagaagaagaaggaggatgtgaactgagagtgaagttcagcaggagcgcagacgcccccgcgtaccagcagggccagaaccagctctataacgagctgaatctaggacgaagagaggagtacgatgttttggacaagagacgtggccgggaccctgagatggggggaaagccgagaaggaagaaccctcaggaaggcctgtacaatgaactgcagaaagataagatggcggaggcctacagtgagattgggatgaaaggcgagcgccggaggggcaaggggcacgatggcctttaccagggtctcagtacagccaccaaggacacctacgacgcccttcacatgcaggccctgccccctcgctctagtggctccggcgagggcagaggaagtctactaacctgcggagatgtggaagaaaatcctggcccacatatgaccgagtacaagcccacggtgcgcctcgccacccgcgacgacgtccccagggccgtacgcaccctcgccgccgcgttcgccgactaccccgccacgcgccacaccgtcgatccggaccgccacatcgagcgggtcaccgagctgcaagaactcttcctcacgcgcgtcgggctcgacatcggcaaggtgtgggtcgcggacgacggcgccgcggtggcggtctggaccacgccggagagcgtcgaagcgggggcggtgttcgccgagatcggcccgcgcatggccgagttgagcggttcccggctggccgcgcagcaacagatggaaggcctcctggcgccgcaccggcccaaggagcccgcgtggttcctggccaccgtcggcgtctcgcccgaccaccagggcaagggtctgggcagcgccgtcgtgctccccggagtggaggcggccgagcgcgccggggtgcccgccttcctggagacctccgcgccccgcaacctccccttctacgagcggctcggcttcaccgtcaccgccgacgtcgaggtgcccgaaggaccgcgcacctggtgcatgacccgcaagcccggtgcctga

SEQ ID NO: 1479 - DNA, 2223 bp, Artificial Sequence
  Synthetic Polynucleotides
atggccttaccagtgaccgccttgctcctgccgctggccttgctgctccacgccgccaggccgatcaacatctacaacgccgagcctgccaatcctagcgagaagaacagccccgaattccagatcgtgctgacacagtctccagccacactgagcgcttctccaggcgagaaggccaccatgacatgttctgccagcagcggcgtgaactacatgcactggtatcagcagaagcccggcacaagccccaagcggtggatctacgataccgacaagacagccagcggagtgcccgccagattttctggctctggcagcggcacatcctacagcctgacaatcagcagcatggaagccgaggatgccgccacctactactgtcaccagagaggcagctacaccttcggcggaggcaccaagctggaaatcaaaggcggaggcggaagtggaggcggaggatctggcggcggaggctctcaagttcagctggaacaacctggcgctgaggtggtcaaaccaggggcctctgtgaaggtgtcctgcaagacaagcggctacacattcaccagcaactggatgcactgggtcaagcagacccctggcaaaggactggaatggatcggcgagatcgaccccagcgactcctacaccaactacaaccagaagttcgacggcaaggccaagctgaccgtggacaagtctagcagcaccgcctacatggaagtgtccgatctgaccgccgaagatagcgccacatattactgcgccagaggcagcaacccctactactacgctatggactattggggccagggcaccagcgtgacagtctcttctacgcgtgagcagaaactgatctcggaagaggatctggcgaagcccaccacgacgccagcgccgcgaccaccaacaccggcgcccaccatcgcgtcgcagcccctgtccctgcgcccagaggcgtgccggccagcggcggggggcgcagtgcacacgagggggctggacttcgcctgtgacatctacatctgggcgcccttggccgggacttgtggggtccttctcctgtcactggttatcaccctttactgcaaacggggcagaaagaaactcctgtatatattcaaacaaccatttatgagaccagtacaaactactcaagaggaagatggctgtagctgccgatttccagaagaagaagaaggaggatgtgaactgagagtgaagttcagcaggagcgcagacgcccccgcgtaccagcagggccagaaccagctctataacgagctgaatctaggacgaagagaggagtacgatgttttggacaagagacgtggccgggaccctgagatggggggaaagccgagaaggaagaaccctcaggaaggcctgtacaatgaactgcagaaagataagatggcggaggcctacagtgagattgggatgaaaggcgagcgccggaggggcaaggggcacgatggcctttaccagggtctcagtacagccaccaaggacacctacgacgcccttcacatgcaggccctgccccctcgctctagtggctccggcgagggcagaggaagtctactaacctgcggagatgtggaagaaaatcctggcccacatatgaccgagtacaagcccacggtgcgcctcgccacccgcgacgacgtccccagggccgtacgcaccctcgccgccgcgttcgccgactaccccgccacgcgccacaccgtcgatccggaccgccacatcgagcgggtcaccgagctgcaagaactcttcctcacgcgcgtcgggctcgacatcggcaaggtgtgggtcgcggacgacggcgccgcggtggcggtctggaccacgccggagagcgtcgaagcgggggcggtgttcgccgagatcggcccgcgcatggccgagttgagcggttcccggctggccgcgcagcaacagatggaaggcctcctggcgccgcaccggcccaaggagcccgcgtggttcctggccaccgtcggcgtctcgcccgaccaccagggcaagggtctgggcagcgccgtcgtgctccccggagtggaggcggccgagcgcgccggggtgcccgccttcctggagacctccgcgccccgcaacctccccttctacgagcggctcggcttcaccgtcaccgccgacgtcgaggtgcccgaaggaccgcgcacctggtgcatgacccgcaagcccggtgcctga

SEQ ID NO: 1480 - DNA, 2181 bp, Artificial Sequence
  Synthetic Polynucleotides
atggccttaccagtgaccgccttgctcctgccgctggccttgctgctccacgccgccaggccggacatccagatgacacagagccctagcagcctgtctgccagcgtgggagacagagtgaccatcacatgcaaggccagcgaccacatcaacaactggctggcctggtatcagcagaagcctggacaggcccctaagctgctgatctacggcgctaccacactggaaacaggcgtgcccagcagattttctggcagcggctctggcaccgactacaccctgacaatatccagcctccagcctgaggacttcgccacctactactgtcagcagagctggaacaccccttggacattcggccagggcaccaagctggaaatcaagagaggcggaggcggaagtggaggcggaggatctggcggcggaggctctcaagttcagcttcaacagcctggcgctgagctggtcaaacctggcgcttctgtgaagatgagctgcaaagccagcggctacgccttcagcagctactggatcaactggatgaagcagaaacccggccagggactcgaatggatcggccaaatctatcccggcgacggcgacaccaactacaacggcaagttcaagggcagagccacactgaccgccgatacctctagcagcacagcctacatgcagctgagcagcctgaccagcgaagatagcgccgtgtacttctgtgcccggtccatcacaacagtcgtgggctgcgctatggactattggggccagggaacaagcgtgaccgtgtctagtacgcgtgagcagaaactgatctcggaagaggatctggcgaagcccaccacgacgccagcgccgcgaccaccaacaccggcgcccaccatcgcgtcgcagcccctgtccctgcgcccagaggcgtgccggccagcggcggggggcgcagtgcacacgagggggctggacttcgcctgtgacatctacatctgggcgcccttggccgggacttgtggggtccttctcctgtcactggttatcaccctttactgcaaacggggcagaaagaaactcctgtatatattcaaacaaccatttatgagaccagtacaaactactcaagaggaagatggctgtagctgccgatttccagaagaagaagaaggaggatgtgaactgagagtgaagttcagcaggagcgcagacgcccccgcgtaccagcagggccagaaccagctctataacgagctgaatctaggacgaagagaggagtacgatgttttggacaagagacgtggccgggaccctgagatggggggaaagccgagaaggaagaaccctcaggaaggcctgtacaatgaactgcagaaagataagatggcggaggcctacagtgagattgggatgaaaggcgagcgccggaggggcaaggggcacgatggcctttaccagggtctcagtacagccaccaaggacacctacgacgcccttcacatgcaggccctgccccctcgctctagtggctccggcgagggcagaggaagtctactaacctgcggagatgtggaagaaaatcctggcccacatatgaccgagtacaagcccacggtgcgcctcgccacccgcgacgacgtccccagggccgtacgcaccctcgccgccgcgttcgccgactaccccgccacgcgccacaccgtcgatccggaccgccacatcgagcgggtcaccgagctgcaagaactcttcctcacgcgcgtcgggctcgacatcggcaaggtgtgggtcgcggacgacggcgccgcggtggcggtctggaccacgccggagagcgtcgaagcgggggcggtgttcgccgagatcggcccgcgcatggccgagttgagcggttcccggctggccgcgcagcaacagatggaaggcctcctggcgccgcaccggcccaaggagcccgcgtggttcctggccaccgtcggcgtctcgcccgaccaccagggcaagggtctgggcagcgccgtcgtgctccccggagtggaggcggccgagcgcgccggggtgcccgccttcctggagacctccgcgccccgcaacctccccttctacgagcggctcggcttcaccgtcaccgccgacgtcgaggtgcccgaaggaccgcgcacctggtgcatgacccgcaagcccggtgcctga

SEQ ID NO: 1481 - DNA, 2205 bp, Artificial Sequence
  Synthetic Polynucleotides
atggccttaccagtgaccgccttgctcctgccgctggccttgctgctccacgccgccaggccggacgacatccagctgacccagagccccagcagcctgagcgccagcgtgggcgacagagtgaccatcacctgcaaggccagccagagcgtggactacgacggcgacagctacctgaactggtaccagcagatccccggcaaggcccccaagctgctgatctacgacgccagcaacctggtgagcggcatcccccccagattcagcggcagcggcagcggcaccgactacaccttcaccatcagcagcctgcagcccgaggacatcgccacctaccactgccagcagagcaccgaggacccctggaccttcggcggcggcaccaagctgcagatcaagagaggcggaggcggaagtggaggcggaggatctggcggcggaggctctcaggtgcagctgcagcagagcggcgccgaggtgaagaagcccggcagcagcgtgaaggtgagctgcaaggccagcggctacgccttcagcagctactggatgaactgggtgagacagagacccggccagggcctggagtggatcggccagatttggcccggcgacggcgacaccaactacaacggcaagttcaagggcagagccaccatcaccgccgacgagagcaccaacaccgcctacatggagctgagcagcctgagaagcgaggacaccgccttctacagctgcgccagaagagagaccaccaccgtgggcagatactactacgctatggactactggggccagggcaccaccgtgaccgtgagcagcacgcgtgagcagaaactgatctcggaagaggatctggcgaagcccaccacgacgccagcgccgcgaccaccaacaccggcgcccaccatcgcgtcgcagcccctgtccctgcgcccagaggcgtgccggccagcggcggggggcgcagtgcacacgagggggctggacttcgcctgtgacatctacatctgggcgcccttggccgggacttgtggggtccttctcctgtcactggttatcaccctttactgcaaacggggcagaaagaaactcctgtatatattcaaacaaccatttatgagaccagtacaaactactcaagaggaagatggctgtagctgccgatttccagaagaagaagaaggaggatgtgaactgagagtgaagttcagcaggagcgcagacgcccccgcgtaccagcagggccagaaccagctctataacgagctgaatctaggacgaagagaggagtacgatgttttggacaagagacgtggccgggaccctgagatggggggaaagccgagaaggaagaaccctcaggaaggcctgtacaatgaactgcagaaagataagatggcggaggcctacagtgagattgggatgaaaggcgagcgccggaggggcaaggggcacgatggcctttaccagggtctcagtacagccaccaaggacacctacgacgcccttcacatgcaggccctgccccctcgctctagtggctccggcgagggcagaggaagtctactaacctgcggagatgtggaagaaaatcctggcccacatatgaccgagtacaagcccacggtgcgcctcgccacccgcgacgacgtccccagggccgtacgcaccctcgccgccgcgttcgccgactaccccgccacgcgccacaccgtcgatccggaccgccacatcgagcgggtcaccgagctgcaagaactcttcctcacgcgcgtcgggctcgacatcggcaaggtgtgggtcgcggacgacggcgccgcggtggcggtctggaccacgccggagagcgtcgaagcgggggcggtgttcgccgagatcggcccgcgcatggccgagttgagcggttcccggctggccgcgcagcaacagatggaaggcctcctggcgccgcaccggcccaaggagcccgcgtggttcctggccaccgtcggcgtctcgcccgaccaccagggcaagggtctgggcagcgccgtcgtgctccccggagtggaggcggccgagcgcgccggggtgcccgccttcctggagacctccgcgccccgcaacctccccttctacgagcggctcggcttcaccgtcaccgccgacgtcgaggtgcccgaaggaccgcgcacctggtgcatgacccgcaagcccggtgcctga

SEQ ID NO: 1482 - DNA, 2178 bp, Artificial Sequence
  Synthetic Polynucleotides
atggccttaccagtgaccgccttgctcctgccgctggccttgctgctccacgccgccaggccgcagtctgtgctgacacagcctgcctctgtgtctggctctcctggccagagcatcaccatcagctgtaccggcaccagctctgatgtcggcggctacaattacgtgtcctggtatcagcagcaccccggcaaggcccctaagctgatgatctacgacgtgaacaacagacccagcgaggtgtccaacagattcagcggcagcaagagcggcaataccgccagcctgacaatctctggactgcaagccgaggacgaggccgactactactgtagcagctacaccacaggcagcagagccgtttttggcggaggcaccaaactgacagtgcttggaggcggaggcggaagtggaggcggaggatctggcggcggaggctctgaagttcagctggttcagtctggcgccgaagtgaagaagcctggcgagtctctgaccatctcctgcaaggccagcggctacagcttccccaactactggatcacctgggtccgacagatgtccggtggtggccttgagtggatgggcagaatcgatcccggcgactcctacaccacctacaatcctagcttccagggccacgtgaccatcagcatcgacaagagcaccaacaccgcctacctgcactggaacagcctgaaagccagcgacaccgccatgtactactgcgcccggtactatgtgtccctggtggacatttggggccagggcacactggtcacagtgtctagtacgcgtgagcagaaactgatctcggaagaggatctggcgaagcccaccacgacgccagcgccgcgaccaccaacaccggcgcccaccatcgcgtcgcagcccctgtccctgcgcccagaggcgtgccggccagcggcggggggcgcagtgcacacgagggggctggacttcgcctgtgacatctacatctgggcgcccttggccgggacttgtggggtccttctcctgtcactggttatcaccctttactgcaaacggggcagaaagaaactcctgtatatattcaaacaaccatttatgagaccagtacaaactactcaagaggaagatggctgtagctgccgatttccagaagaagaagaaggaggatgtgaactgagagtgaagttcagcaggagcgcagacgcccccgcgtaccagcagggccagaaccagctctataacgagctgaatctaggacgaagagaggagtacgatgttttggacaagagacgtggccgggaccctgagatggggggaaagccgagaaggaagaaccctcaggaaggcctgtacaatgaactgcagaaagataagatggcggaggcctacagtgagattgggatgaaaggcgagcgccggaggggcaaggggcacgatggcctttaccagggtctcagtacagccaccaaggacacctacgacgcccttcacatgcaggccctgccccctcgctctagtggctccggcgagggcagaggaagtctactaacctgcggagatgtggaagaaaatcctggcccacatatgaccgagtacaagcccacggtgcgcctcgccacccgcgacgacgtccccagggccgtacgcaccctcgccgccgcgttcgccgactaccccgccacgcgccacaccgtcgatccggaccgccacatcgagcgggtcaccgagctgcaagaactcttcctcacgcgcgtcgggctcgacatcggcaaggtgtgggtcgcggacgacggcgccgcggtggcggtctggaccacgccggagagcgtcgaagcgggggcggtgttcgccgagatcggcccgcgcatggccgagttgagcggttcccggctggccgcgcagcaacagatggaaggcctcctggcgccgcaccggcccaaggagcccgcgtggttcctggccaccgtcggcgtctcgcccgaccaccagggcaagggtctgggcagcgccgtcgtgctccccggagtggaggcggccgagcgcgccggggtgcccgccttcctggagacctccgcgccccgcaacctccccttctacgagcggctcggcttcaccgtcaccgccgacgtcgaggtgcccgaaggaccgcgcacctggtgcatgacccgcaagcccggtgcctga

SEQ ID NO: 1483 - DNA, 2196 bp, Artificial Sequence
  Synthetic Polynucleotides
atggccttaccagtgaccgccttgctcctgccgctggccttgctgctccacgccgccaggccgcagtctgtggtcacacagcctccatccgtgtctgctgcccctggacagaaagtgaccatctcctgtagcggcagcagcagcaacatcggcaacaactacgtgtcctggtatcagcagctccccggcacagctcccaaactgctgatctacgacaacaacaagcggcccagcggcatccccgatagattttctggcagcaagagcggcaccagcgccacactgggaattaccggacttcagacaggcgacgaggccgactactactgtggcacatgggatggcagcctgtacaccatgcttttcggcggaggcaccaagctgacagtgcttggcggaggcggaagtggaggcggaggatctggcggcggaggctctgaagtgcaactggtggaatctggcggcggactggttaagcctggcggatctctgagactgtcttgtgccgccagcggcttcaccttcagcaatgcctggatgagctgggttcgacaggcccctggaaaaggactggaatgggtcggattcatccggtccaaagcctacggcggcaccacagaatatgccgcctctgtgaagggcagattcaccatcagccgggacgacagcaagtctatcgcctacctccagatgaacaacctgaaaaccgaggacaccgccgtgtactactgcgccagagatggcctgtacagcagctcttggtacgacagcgattactggggccagggcacactggtcacagtgtcatctacgcgtgagcagaaactgatctcggaagaggatctggcgaagcccaccacgacgccagcgccgcgaccaccaacaccggcgcccaccatcgcgtcgcagcccctgtccctgcgcccagaggcgtgccggccagcggcggggggcgcagtgcacacgagggggctggacttcgcctgtgacatctacatctgggcgcccttggccgggacttgtggggtccttctcctgtcactggttatcaccctttactgcaaacggggcagaaagaaactcctgtatatattcaaacaaccatttatgagaccagtacaaactactcaagaggaagatggctgtagctgccgatttccagaagaagaagaaggaggatgtgaactgagagtgaagttcagcaggagcgcagacgcccccgcgtaccagcagggccagaaccagctctataacgagctgaatctaggacgaagagaggagtacgatgttttggacaagagacgtggccgggaccctgagatggggggaaagccgagaaggaagaaccctcaggaaggcctgtacaatgaactgcagaaagataagatggcggaggcctacagtgagattgggatgaaaggcgagcgccggaggggcaaggggcacgatggcctttaccagggtctcagtacagccaccaaggacacctacgacgcccttcacatgcaggccctgccccctcgctctagtggctccggcgagggcagaggaagtctactaacctgcggagatgtggaagaaaatcctggcccacatatgaccgagtacaagcccacggtgcgcctcgccacccgcgacgacgtccccagggccgtacgcaccctcgccgccgcgttcgccgactaccccgccacgcgccacaccgtcgatccggaccgccacatcgagcgggtcaccgagctgcaagaactcttcctcacgcgcgtcgggctcgacatcggcaaggtgtgggtcgcggacgacggcgccgcggtggcggtctggaccacgccggagagcgtcgaagcgggggcggtgttcgccgagatcggcccgcgcatggccgagttgagcggttcccggctggccgcgcagcaacagatggaaggcctcctggcgccgcaccggcccaaggagcccgcgtggttcctggccaccgtcggcgtctcgcccgaccaccagggcaagggtctgggcagcgccgtcgtgctccccggagtggaggcggccgagcgcgccggggtgcccgccttcctggagacctccgcgccccgcaacctccccttctacgagcggctcggcttcaccgtcaccgccgacgtcgaggtgcccgaaggaccgcgcacctggtgcatgacccgcaagcccggtgcctga

SEQ ID NO: 1484 - DNA, 2211 bp, Artificial Sequence
  Synthetic Polynucleotides
atggccttaccagtgaccgccttgctcctgccgctggccttgctgctccacgccgccaggccgcagtctgtgctgacacagcctcctagtgtgtctggcgctcctggacagagagtgaccatctcttgtaccggcagcagcagcaatatcggagccggctatgacgtgcactggtatcagcagctccctggcacagcccctaaactgctgatcttcggcaacagcaacagacccagcggcgtgcccgatagattcagcggctttaagagcggcacaagcgccagcctggctatcactggactgcaagccgaggacgaggccgactacttctgccagagctacgatagcagcctgagcggcagcggagtgtttggcacaggcaccaaagtgacagtgcttggcggcggaggcggaagtggaggcggaggatctggcggcggaggctctcaaatgcaactggttcaaagcggcggtggcctggtgcaacctggaagaagtctgagactgagctgtgccgccagcggcttcaccttcgatgattacgccatgcactgggtccgacaggcccctggaaaaggactggaatgggtgtccggcatctcctggaatagcggctctatcggctacgccgacagcgtgaagggcagattcaccatcagccgggacaacgccaagaacagcctgtacctccagatgaactccctgagagccgaggatacagccctgtactactgcgccaaggacatccacagcggcagctactacggcctgctgtactacgctatggacgtgtggggccagggcacaaccgtgacagtttcttctacgcgtgagcagaaactgatctcggaagaggatctggcgaagcccaccacgacgccagcgccgcgaccaccaacaccggcgcccaccatcgcgtcgcagcccctgtccctgcgcccagaggcgtgccggccagcggcggggggcgcagtgcacacgagggggctggacttcgcctgtgacatctacatctgggcgcccttggccgggacttgtggggtccttctcctgtcactggttatcaccctttactgcaaacggggcagaaagaaactcctgtatatattcaaacaaccatttatgagaccagtacaaactactcaagaggaagatggctgtagctgccgatttccagaagaagaagaaggaggatgtgaactgagagtgaagttcagcaggagcgcagacgcccccgcgtaccagcagggccagaaccagctctataacgagctgaatctaggacgaagagaggagtacgatgttttggacaagagacgtggccgggaccctgagatggggggaaagccgagaaggaagaaccctcaggaaggcctgtacaatgaactgcagaaagataagatggcggaggcctacagtgagattgggatgaaaggcgagcgccggaggggcaaggggcacgatggcctttaccagggtctcagtacagccaccaaggacacctacgacgcccttcacatgcaggccctgccccctcgctctagtggctccggcgagggcagaggaagtctactaacctgcggagatgtggaagaaaatcctggcccacatatgaccgagtacaagcccacggtgcgcctcgccacccgcgacgacgtccccagggccgtacgcaccctcgccgccgcgttcgccgactaccccgccacgcgccacaccgtcgatccggaccgccacatcgagcgggtcaccgagctgcaagaactcttcctcacgcgcgtcgggctcgacatcggcaaggtgtgggtcgcggacgacggcgccgcggtggcggtctggaccacgccggagagcgtcgaagcgggggcggtgttcgccgagatcggcccgcgcatggccgagttgagcggttcccggctggccgcgcagcaacagatggaaggcctcctggcgccgcaccggcccaaggagcccgcgtggttcctggccaccgtcggcgtctcgcccgaccaccagggcaagggtctgggcagcgccgtcgtgctccccggagtggaggcggccgagcgcgccggggtgcccgccttcctggagacctccgcgccccgcaacctccccttctacgagcggctcggcttcaccgtcaccgccgacgtcgaggtgcccgaaggaccgcgcacctggtgcatgacccgcaagcccggtgcctga

SEQ ID NO: 1485 - DNA, 2172 bp, Artificial Sequence
  Synthetic Polynucleotides
atggccttaccagtgaccgccttgctcctgccgctggccttgctgctccacgccgccaggccggactacatccacgtgacacagagccctagcagcctgtccgtgtccatcggcgatagagtgaccatcaactgccagacctctcaaggcgtgggcagcgacctgcactggtatcagcacaaacctggcagagcccctaagctgctgatccaccatgccagctctgtggaagatggcgtgcccagcagattttccggcaccggatttcacaccagcttcaacctgacaatcaacgacctccaggccgacgacatcggcacctactactgtcaagtgctccagagcttcggcagaggcagcagactggatacaaaaggcggaggcggaagtggaggcggaggatctggcggcggaggctctagggcacacctggtgcagtctggcaccgccatgaagaaacctggcgcttccgtcagagtgtcctgtcagacaagcggctacaccttcacagcccacatcctgttctggttcagacaggccccaggcagaggactggaatgggtcggatggatcaagccccagtacggggccgtgaatttcggcggaggcttcagagacagagtgaccctgaccagggacgtgtaccgggaaatcgcctacatggacatccggggcctgaagcctgatgacaccgccgtgtactactgcgccagggatagaagctacggcgacagctcttgggctctcgatgcttggggacagggcacaacagtggtggtgtctgctacgcgtgagcagaaactgatctcggaagaggatctggcgaagcccaccacgacgccagcgccgcgaccaccaacaccggcgcccaccatcgcgtcgcagcccctgtccctgcgcccagaggcgtgccggccagcggcggggggcgcagtgcacacgagggggctggacttcgcctgtgacatctacatctgggcgcccttggccgggacttgtggggtccttctcctgtcactggttatcaccctttactgcaaacggggcagaaagaaactcctgtatatattcaaacaaccatttatgagaccagtacaaactactcaagaggaagatggctgtagctgccgatttccagaagaagaagaaggaggatgtgaactgagagtgaagttcagcaggagcgcagacgcccccgcgtaccagcagggccagaaccagctctataacgagctgaatctaggacgaagagaggagtacgatgttttggacaagagacgtggccgggaccctgagatggggggaaagccgagaaggaagaaccctcaggaaggcctgtacaatgaactgcagaaagataagatggcggaggcctacagtgagattgggatgaaaggcgagcgccggaggggcaaggggcacgatggcctttaccagggtctcagtacagccaccaaggacacctacgacgcccttcacatgcaggccctgccccctcgctctagtggctccggcgagggcagaggaagtctactaacctgcggagatgtggaagaaaatcctggcccacatatgaccgagtacaagcccacggtgcgcctcgccacccgcgacgacgtccccagggccgtacgcaccctcgccgccgcgttcgccgactaccccgccacgcgccacaccgtcgatccggaccgccacatcgagcgggtcaccgagctgcaagaactcttcctcacgcgcgtcgggctcgacatcggcaaggtgtgggtcgcggacgacggcgccgcggtggcggtctggaccacgccggagagcgtcgaagcgggggcggtgttcgccgagatcggcccgcgcatggccgagttgagcggttcccggctggccgcgcagcaacagatggaaggcctcctggcgccgcaccggcccaaggagcccgcgtggttcctggccaccgtcggcgtctcgcccgaccaccagggcaagggtctgggcagcgccgtcgtgctccccggagtggaggcggccgagcgcgccggggtgcccgccttcctggagacctccgcgccccgcaacctccccttctacgagcggctcggcttcaccgtcaccgccgacgtcgaggtgcccgaaggaccgcgcacctggtgcatgacccgcaagcccggtgcctga

SEQ ID NO: 1486 - DNA, 2202 bp, Artificial Sequence
  Synthetic Polynucleotides
atggccttaccagtgaccgccttgctcctgccgctggccttgctgctccacgccgccaggccggacgtgcagatgatccagacccccgatagcctggccgtgtccctgggacagagagccaccatctcttgcagagccagcgagagcgtggacaactacggcatcagcttcatgcactggtatcagcagaagcccggccagagccccaagctgctgatctacagagcctccaacctggaaagcggcatccccgccagattttccggcagcggcagcagaaccgacttcaccctgaccatcaaccccgtggaaaccgacgacgtggcaacctactactgccagcagaacaacaaggacccccccacctttggcggaggcaccaagctggaaatcaagggcggaggcggaagtggaggcggaggatctggcggcggaggctctgggggaggcggctctcaggtgcaactccagcagtctggcgctgagcttgtgaagcctggggccagcgtgaagattagctgcaaggccagcggctacgccttcagcagctactggatgaactgggtcaagcagcggcctggcaagggcctggaatggatcggccaaatctaccccggcgacggcgacaccacctacaacggcaagttcaagggcaaggccaccctgacagccgacaagagcagcagcaccgtgtacatgcaactgaacagcctgaccagcgaggacagcgccgtgtacttctgcgtgcggtactactacggcagctccggctacttcgactattggggccagggcaccacactgaccgtgtcctctacgcgtgagcagaaactgatctcggaagaggatctggcgaagcccaccacgacgccagcgccgcgaccaccaacaccggcgcccaccatcgcgtcgcagcccctgtccctgcgcccagaggcgtgccggccagcggcggggggcgcagtgcacacgagggggctggacttcgcctgtgacatctacatctgggcgcccttggccgggacttgtggggtccttctcctgtcactggttatcaccctttactgcaaacggggcagaaagaaactcctgtatatattcaaacaaccatttatgagaccagtacaaactactcaagaggaagatggctgtagctgccgatttccagaagaagaagaaggaggatgtgaactgagagtgaagttcagcaggagcgcagacgcccccgcgtaccagcagggccagaaccagctctataacgagctgaatctaggacgaagagaggagtacgatgttttggacaagagacgtggccgggaccctgagatggggggaaagccgagaaggaagaaccctcaggaaggcctgtacaatgaactgcagaaagataagatggcggaggcctacagtgagattgggatgaaaggcgagcgccggaggggcaaggggcacgatggcctttaccagggtctcagtacagccaccaaggacacctacgacgcccttcacatgcaggccctgccccctcgctctagtggctccggcgagggcagaggaagtctactaacctgcggagatgtggaagaaaatcctggcccacatatgaccgagtacaagcccacggtgcgcctcgccacccgcgacgacgtccccagggccgtacgcaccctcgccgccgcgttcgccgactaccccgccacgcgccacaccgtcgatccggaccgccacatcgagcgggtcaccgagctgcaagaactcttcctcacgcgcgtcgggctcgacatcggcaaggtgtgggtcgcggacgacggcgccgcggtggcggtctggaccacgccggagagcgtcgaagcgggggcggtgttcgccgagatcggcccgcgcatggccgagttgagcggttcccggctggccgcgcagcaacagatggaaggcctcctggcgccgcaccggcccaaggagcccgcgtggttcctggccaccgtcggcgtctcgcccgaccaccagggcaagggtctgggcagcgccgtcgtgctccccggagtggaggcggccgagcgcgccggggtgcccgccttcctggagacctccgcgccccgcaacctccccttctacgagcggctcggcttcaccgtcaccgccgacgtcgaggtgcccgaaggaccgcgcacctggtgcatgacccgcaagcccggtgcctga

SEQ ID NO: 1487 - DNA, 2175 bp, Artificial Sequence
  Synthetic Polynucleotides
atggccttaccagtgaccgccttgctcctgccgctggccttgctgctccacgccgccaggccggacgtgcagatgatccagacccccagcagcctgtctgccagcctgggcgatagagtgaccatcagctgtcgggccagccaggacatcggcaactacctgaactggtatcagcagaaacccgacggcaccgtgaagctgctgatctactacaccagcagactgcacagcggcgtgcccagcagattttctggcagcggctctggcaccgagtacagcctgaccatctccaacctggaacaggaagatattgctacctacttctgtcagcaaggcagcgccctgccccctacatttggcggcggaacaaagctggaaatcaacggcggaggcggaagtggaggcggaggatctggcggcggaggctctgctctccagctccagcagtctggcgcagaactcgtgcggcctggcgcttctgtgaccctgagctgtaaagccagcggctacaccttcaccgactacgagatgcactgggtcaagcagacccctgtgcacggcctggaatggatcggagccatcgaccctgagacaggcggcaccgcctacaaccagaagttcgagggcaaggccatcctgaccgccgacaagagcagcagcacagcctacatggaactgcggagcctgacctccgaggacagccccgtgtactactgtgccagacggcggtactacggcagcagctccttcgactattggggccagggcaccaccctgaccgtgtctagtacgcgtgagcagaaactgatctcggaagaggatctggcgaagcccaccacgacgccagcgccgcgaccaccaacaccggcgcccaccatcgcgtcgcagcccctgtccctgcgcccagaggcgtgccggccagcggcggggggcgcagtgcacacgagggggctggacttcgcctgtgacatctacatctgggcgcccttggccgggacttgtggggtccttctcctgtcactggttatcaccctttactgcaaacggggcagaaagaaactcctgtatatattcaaacaaccatttatgagaccagtacaaactactcaagaggaagatggctgtagctgccgatttccagaagaagaagaaggaggatgtgaactgagagtgaagttcagcaggagcgcagacgcccccgcgtaccagcagggccagaaccagctctataacgagctgaatctaggacgaagagaggagtacgatgttttggacaagagacgtggccgggaccctgagatggggggaaagccgagaaggaagaaccctcaggaaggcctgtacaatgaactgcagaaagataagatggcggaggcctacagtgagattgggatgaaaggcgagcgccggaggggcaaggggcacgatggcctttaccagggtctcagtacagccaccaaggacacctacgacgcccttcacatgcaggccctgccccctcgctctagtggctccggcgagggcagaggaagtctactaacctgcggagatgtggaagaaaatcctggcccacatatgaccgagtacaagcccacggtgcgcctcgccacccgcgacgacgtccccagggccgtacgcaccctcgccgccgcgttcgccgactaccccgccacgcgccacaccgtcgatccggaccgccacatcgagcgggtcaccgagctgcaagaactcttcctcacgcgcgtcgggctcgacatcggcaaggtgtgggtcgcggacgacggcgccgcggtggcggtctggaccacgccggagagcgtcgaagcgggggcggtgttcgccgagatcggcccgcgcatggccgagttgagcggttcccggctggccgcgcagcaacagatggaaggcctcctggcgccgcaccggcccaaggagcccgcgtggttcctggccaccgtcggcgtctcgcccgaccaccagggcaagggtctgggcagcgccgtcgtgctccccggagtggaggcggccgagcgcgccggggtgcccgccttcctggagacctccgcgccccgcaacctccccttctacgagcggctcggcttcaccgtcaccgccgacgtcgaggtgcccgaaggaccgcgcacctggtgcatgacccgcaagcccggtgcctga

SEQ ID NO: 1488 - DNA, 2196 bp, Artificial Sequence
  Synthetic Polynucleotides
atgaggctccctgctcagctcctggggctgctaatgctctgggtctctggaagcagtggggatgttgtgatgactcagtctccactctccctgcccgtcacccctggagcgccggcctccatctcctgcagatccagtcagagcattgtacatagtaatggaaacacctatttagagtggtatcttcaaaagccagggcagtctccaaagctcctgatctataaagtttccaaccgattttctggagtccctgacaggttcagtggaagtggatcaggcacagattttacactgagaatcagcagagtggaggctgaggatgttggaatttattactgctttcaaggttcacatgttcctccgacgttcggccctgggaccaaattggaaatcaaaggcggaggcggaagtggaggcggaggatctggcggcggaggctctgaagtgcagctggtggagtctgggggaggcttggtccagcctggggggtccctgagactctcctgttcagcctctggattcacctttagtagctttggaatgcactgggtccgccaggctccagggaaggggctggaatgggtggcctacattagtagtggcagtagtaccatctactatggagacaccgtgaagggccgattcaccatctccagagacaacgccaagaactcactgtttctgcaaatgagcagcctgagagccgaggacacggccgtgtattattgtgcgagagaggggggatattactacggaaggagttactatactatggactactggggccaagggaccacggtcaccgtctccacgcgtgagcagaaactgatctcggaagaggatctggcgaagcccaccacgacgccagcgccgcgaccaccaacaccggcgcccaccatcgcgtcgcagcccctgtccctgcgcccagaggcgtgccggccagcggcggggggcgcagtgcacacgagggggctggacttcgcctgtgacatctacatctgggcgcccttggccgggacttgtggggtccttctcctgtcactggttatcaccctttactgcaaacggggcagaaagaaactcctgtatatattcaaacaaccatttatgagaccagtacaaactactcaagaggaagatggctgtagctgccgatttccagaagaagaagaaggaggatgtgaactgagagtgaagttcagcaggagcgcagacgcccccgcgtaccagcagggccagaaccagctctataacgagctgaatctaggacgaagagaggagtacgatgttttggacaagagacgtggccgggaccctgagatggggggaaagccgagaaggaagaaccctcaggaaggcctgtacaatgaactgcagaaagataagatggcggaggcctacagtgagattgggatgaaaggcgagcgccggaggggcaaggggcacgatggcctttaccagggtctcagtacagccaccaaggacacctacgacgcccttcacatgcaggccctgccccctcgctctagtggctccggcgagggcagaggaagtctactaacctgcggagatgtggaagaaaatcctggcccacatatgaccgagtacaagcccacggtgcgcctcgccacccgcgacgacgtccccagggccgtacgcaccctcgccgccgcgttcgccgactaccccgccacgcgccacaccgtcgatccggaccgccacatcgagcgggtcaccgagctgcaagaactcttcctcacgcgcgtcgggctcgacatcggcaaggtgtgggtcgcggacgacggcgccgcggtggcggtctggaccacgccggagagcgtcgaagcgggggcggtgttcgccgagatcggcccgcgcatggccgagttgagcggttcccggctggccgcgcagcaacagatggaaggcctcctggcgccgcaccggcccaaggagcccgcgtggttcctggccaccgtcggcgtctcgcccgaccaccagggcaagggtctgggcagcgccgtcgtgctccccggagtggaggcggccgagcgcgccggggtgcccgccttcctggagacctccgcgccccgcaacctccccttctacgagcggctcggcttcaccgtcaccgccgacgtcgaggtgcccgaaggaccgcgcacctggtgcatgacccgcaagcccggtgcctga

SEQ ID NO: 1489 - DNA, 2271 bp, Artificial Sequence
  Synthetic Polynucleotides
atggccttaccagtgaccgccttgctcctgccgctggccttgctgctccacgccgccaggccggccagaaagagaacccagcccaccttcggcttcaccgtgaactggaagttcagcgagagcaccaccgtgttcaccggccagtgcttcatcgaccggaacggcaaagaggtgctgaaaaccatgtggctgctgcggagcagcgtgaacgacatcggcgacgactggaaggccaccagagtgggcatcaacatcttcacccggctgcggacacagaaagagggcggctctggcggaagcgccagaaagtgtagcctgaccggcaagtggaccaacgacctgggcagcaacatgaccatcggagccgtgaacagcagaggcgagtttaccggcacctacatcaccgccgtgaccgccaccagcaacgagatcaaagagagccccctgcacggcacccagaacaccatcaacaagagcggcggcagcacaacagtgtttacaggacagtgctttattgaccgcaatgggaaagaagtgctgaaaacaatgtggctgctgaggtcctccgtgaatgacattggagatgattggaaagctacaagagtggggattaacatttttaccagactgaggacccagaaagaagggggcagcggaggctccgccagaaaatgctctctgacagggaagtggacaaatgatctggggtccaatatgacaatcggcgctgtgaactctcggggcgagttcactggaacatatattacagccgtgacagctacctctaacgaaatcaaagagtctcctctgcacgggacacagaataccattaacaaacggacccagcctacatttgggtttacagtgaattggaaattctccgagacgcgtgagcagaaactgatctcggaagaggatctggcgaagcccaccacgacgccagcgccgcgaccaccaacaccggcgcccaccatcgcgtcgcagcccctgtccctgcgcccagaggcgtgccggccagcggcggggggcgcagtgcacacgagggggctggacttcgcctgtgacatctacatctgggcgcccttggccgggacttgtggggtccttctcctgtcactggttatcaccctttactgcaaacggggcagaaagaaactcctgtatatattcaaacaaccatttatgagaccagtacaaactactcaagaggaagatggctgtagctgccgatttccagaagaagaagaaggaggatgtgaactgagagtgaagttcagcaggagcgcagacgcccccgcgtaccagcagggccagaaccagctctataacgagctgaatctaggacgaagagaggagtacgatgttttggacaagagacgtggccgggaccctgagatggggggaaagccgagaaggaagaaccctcaggaaggcctgtacaatgaactgcagaaagataagatggcggaggcctacagtgagattgggatgaaaggcgagcgccggaggggcaaggggcacgatggcctttaccagggtctcagtacagccaccaaggacacctacgacgcccttcacatgcaggccctgccccctcgctctagtggctccggcgagggcagaggaagtctactaacctgcggagatgtggaagaaaatcctggcccacatatgaccgagtacaagcccacggtgcgcctcgccacccgcgacgacgtccccagggccgtacgcaccctcgccgccgcgttcgccgactaccccgccacgcgccacaccgtcgatccggaccgccacatcgagcgggtcaccgagctgcaagaactcttcctcacgcgcgtcgggctcgacatcggcaaggtgtgggtcgcggacgacggcgccgcggtggcggtctggaccacgccggagagcgtcgaagcgggggcggtgttcgccgagatcggcccgcgcatggccgagttgagcggttcccggctggccgcgcagcaacagatggaaggcctcctggcgccgcaccggcccaaggagcccgcgtggttcctggccaccgtcggcgtctcgcccgaccaccagggcaagggtctgggcagcgccgtcgtgctccccggagtggaggcggccgagcgcgccggggtgcccgccttcctggagacctccgcgccccgcaacctccccttctacgagcggctcggcttcaccgtcaccgccgacgtcgaggtgcccgaaggaccgcgcacctggtgcatgacccgcaagcccggtgcctga

SEQ ID NO: 1490 - DNA, 2187 bp, Artificial Sequence
  Synthetic Polynucleotides
atggccttaccagtgaccgccttgctcctgccgctggccttgctgctccacgccgccaggccggacatcgtcctgacccagtccccagccagcctggcggtgtccctgggtcaacgagctaccatttcctgcagagcctctaagtccgtatccacttccggctatagttacctgcattggtaccaacagaaaccagggcagccacccaagctgctcatctatctggcctcaaacctggagtccggcgtgcccgccagattctccggaagtgggagcggcaccgactttacattgaacatccacccagtcgaagaggaagatgctgccacttattactgtcagcactccagggagctgccatttacatttggctctggcacaaaactggagatcaaaggcggaggcggaagtggaggcggaggatctggcggcggaggctctcaggttcagctggtcgagtccgggggaggtctggtacagccgggtggcagcctcaagctgtcatgtgccgcatctggttttgactttagcaggtattggatgagctgggtccgccaggccccgggcaagggacttgagtggattggagaaataaaccctacttccagcacaatcaacttcacaccttctttgaaagataaggtttttatctctcgggataacgctaaaaacacactgtacttgcagatgtctaaggtgcgaagcgaagacaccgccctctattattgcgcccggggtaattactaccgctatggggatgcgatggactattgggggcaaggtacctccgtcacggtctcaacgcgtgagcagaaactgatctcggaagaggatctggcgaagcccaccacgacgccagcgccgcgaccaccaacaccggcgcccaccatcgcgtcgcagcccctgtccctgcgcccagaggcgtgccggccagcggcggggggcgcagtgcacacgagggggctggacttcgcctgtgacatctacatctgggcgcccttggccgggacttgtggggtccttctcctgtcactggttatcaccctttactgcaaacggggcagaaagaaactcctgtatatattcaaacaaccatttatgagaccagtacaaactactcaagaggaagatggctgtagctgccgatttccagaagaagaagaaggaggatgtgaactgagagtgaagttcagcaggagcgcagacgcccccgcgtaccagcagggccagaaccagctctataacgagctgaatctaggacgaagagaggagtacgatgttttggacaagagacgtggccgggaccctgagatggggggaaagccgagaaggaagaaccctcaggaaggcctgtacaatgaactgcagaaagataagatggcggaggcctacagtgagattgggatgaaaggcgagcgccggaggggcaaggggcacgatggcctttaccagggtctcagtacagccaccaaggacacctacgacgcccttcacatgcaggccctgccccctcgctctagtggctccggcgagggcagaggaagtctactaacctgcggagatgtggaagaaaatcctggcccacatatgaccgagtacaagcccacggtgcgcctcgccacccgcgacgacgtccccagggccgtacgcaccctcgccgccgcgttcgccgactaccccgccacgcgccacaccgtcgatccggaccgccacatcgagcgggtcaccgagctgcaagaactcttcctcacgcgcgtcgggctcgacatcggcaaggtgtgggtcgcggacgacggcgccgcggtggcggtctggaccacgccggagagcgtcgaagcgggggcggtgttcgccgagatcggcccgcgcatggccgagttgagcggttcccggctggccgcgcagcaacagatggaaggcctcctggcgccgcaccggcccaaggagcccgcgtggttcctggccaccgtcggcgtctcgcccgaccaccagggcaagggtctgggcagcgccgtcgtgctccccggagtggaggcggccgagcgcgccggggtgcccgccttcctggagacctccgcgccccgcaacctccccttctacgagcggctcggcttcaccgtcaccgccgacgtcgaggtgcccgaaggaccgcgcacctggtgcatgacccgcaagcccggtgcctga

SEQ ID NO: 1491 - DNA, 2181 bp, Artificial Sequence
  Synthetic Polynucleotides
atggccttaccagtgaccgccttgctcctgccgctggccttgctgctccacgccgccaggccggacatccagatgacccagagccctagctcactgagcgccagcgtgggcgacagggtgaccattacctgctccgccagccaggacatcagcaactacctgaactggtaccagcagaagcccggcaaggcccccaagctgctgatctactacacctccaacctgcactccggcgtgcccagcaggttcagcggaagcggcagcggcaccgatttcaccctgaccatctccagcctgcagcccgaggacttcgccacctactactgccagcagtacaggaagctcccctggactttcggccagggcaccaaactggagatcaagcgtggcggaggcggaagtggaggcggaggatctggcggcggaggctctcaggtgcagctggtccagagcggcgccgaagtgaagaagcccggcagctccgtgaaagtgagctgcaaggccagcggcggcaccttcagcaactactggatgcactgggtgaggcaggcccccggacagggcctggagtggatgggcgccacctacaggggccacagcgacacctactacaaccagaagttcaagggccgggtgaccatcaccgccgacaagagcaccagcaccgcctacatggaactgagcagcctcaggagcgaggacaccgctgtgtattactgcgccaggggcgccatctacgacggctacgacgtgctggacaactggggccagggcacactggtgaccgtgtccagcacgcgtgagcagaaactgatctcggaagaggatctggcgaagcccaccacgacgccagcgccgcgaccaccaacaccggcgcccaccatcgcgtcgcagcccctgtccctgcgcccagaggcgtgccggccagcggcggggggcgcagtgcacacgagggggctggacttcgcctgtgacatctacatctgggcgcccttggccgggacttgtggggtccttctcctgtcactggttatcaccctttactgcaaacggggcagaaagaaactcctgtatatattcaaacaaccatttatgagaccagtacaaactactcaagaggaagatggctgtagctgccgatttccagaagaagaagaaggaggatgtgaactgagagtgaagttcagcaggagcgcagacgcccccgcgtaccagcagggccagaaccagctctataacgagctgaatctaggacgaagagaggagtacgatgttttggacaagagacgtggccgggaccctgagatggggggaaagccgagaaggaagaaccctcaggaaggcctgtacaatgaactgcagaaagataagatggcggaggcctacagtgagattgggatgaaaggcgagcgccggaggggcaaggggcacgatggcctttaccagggtctcagtacagccaccaaggacacctacgacgcccttcacatgcaggccctgccccctcgctctagtggctccggcgagggcagaggaagtctactaacctgcggagatgtggaagaaaatcctggcccacatatgaccgagtacaagcccacggtgcgcctcgccacccgcgacgacgtccccagggccgtacgcaccctcgccgccgcgttcgccgactaccccgccacgcgccacaccgtcgatccggaccgccacatcgagcgggtcaccgagctgcaagaactcttcctcacgcgcgtcgggctcgacatcggcaaggtgtgggtcgcggacgacggcgccgcggtggcggtctggaccacgccggagagcgtcgaagcgggggcggtgttcgccgagatcggcccgcgcatggccgagttgagcggttcccggctggccgcgcagcaacagatggaaggcctcctggcgccgcaccggcccaaggagcccgcgtggttcctggccaccgtcggcgtctcgcccgaccaccagggcaagggtctgggcagcgccgtcgtgctccccggagtggaggcggccgagcgcgccggggtgcccgccttcctggagacctccgcgccccgcaacctccccttctacgagcggctcggcttcaccgtcaccgccgacgtcgaggtgcccgaaggaccgcgcacctggtgcatgacccgcaagcccggtgcctga

SEQ ID NO: 1492 - DNA, 2181 bp, Artificial Sequence
  Synthetic Polynucleotides
atggccttaccagtgaccgccttgctcctgccgctggccttgctgctccacgccgccaggccggacatcgtgctgacacagagccctgccaccctgtctctgagccctggcgatagagccaccatcagctgtagagccagcgagagcgtgaccatcctgggcagccacctgatctactggtatcagcagaagcccggccagccccccagactgctgattcagctggcctccaatgtgcagaccggcgtgccagccagattttccggcagcggcagcagaaccgacttcaccctgaccatcagcagcgtggaacccgaggacttcgccgtgtactactgcctccagagccggaccatccccagaacattcggccagggcaccaagctggaaatcaagagaggcggaggcggaagtggaggcggaggatctggcggcggaggctctcaggtgcagctggtgcagtctggccccgaagtgaagaaacccggcgagtccgtgaagatcagctgcaaggccagcggctacaccttccggcactacagcatgaactgggtcaagcaggccccaggccagggcctgaagtggatgggcagaatcaacaccgagagcggcgtgcccatctacgccgacgacttcaagggccggttcagcttcaccgtggacaccagcgccagcaccgcctacctggaaatctccagcctgaccagcgaggataccgccgtgtatttctgctccaacgactacctgtacagcctggatttctggggccagggaaccaccctgacagtgtcctctacgcgtgagcagaaactgatctcggaagaggatctggcgaagcccaccacgacgccagcgccgcgaccaccaacaccggcgcccaccatcgcgtcgcagcccctgtccctgcgcccagaggcgtgccggccagcggcggggggcgcagtgcacacgagggggctggacttcgcctgtgacatctacatctgggcgcccttggccgggacttgtggggtccttctcctgtcactggttatcaccctttactgcaaacggggcagaaagaaactcctgtatatattcaaacaaccatttatgagaccagtacaaactactcaagaggaagatggctgtagctgccgatttccagaagaagaagaaggaggatgtgaactgagagtgaagttcagcaggagcgcagacgcccccgcgtaccagcagggccagaaccagctctataacgagctgaatctaggacgaagagaggagtacgatgttttggacaagagacgtggccgggaccctgagatggggggaaagccgagaaggaagaaccctcaggaaggcctgtacaatgaactgcagaaagataagatggcggaggcctacagtgagattgggatgaaaggcgagcgccggaggggcaaggggcacgatggcctttaccagggtctcagtacagccaccaaggacacctacgacgcccttcacatgcaggccctgccccctcgctctagtggctccggcgagggcagaggaagtctactaacctgcggagatgtggaagaaaatcctggcccacatatgaccgagtacaagcccacggtgcgcctcgccacccgcgacgacgtccccagggccgtacgcaccctcgccgccgcgttcgccgactaccccgccacgcgccacaccgtcgatccggaccgccacatcgagcgggtcaccgagctgcaagaactcttcctcacgcgcgtcgggctcgacatcggcaaggtgtgggtcgcggacgacggcgccgcggtggcggtctggaccacgccggagagcgtcgaagcgggggcggtgttcgccgagatcggcccgcgcatggccgagttgagcggttcccggctggccgcgcagcaacagatggaaggcctcctggcgccgcaccggcccaaggagcccgcgtggttcctggccaccgtcggcgtctcgcccgaccaccagggcaagggtctgggcagcgccgtcgtgctccccggagtggaggcggccgagcgcgccggggtgcccgccttcctggagacctccgcgccccgcaacctccccttctacgagcggctcggcttcaccgtcaccgccgacgtcgaggtgcccgaaggaccgcgcacctggtgcatgacccgcaagcccggtgcctga

SEQ ID NO: 1493 - DNA, 2184 bp, Artificial Sequence
  Synthetic Polynucleotides
atggccttaccagtgaccgccttgctcctgccgctggccttgctgctccacgccgccaggccgcagtctgtgctgacacagcctcctagtgtgtctggcgctcctggacagagagtgaccatcagctgtacaggcagcagcagcaatatcggagccggctttgacgtgcactggtatcagcagctgcctggcacagcccctaaactgctgatctacggcaacagcaacagacccagcggcgtgcccgatagattttccggctctaagagcggcacaagcgccagcctggctattactggactccaggccgaggacgaggccgactactactgtcagagctacgacagcagcctgagcggctacgttttcggcaccggcaccaaagtgacagtgcttggtggcggaggcggaagtggaggcggaggatctggcggcggaggctctcaagttcagctggttcagagcggagccgaagtgaagaaacctggggcctctgtgaaggtgtcctgcaaggcttccggctacacctttaccgattactacatgcactgggtccgacaggctcccggccaaagacttgaatggatgggctggatcaaccccaacagcggcggcacaaattacgcccagaagttccaggaccggatcaccgtgaccagagacaccagctccaacaccggctacatggaactgacccggctgagatccgatgacaccgccgtgtactactgcgctagaagcccttactccggcgtgctggataagtggggacagggcacactggtcaccgtgtcatctacgcgtgagcagaaactgatctcggaagaggatctggcgaagcccaccacgacgccagcgccgcgaccaccaacaccggcgcccaccatcgcgtcgcagcccctgtccctgcgcccagaggcgtgccggccagcggcggggggcgcagtgcacacgagggggctggacttcgcctgtgacatctacatctgggcgcccttggccgggacttgtggggtccttctcctgtcactggttatcaccctttactgcaaacggggcagaaagaaactcctgtatatattcaaacaaccatttatgagaccagtacaaactactcaagaggaagatggctgtagctgccgatttccagaagaagaagaaggaggatgtgaactgagagtgaagttcagcaggagcgcagacgcccccgcgtaccagcagggccagaaccagctctataacgagctgaatctaggacgaagagaggagtacgatgttttggacaagagacgtggccgggaccctgagatggggggaaagccgagaaggaagaaccctcaggaaggcctgtacaatgaactgcagaaagataagatggcggaggcctacagtgagattgggatgaaaggcgagcgccggaggggcaaggggcacgatggcctttaccagggtctcagtacagccaccaaggacacctacgacgcccttcacatgcaggccctgccccctcgctctagtggctccggcgagggcagaggaagtctactaacctgcggagatgtggaagaaaatcctggcccacatatgaccgagtacaagcccacggtgcgcctcgccacccgcgacgacgtccccagggccgtacgcaccctcgccgccgcgttcgccgactaccccgccacgcgccacaccgtcgatccggaccgccacatcgagcgggtcaccgagctgcaagaactcttcctcacgcgcgtcgggctcgacatcggcaaggtgtgggtcgcggacgacggcgccgcggtggcggtctggaccacgccggagagcgtcgaagcgggggcggtgttcgccgagatcggcccgcgcatggccgagttgagcggttcccggctggccgcgcagcaacagatggaaggcctcctggcgccgcaccggcccaaggagcccgcgtggttcctggccaccgtcggcgtctcgcccgaccaccagggcaagggtctgggcagcgccgtcgtgctccccggagtggaggcggccgagcgcgccggggtgcccgccttcctggagacctccgcgccccgcaacctccccttctacgagcggctcggcttcaccgtcaccgccgacgtcgaggtgcccgaaggaccgcgcacctggtgcatgacccgcaagcccggtgcctga

SEQ ID NO: 1494 - DNA, 2178 bp, Artificial Sequence
  Synthetic Polynucleotides
atggccttaccagtgaccgccttgctcctgccgctggccttgctgctccacgccgccaggccgcaggctgttctgacacagcctccatctgcctctggcacacctggacagagagtgaccatctcctgtagcggcagcagcagcaacatcggcagctacaccgtgtcctggtatcagcagctccctggaacagcccctaagttcctgatctacagcaacaaccagcggcctagcggcgtgcccgatagattttctggcagcaagagcggcacaagcgccagcctggctatttctggactccagtctgaggacgaggccgactactattgtgccgcctgggacgatagcctgaacggctatgtgtttggcaccggcaccaaagtgacagtgcttggtggcggaggcggaagtggaggcggaggatctggcggcggaggctctgaagttcaactggttcagagcggagccgaagtgaagaagcctggcgagagcctgaagattagctgcaaaggcagcggctacgacttcaccacctactggatcggctgggtccgacagatgcctggcaaaggactggaatggatgggcatcatctaccccggcgacagcgacaccagatacagccctagcgttagaggccgcgtgaccatcagcgccgacaagtctatcaacaccgcctacctccagtggtccagcctggaagcctctgacaccgccatgtactactgcgccagaatgtggaccttcagccaggatggatggggccagggaacactggtcacagtgtcatctacgcgtgagcagaaactgatctcggaagaggatctggcgaagcccaccacgacgccagcgccgcgaccaccaacaccggcgcccaccatcgcgtcgcagcccctgtccctgcgcccagaggcgtgccggccagcggcggggggcgcagtgcacacgagggggctggacttcgcctgtgacatctacatctgggcgcccttggccgggacttgtggggtccttctcctgtcactggttatcaccctttactgcaaacggggcagaaagaaactcctgtatatattcaaacaaccatttatgagaccagtacaaactactcaagaggaagatggctgtagctgccgatttccagaagaagaagaaggaggatgtgaactgagagtgaagttcagcaggagcgcagacgcccccgcgtaccagcagggccagaaccagctctataacgagctgaatctaggacgaagagaggagtacgatgttttggacaagagacgtggccgggaccctgagatggggggaaagccgagaaggaagaaccctcaggaaggcctgtacaatgaactgcagaaagataagatggcggaggcctacagtgagattgggatgaaaggcgagcgccggaggggcaaggggcacgatggcctttaccagggtctcagtacagccaccaaggacacctacgacgcccttcacatgcaggccctgccccctcgctctagtggctccggcgagggcagaggaagtctactaacctgcggagatgtggaagaaaatcctggcccacatatgaccgagtacaagcccacggtgcgcctcgccacccgcgacgacgtccccagggccgtacgcaccctcgccgccgcgttcgccgactaccccgccacgcgccacaccgtcgatccggaccgccacatcgagcgggtcaccgagctgcaagaactcttcctcacgcgcgtcgggctcgacatcggcaaggtgtgggtcgcggacgacggcgccgcggtggcggtctggaccacgccggagagcgtcgaagcgggggcggtgttcgccgagatcggcccgcgcatggccgagttgagcggttcccggctggccgcgcagcaacagatggaaggcctcctggcgccgcaccggcccaaggagcccgcgtggttcctggccaccgtcggcgtctcgcccgaccaccagggcaagggtctgggcagcgccgtcgtgctccccggagtggaggcggccgagcgcgccggggtgcccgccttcctggagacctccgcgccccgcaacctccccttctacgagcggctcggcttcaccgtcaccgccgacgtcgaggtgcccgaaggaccgcgcacctggtgcatgacccgcaagcccggtgcctga

SEQ ID NO: 1495 - DNA, 2211 bp, Artificial Sequence
  Synthetic Polynucleotides
atggccttaccagtgaccgccttgctcctgccgctggccttgctgctccacgccgccaggccgctgcctgttctgacacagcctccatctgcctctggcacacctggacagagagtgaccatcagctgtagcggcagaagcagcaacatcggcagcaacagcgtgaactggtacagacagcttcctggcgctgcccctaagctgctgatctacagcaacaaccagcggcctcctggcgtgccagtcagattttctggcagcaagagcggcacaagcgccagcctggctatttctggactccagtctgaggacgaggccacctactactgtgccacctgggacgacaacctgaacgtgcactacgtgttcggcaccggcaccaaagtgacagtgcttggaagtagaggcggaggcggaagtggaggcggaggatctggcggcggaggctctcttgaaatggctcaggtgcagctggtgcagagcggagccgaagtgaagaaacctggcagcagcgtgaaggtgtcctgcaaagcttctggcggcaccttcagcagctacgccatctcttgggttcgacaggcccctggacaaggactggaatggatgggcagaatcatccccatcctgggaatcgccaactacgcccagaaattccagggcagagtgacaatcaccgccgacaagagcaccagcaccgcctacatggaactgagcagcctgagaagcgaggacaccgccgtgtactattgtgcaagaggcggctactacagccacgacatgtggagcgaagattggggccagggcacactggtcacagtgtcatctacgcgtgagcagaaactgatctcggaagaggatctggcgaagcccaccacgacgccagcgccgcgaccaccaacaccggcgcccaccatcgcgtcgcagcccctgtccctgcgcccagaggcgtgccggccagcggcggggggcgcagtgcacacgagggggctggacttcgcctgtgacatctacatctgggcgcccttggccgggacttgtggggtccttctcctgtcactggttatcaccctttactgcaaacggggcagaaagaaactcctgtatatattcaaacaaccatttatgagaccagtacaaactactcaagaggaagatggctgtagctgccgatttccagaagaagaagaaggaggatgtgaactgagagtgaagttcagcaggagcgcagacgcccccgcgtaccagcagggccagaaccagctctataacgagctgaatctaggacgaagagaggagtacgatgttttggacaagagacgtggccgggaccctgagatggggggaaagccgagaaggaagaaccctcaggaaggcctgtacaatgaactgcagaaagataagatggcggaggcctacagtgagattgggatgaaaggcgagcgccggaggggcaaggggcacgatggcctttaccagggtctcagtacagccaccaaggacacctacgacgcccttcacatgcaggccctgccccctcgctctagtggctccggcgagggcagaggaagtctactaacctgcggagatgtggaagaaaatcctggcccacatatgaccgagtacaagcccacggtgcgcctcgccacccgcgacgacgtccccagggccgtacgcaccctcgccgccgcgttcgccgactaccccgccacgcgccacaccgtcgatccggaccgccacatcgagcgggtcaccgagctgcaagaactcttcctcacgcgcgtcgggctcgacatcggcaaggtgtgggtcgcggacgacggcgccgcggtggcggtctggaccacgccggagagcgtcgaagcgggggcggtgttcgccgagatcggcccgcgcatggccgagttgagcggttcccggctggccgcgcagcaacagatggaaggcctcctggcgccgcaccggcccaaggagcccgcgtggttcctggccaccgtcggcgtctcgcccgaccaccagggcaagggtctgggcagcgccgtcgtgctccccggagtggaggcggccgagcgcgccggggtgcccgccttcctggagacctccgcgccccgcaacctccccttctacgagcggctcggcttcaccgtcaccgccgacgtcgaggtgcccgaaggaccgcgcacctggtgcatgacccgcaagcccggtgcctga

SEQ ID NO: 1496 - DNA, 2178 bp, Artificial Sequence
  Synthetic Polynucleotides
atggccttaccagtgaccgccttgctcctgccgctggccttgctgctccacgccgccaggccggacatcgtgctgacacagagccctgcttctctggccgtgtctctgggagagagagccaccatcaactgtagagccagcgagagcgtgtccgtgattggagcccacctgatccactggtatcagcagaagcctggacagcctcctaagctgctgatctacctggcctccaacctggaaacaggcgtgccagccagattttctggcagcggctctggcaccgatttcaccctgacaatcagcagcctccaggccgaagatgccgccatctactactgcctccagagccggatcttccccagaacctttggacagggcaccaagctggaaatcaaaggcggaggcggaagtggaggcggaggatctggcggcggaggctctcaagttcagctggtgcagtctggctccgagctgaagaaacctggcgagtccgtgaagatcagctgcaaggccagcggctacaccttcaccgactacagcatcaactgggtcaagcaggcccctggacagggactgaaatggatgggctggatcaacaccgagacaagagagcccgcctacgcctacgacttcagaggcagattcgtgttctccctggacaccagcgccagcacagcctatctccagatcagctctctgaaggccgaggataccgccgtgtacttctgcgccctggactacagctacgctatggactattggggccagggcaccctggtcacagtctcttctacgcgtgagcagaaactgatctcggaagaggatctggcgaagcccaccacgacgccagcgccgcgaccaccaacaccggcgcccaccatcgcgtcgcagcccctgtccctgcgcccagaggcgtgccggccagcggcggggggcgcagtgcacacgagggggctggacttcgcctgtgacatctacatctgggcgcccttggccgggacttgtggggtccttctcctgtcactggttatcaccctttactgcaaacggggcagaaagaaactcctgtatatattcaaacaaccatttatgagaccagtacaaactactcaagaggaagatggctgtagctgccgatttccagaagaagaagaaggaggatgtgaactgagagtgaagttcagcaggagcgcagacgcccccgcgtaccagcagggccagaaccagctctataacgagctgaatctaggacgaagagaggagtacgatgttttggacaagagacgtggccgggaccctgagatggggggaaagccgagaaggaagaaccctcaggaaggcctgtacaatgaactgcagaaagataagatggcggaggcctacagtgagattgggatgaaaggcgagcgccggaggggcaaggggcacgatggcctttaccagggtctcagtacagccaccaaggacacctacgacgcccttcacatgcaggccctgccccctcgctctagtggctccggcgagggcagaggaagtctactaacctgcggagatgtggaagaaaatcctggcccacatatgaccgagtacaagcccacggtgcgcctcgccacccgcgacgacgtccccagggccgtacgcaccctcgccgccgcgttcgccgactaccccgccacgcgccacaccgtcgatccggaccgccacatcgagcgggtcaccgagctgcaagaactcttcctcacgcgcgtcgggctcgacatcggcaaggtgtgggtcgcggacgacggcgccgcggtggcggtctggaccacgccggagagcgtcgaagcgggggcggtgttcgccgagatcggcccgcgcatggccgagttgagcggttcccggctggccgcgcagcaacagatggaaggcctcctggcgccgcaccggcccaaggagcccgcgtggttcctggccaccgtcggcgtctcgcccgaccaccagggcaagggtctgggcagcgccgtcgtgctccccggagtggaggcggccgagcgcgccggggtgcccgccttcctggagacctccgcgccccgcaacctccccttctacgagcggctcggcttcaccgtcaccgccgacgtcgaggtgcccgaaggaccgcgcacctggtgcatgacccgcaagcccggtgcctga

SEQ ID NO: 1497 - DNA, 2181 bp, Artificial Sequence
  Synthetic Polynucleotides
atggccttaccagtgaccgccttgctcctgccgctggccttgctgctccacgccgccaggccggacatcgtgctgacacagtctcccgccacactgtcactgagccctggcgatagagccacactgagctgtagagccagcgagagcgtgacaatcctgggcagccacctgatctactggtatcagcagaagcccggacaggcccctagactgctgattcagctcgccagcaatgtgcagacaggcatccctgccagattttccggcagcggcagcagaaccgatttcaccctgaccataagcagcctggaacctgaggacttcgccgtgtactactgcctccagagccggacaatccccagaacctttggacagggcaccaagctggaaatcaagagaggcggaggcggaagtggaggcggaggatctggcggcggaggctctcaagttcaactggtgcagagcggctccgagctgaagaaacctggcgagtccgtgaagattagctgcaaggccagcggctacaccttcacacactacagcatgaactgggtccgacaggctccaggccaaggactggaatggatgggcagaatcaacaccgagacaggcgagcccctgtacgccgacgatttcaagggcagattcgtgttcagcctggacaccagcgccagcacagcctatctccagatcagctctctgaaggccgaggacaccgccgtgtattattgcagcaacgactacctgtactccctggactattggggccagggcacactggtcacagtgtctagtacgcgtgagcagaaactgatctcggaagaggatctggcgaagcccaccacgacgccagcgccgcgaccaccaacaccggcgcccaccatcgcgtcgcagcccctgtccctgcgcccagaggcgtgccggccagcggcggggggcgcagtgcacacgagggggctggacttcgcctgtgacatctacatctgggcgcccttggccgggacttgtggggtccttctcctgtcactggttatcaccctttactgcaaacggggcagaaagaaactcctgtatatattcaaacaaccatttatgagaccagtacaaactactcaagaggaagatggctgtagctgccgatttccagaagaagaagaaggaggatgtgaactgagagtgaagttcagcaggagcgcagacgcccccgcgtaccagcagggccagaaccagctctataacgagctgaatctaggacgaagagaggagtacgatgttttggacaagagacgtggccgggaccctgagatggggggaaagccgagaaggaagaaccctcaggaaggcctgtacaatgaactgcagaaagataagatggcggaggcctacagtgagattgggatgaaaggcgagcgccggaggggcaaggggcacgatggcctttaccagggtctcagtacagccaccaaggacacctacgacgcccttcacatgcaggccctgccccctcgctctagtggctccggcgagggcagaggaagtctactaacctgcggagatgtggaagaaaatcctggcccacatatgaccgagtacaagcccacggtgcgcctcgccacccgcgacgacgtccccagggccgtacgcaccctcgccgccgcgttcgccgactaccccgccacgcgccacaccgtcgatccggaccgccacatcgagcgggtcaccgagctgcaagaactcttcctcacgcgcgtcgggctcgacatcggcaaggtgtgggtcgcggacgacggcgccgcggtggcggtctggaccacgccggagagcgtcgaagcgggggcggtgttcgccgagatcggcccgcgcatggccgagttgagcggttcccggctggccgcgcagcaacagatggaaggcctcctggcgccgcaccggcccaaggagcccgcgtggttcctggccaccgtcggcgtctcgcccgaccaccagggcaagggtctgggcagcgccgtcgtgctccccggagtggaggcggccgagcgcgccggggtgcccgccttcctggagacctccgcgccccgcaacctccccttctacgagcggctcggcttcaccgtcaccgccgacgtcgaggtgcccgaaggaccgcgcacctggtgcatgacccgcaagcccggtgcctga

SEQ ID NO: 1498 - DNA, 2184 bp, Artificial Sequence
  Synthetic Polynucleotides
atggccttaccagtgaccgccttgctcctgccgctggccttgctgctccacgccgccaggccggacatcgtgatgacccagagccccgatagcctggccgtgtctctgggagagagagccaccatcaactgcaagagcagccagagcatcctgtacagcagcaaccagaagaactacctggcctggtatcagcagaagcccggccagagccctaagctgctgatctactgggccagcaccagagaaagcggcgtgcccgatagattcagcggcagcggctctggcaccgacttcaccctgaccatcagttctcttcaggccgaggacgtggccgtgtactactgccaccagtacatcagctcctacaccttcggccagggcaccaagctggaaatcaagggcggaggcggaagtggaggcggaggatctggcggcggaggctctcaggtgcagctggtgcagtctggcgctgaagtgaagaaacctggggccagcgtgaaggtgtcctgcaaggccagcggctacacctttgccagccagtggatgcactggatgagacaggcccctggacagggcctggaatggatcggctggatcaaccccggcaacgtgaacaccaagtacaacgagaagttcaagggcagagccaccctgacagtggacaccagcaccaacaccgcctacatggaactgagcagcctgcggagcgaggacaccgccgtgtattattgcgccagaagcacctggtacagacccctggattattggggccagggaacccttgtgaccgtgtcctctacgcgtgagcagaaactgatctcggaagaggatctggcgaagcccaccacgacgccagcgccgcgaccaccaacaccggcgcccaccatcgcgtcgcagcccctgtccctgcgcccagaggcgtgccggccagcggcggggggcgcagtgcacacgagggggctggacttcgcctgtgacatctacatctgggcgcccttggccgggacttgtggggtccttctcctgtcactggttatcaccctttactgcaaacggggcagaaagaaactcctgtatatattcaaacaaccatttatgagaccagtacaaactactcaagaggaagatggctgtagctgccgatttccagaagaagaagaaggaggatgtgaactgagagtgaagttcagcaggagcgcagacgcccccgcgtaccagcagggccagaaccagctctataacgagctgaatctaggacgaagagaggagtacgatgttttggacaagagacgtggccgggaccctgagatggggggaaagccgagaaggaagaaccctcaggaaggcctgtacaatgaactgcagaaagataagatggcggaggcctacagtgagattgggatgaaaggcgagcgccggaggggcaaggggcacgatggcctttaccagggtctcagtacagccaccaaggacacctacgacgcccttcacatgcaggccctgccccctcgctctagtggctccggcgagggcagaggaagtctactaacctgcggagatgtggaagaaaatcctggcccacatatgaccgagtacaagcccacggtgcgcctcgccacccgcgacgacgtccccagggccgtacgcaccctcgccgccgcgttcgccgactaccccgccacgcgccacaccgtcgatccggaccgccacatcgagcgggtcaccgagctgcaagaactcttcctcacgcgcgtcgggctcgacatcggcaaggtgtgggtcgcggacgacggcgccgcggtggcggtctggaccacgccggagagcgtcgaagcgggggcggtgttcgccgagatcggcccgcgcatggccgagttgagcggttcccggctggccgcgcagcaacagatggaaggcctcctggcgccgcaccggcccaaggagcccgcgtggttcctggccaccgtcggcgtctcgcccgaccaccagggcaagggtctgggcagcgccgtcgtgctccccggagtggaggcggccgagcgcgccggggtgcccgccttcctggagacctccgcgccccgcaacctccccttctacgagcggctcggcttcaccgtcaccgccgacgtcgaggtgcccgaaggaccgcgcacctggtgcatgacccgcaagcccggtgcctga

SEQ ID NO: 1499 - DNA, 2556 bp, Artificial Sequence
  Synthetic Polynucleotides
atggttaggggcgttccattcagacatctgcttctggtcttgcagcttgcactcttgcccgctgccacccagggcaaaaaagtggtgctgggcaagaaaggcgacaccgtggaactgacctgcaccgccagccagaagaagtccatccagttccactggaagaacagcaaccagatcaagatcctgggcaaccagggcagcttcctgaccaagggacccagcaagctgaacgacagagccgacagcagacggtccctgtgggaccagggcaatttcccactgattatcaagaacctgaagatcgaggacagcgacacctacatctgcgaggtggaagatcagaaagaagaggtgcaactgctggtgttcggcctgaccgccaactccgacacccatctgctccagggccagagcctgaccctgacactggaaagccctccaggcagctcccccagcgtgcagtgtagaagcccacgaggcaagaacatccagggaggcaaaacattgtcagtgtcccaactggaactccaggactccggcacctggacctgtaccgtgctccagaaccagaaaaaggtggagttcaagatcgacatcgtggtgctggccttccagaaagcctctggcggaggcggaagtggaggcggaggatctggcggcggaggctctatctaccaggaactgacacaactgaaggccgccgtggaacggctgtgccacccttgtccttgggagtggaccttctttcagggcaactgctacttcatgagcaacagccagcggaactggcacgacagcatcaccgcctgcaaagaagtgggagcccaactggtcgtgattaagagcgccgaggaacagaacttcctccaactccagagcagcagaagcaacagattcacctggatgggcctgagcgacctgaaccaggaaggcacctggcagtgggtggacggatctcctctgctgcccagcttcaagcagtattggaaccggggcgagcccaacaacgtgggcgaagaggattgcgccgagttcagcggcaacggctggaacgacgacaagtgcaacctggctaagttctggatctgcaagaagtccgccgcctcctgtagccgggatgaggaacagttcctgagccctgcccctgccacccctaatcctccaccagctacgcgtgagcagaaactgatctcggaagaggatctggcgaagcccaccacgacgccagcgccgcgaccaccaacaccggcgcccaccatcgcgtcgcagcccctgtccctgcgcccagaggcgtgccggccagcggcggggggcgcagtgcacacgagggggctggacttcgcctgtgacatctacatctgggcgcccttggccgggacttgtggggtccttctcctgtcactggttatcaccctttactgcaaacggggcagaaagaaactcctgtatatattcaaacaaccatttatgagaccagtacaaactactcaagaggaagatggctgtagctgccgatttccagaagaagaagaaggaggatgtgaactgagagtgaagttcagcaggagcgcagacgcccccgcgtaccagcagggccagaaccagctctataacgagctgaatctaggacgaagagaggagtacgatgttttggacaagagacgtggccgggaccctgagatggggggaaagccgagaaggaagaaccctcaggaaggcctgtacaatgaactgcagaaagataagatggcggaggcctacagtgagattgggatgaaaggcgagcgccggaggggcaaggggcacgatggcctttaccagggtctcagtacagccaccaaggacacctacgacgcccttcacatgcaggccctgccccctcgctctagtggctccggcgagggcagaggaagtctactaacctgcggagatgtggaagaaaatcctggcccacatatgaccgagtacaagcccacggtgcgcctcgccacccgcgacgacgtccccagggccgtacgcaccctcgccgccgcgttcgccgactaccccgccacgcgccacaccgtcgatccggaccgccacatcgagcgggtcaccgagctgcaagaactcttcctcacgcgcgtcgggctcgacatcggcaaggtgtgggtcgcggacgacggcgccgcggtggcggtctggaccacgccggagagcgtcgaagcgggggcggtgttcgccgagatcggcccgcgcatggccgagttgagcggttcccggctggccgcgcagcaacagatggaaggcctcctggcgccgcaccggcccaaggagcccgcgtggttcctggccaccgtcggcgtctcgcccgaccaccagggcaagggtctgggcagcgccgtcgtgctccccggagtggaggcggccgagcgcgccggggtgcccgccttcctggagacctccgcgccccgcaacctccccttctacgagcggctcggcttcaccgtcaccgccgacgtcgaggtgcccgaaggaccgcgcacctggtgcatgacccgcaagcccggtgcctga

SEQ ID NO: 1500 - DNA, 2184 bp, Artificial Sequence
  Synthetic Polynucleotides
atggccttaccagtgaccgccttgctcctgccgctggccttgctgctccacgccgccaggccggaccacatcgtgctgacccagagccctagcagcctgtctgccagcctgggcgacagagtgaccatcagctgtagagccagccaggacatcagcacctacctgaactggtatcagcagaaacccgacggcaccgtgaagctgctgatcttctacaccagcagactgcacgccggggtgcccagcagattttctggcagcggctctggcacccaccacagcctgaccatctccaacctggaacaggaagatattgctacctacttctgtcagcaaggcaacagcctgcccttcaccttcggcagcggcaccaagctggaaatcaagagaggcggaggcggaagtggaggcggaggatctggcggcggaggctctcaggtgcagctgaaagagagcggccctgagctggaaaagcctggggccagcgtgaagattagctgcaaggccagcggctacagcttcaccgcctacagcatgaactgggtcaagcagaacaacggcatgagcctggaatggatcggcagcatcgacccctactacggcgacaccaaatacgcccagaagttcaagggcaaggccaccctgaccgtggataaggccagcagcaccgcctacctccagctgaagtctctgaccagcgaggacagcgccgtgtactactgcgccagacggatgattaccaccggcgactggtacttcgacgtgtggggagccggaaccaccgtgacagtgtctagcacgcgtgagcagaaactgatctcggaagaggatctggcgaagcccaccacgacgccagcgccgcgaccaccaacaccggcgcccaccatcgcgtcgcagcccctgtccctgcgcccagaggcgtgccggccagcggcggggggcgcagtgcacacgagggggctggacttcgcctgtgacatctacatctgggcgcccttggccgggacttgtggggtccttctcctgtcactggttatcaccctttactgcaaacggggcagaaagaaactcctgtatatattcaaacaaccatttatgagaccagtacaaactactcaagaggaagatggctgtagctgccgatttccagaagaagaagaaggaggatgtgaactgagagtgaagttcagcaggagcgcagacgcccccgcgtaccagcagggccagaaccagctctataacgagctgaatctaggacgaagagaggagtacgatgttttggacaagagacgtggccgggaccctgagatggggggaaagccgagaaggaagaaccctcaggaaggcctgtacaatgaactgcagaaagataagatggcggaggcctacagtgagattgggatgaaaggcgagcgccggaggggcaaggggcacgatggcctttaccagggtctcagtacagccaccaaggacacctacgacgcccttcacatgcaggccctgccccctcgctctagtggctccggcgagggcagaggaagtctactaacctgcggagatgtggaagaaaatcctggcccacatatgaccgagtacaagcccacggtgcgcctcgccacccgcgacgacgtccccagggccgtacgcaccctcgccgccgcgttcgccgactaccccgccacgcgccacaccgtcgatccggaccgccacatcgagcgggtcaccgagctgcaagaactcttcctcacgcgcgtcgggctcgacatcggcaaggtgtgggtcgcggacgacggcgccgcggtggcggtctggaccacgccggagagcgtcgaagcgggggcggtgttcgccgagatcggcccgcgcatggccgagttgagcggttcccggctggccgcgcagcaacagatggaaggcctcctggcgccgcaccggcccaaggagcccgcgtggttcctggccaccgtcggcgtctcgcccgaccaccagggcaagggtctgggcagcgccgtcgtgctccccggagtggaggcggccgagcgcgccggggtgcccgccttcctggagacctccgcgccccgcaacctccccttctacgagcggctcggcttcaccgtcaccgccgacgtcgaggtgcccgaaggaccgcgcacctggtgcatgacccgcaagcccggtgcctga

SEQ ID NO: 1501 - DNA, 2184 bp, Artificial Sequence; identical to SEQ ID NO: 1500
  Synthetic Polynucleotides

SEQ ID NO: 1502 - DNA, 2025 bp, Artificial Sequence
  Synthetic Polynucleotides
atggcccttccagtcactgccttgctgttgcctctggcgctcctgctccacgccgctagaccgggcatgagaaccgaggacctgcctaaggccgtggtgttcctggaaccccagtggtacagagtgctggaaaaggacagcgtgaccctgaagtgccagggcgcctacagccccgaggacaatagcacccagtggttccacaacgagagcctgatctccagccaggccagcagctacttcatcgacgccgccaccgtggacgacagcggcgagtatagatgccagaccaacctgagcaccctgagcgaccccgtgcagctggaagtgcacatcggatggctgctgctgcaggcccccagatgggtgttcaaagaagaggaccccatccacctgagatgccactcttggaagaacaccgccctgcacaaagtgacctacctgcagaacggcaagggcagaaagtacttccaccacaacagcgacttctacatccccaaggccaccctgaaggactccggctcctacttctgcagaggcctcgtgggcagcaagaacgtgtccagcgagacagtgaacatcaccatcacccagggcctggccgtgtctaccatcagcagctttttcccacccggctaccagacgcgtgagcagaaactgatctcggaagaggatctggcgaagcccaccacgacgccagcgccgcgaccaccaacaccggcgcccaccatcgcgtcgcagcccctgtccctgcgcccagaggcgtgccggccagcggcggggggcgcagtgcacacgagggggctggacttcgcctgtgacatctacatctgggcgcccttggccgggacttgtggggtccttctcctgtcactggttatcaccctttactgcaaacggggcagaaagaaactcctgtatatattcaaacaaccatttatgagaccagtacaaactactcaagaggaagatggctgtagctgccgatttccagaagaagaagaaggaggatgtgaactgagagtgaagttcagcaggagcgcagacgcccccgcgtaccagcagggccagaaccagctctataacgagctgaatctaggacgaagagaggagtacgatgttttggacaagagacgtggccgggaccctgagatggggggaaagccgagaaggaagaaccctcaggaaggcctgtacaatgaactgcagaaagataagatggcggaggcctacagtgagattgggatgaaaggcgagcgccggaggggcaaggggcacgatggcctttaccagggtctcagtacagccaccaaggacacctacgacgcccttcacatgcaggccctgccccctcgctctagtggctccggcgagggcagaggaagtctactaacctgcggagatgtggaagaaaatcctggcccacatatgaccgagtacaagcccacggtgcgcctcgccacccgcgacgacgtccccagggccgtacgcaccctcgccgccgcgttcgccgactaccccgccacgcgccacaccgtcgatccggaccgccacatcgagcgggtcaccgagctgcaagaactcttcctcacgcgcgtcgggctcgacatcggcaaggtgtgggtcgcggacgacggcgccgcggtggcggtctggaccacgccggagagcgtcgaagcgggggcggtgttcgccgagatcggcccgcgcatggccgagttgagcggttcccggctggccgcgcagcaacagatggaaggcctcctggcgccgcaccggcccaaggagcccgcgtggttcctggccaccgtcggcgtctcgcccgaccaccagggcaagggtctgggcagcgccgtcgtgctccccggagtggaggcggccgagcgcgccggggtgcccgccttcctggagacctccgcgccccgcaacctccccttctacgagcggctcggcttcaccgtcaccgccgacgtcgaggtgcccgaaggaccgcgcacctggtgcatgacccgcaagcccggtgcctga

SEQ ID NO: 1503 - DNA, 2025 bp, Artificial Sequence
  Synthetic Polynucleotides
atggccttaccagtgaccgccttgctcctgccgctggccttgctgctccacgccgccaggccgggcatgcggactgaagacctcccaaaggctgtggtgttcctggagcctcaatggtacagggtgctggagaaggacagtgtgactctgaagtgccagggagcctactcccctgaggacaattccacacagtggtttcacaatgagagcctcatctcaagccaggcctccagctacttcattgacgctgccacagtggacgacagtggagagtacaggtgccagacaaacctctccaccctcagtgacccggtgcagctagaagtccatatcggctggctgttgctccaggcccctcggtgggtgttcaaggaggaagaccctattcacctgaggtgtcacagctggaagaacactgctctgcataaggtcacatatttacagaatggcaaaggcaggaagtattttcatcataattctgacttctacattccaaaagccacactcaaagacagcggctcctacttctgcagggggcttgttgggagtaaaaatgtgtcttcagagactgtgaacatcaccatcactcaaggtttggcagtgtcaaccatctcatcattctttccacctggctaccaaacgcgtgagcagaaactgatctcggaagaggatctggcgaagcccaccacgacgccagcgccgcgaccaccaacaccggcgcccaccatcgcgtcgcagcccctgtccctgcgcccagaggcgtgccggccagcggcggggggcgcagtgcacacgagggggctggacttcgcctgtgacatctacatctgggcgcccttggccgggacttgtggggtccttctcctgtcactggttatcaccctttactgcaaacggggcagaaagaaactcctgtatatattcaaacaaccatttatgagaccagtacaaactactcaagaggaagatggctgtagctgccgatttccagaagaagaagaaggaggatgtgaactgagagtgaagttcagcaggagcgcagacgcccccgcgtaccagcagggccagaaccagctctataacgagctgaatctaggacgaagagaggagtacgatgttttggacaagagacgtggccgggaccctgagatggggggaaagccgagaaggaagaaccctcaggaaggcctgtacaatgaactgcagaaagataagatggcggaggcctacagtgagattgggatgaaaggcgagcgccggaggggcaaggggcacgatggcctttaccagggtctcagtacagccaccaaggacacctacgacgcccttcacatgcaggccctgccccctcgctctagtggctccggcgagggcagaggaagtctactaacctgcggagatgtggaagaaaatcctggcccacatatgaccgagtacaagcccacggtgcgcctcgccacccgcgacgacgtccccagggccgtacgcaccctcgccgccgcgttcgccgactaccccgccacgcgccacaccgtcgatccggaccgccacatcgagcgggtcaccgagctgcaagaactcttcctcacgcgcgtcgggctcgacatcggcaaggtgtgggtcgcggacgacggcgccgcggtggcggtctggaccacgccggagagcgtcgaagcgggggcggtgttcgccgagatcggcccgcgcatggccgagttgagcggttcccggctggccgcgcagcaacagatggaaggcctcctggcgccgcaccggcccaaggagcccgcgtggttcctggccaccgtcggcgtctcgcccgaccaccagggcaagggtctgggcagcgccgtcgtgctccccggagtggaggcggccgagcgcgccggggtgcccgccttcctggagacctccgcgccccgcaacctccccttctacgagcggctcggcttcaccgtcaccgccgacgtcgaggtgcccgaaggaccgcgcacctggtgcatgacccgcaagcccggtgcctga

SEQ ID NO: 1504 - DNA, 2184 bp, Artificial Sequence
  Synthetic Polynucleotides
atggccttaccagtgaccgccttgctcctgccgctggccttgctgctccacgccgccaggccggacgagatcgtgctgacacagagccctgccaccctgtctctgagccctggcgaaagagccaccctgagctgtagagccagccagagcgtgtccagctacctggcctggtatcagcagaagcccggccaggctccccggctgctgatctacgatgccagcaatagagccaccggcatccccgccagattttccggctctggcagcggcaccgacttcaccctgaccatcagctccctggaacccgaggacttcgccgtgtactactgccagcagcggagcaactggcccatcacattcggccagggcacccggctggaaatcaaaggcggaggcggaagtggaggcggaggatctggcggcggaggctctgaagtgcagctggtggaatcaggcggcggactggtgcagcctggcagaagcctgagactgagctgtgccgccagcggcttcaccttcaacgactacgccatgcactgggtgcgccaggcccctggaaaaggactggaatgggtgtccacaatcagctggaacagcggcagcatcggctacgccgatagcgtgaagggccggttcaccatcagccgggacaacgccaagaagtccctgtacctccagatgaacagcctgcgggccgaggacacagccctgtactattgcgccaaggacatccagtacggcaactactactacggcatggacgtgtggggccagggaaccaccgtgaccgtgtcatctacgcgtgagcagaaactgatctcggaagaggatctggcgaagcccaccacgacgccagcgccgcgaccaccaacaccggcgcccaccatcgcgtcgcagcccctgtccctgcgcccagaggcgtgccggccagcggcggggggcgcagtgcacacgagggggctggacttcgcctgtgacatctacatctgggcgcccttggccgggacttgtggggtccttctcctgtcactggttatcaccctttactgcaaacggggcagaaagaaactcctgtatatattcaaacaaccatttatgagaccagtacaaactactcaagaggaagatggctgtagctgccgatttccagaagaagaagaaggaggatgtgaactgagagtgaagttcagcaggagcgcagacgcccccgcgtaccagcagggccagaaccagctctataacgagctgaatctaggacgaagagaggagtacgatgttttggacaagagacgtggccgggaccctgagatggggggaaagccgagaaggaagaaccctcaggaaggcctgtacaatgaactgcagaaagataagatggcggaggcctacagtgagattgggatgaaaggcgagcgccggaggggcaaggggcacgatggcctttaccagggtctcagtacagccaccaaggacacctacgacgcccttcacatgcaggccctgccccctcgctctagtggctccggcgagggcagaggaagtctactaacctgcggagatgtggaagaaaatcctggcccacatatgaccgagtacaagcccacggtgcgcctcgccacccgcgacgacgtccccagggccgtacgcaccctcgccgccgcgttcgccgactaccccgccacgcgccacaccgtcgatccggaccgccacatcgagcgggtcaccgagctgcaagaactcttcctcacgcgcgtcgggctcgacatcggcaaggtgtgggtcgcggacgacggcgccgcggtggcggtctggaccacgccggagagcgtcgaagcgggggcggtgttcgccgagatcggcccgcgcatggccgagttgagcggttcccggctggccgcgcagcaacagatggaaggcctcctggcgccgcaccggcccaaggagcccgcgtggttcctggccaccgtcggcgtctcgcccgaccaccagggcaagggtctgggcagcgccgtcgtgctccccggagtggaggcggccgagcgcgccggggtgcccgccttcctggagacctccgcgccccgcaacctccccttctacgagcggctcggcttcaccgtcaccgccgacgtcgaggtgcccgaaggaccgcgcacctggtgcatgacccgcaagcccggtgcctga

SEQ ID NO: 1505 - DNA, 2190 bp, Artificial Sequence
  Synthetic Polynucleotides
atggccttaccagtgaccgccttgctcctgccgctggccttgctgctccacgccgccaggccggacatcgtgatgacccagacccccctgagcctgcctgtgacacctggcgagcctgccagcatctcctgcagaagcagcaagagcctgctgcacagcaacggcatcacctacctgtactggtatctgcagaaacccggccagagcccccaactgctgatctaccagatgagcaacctggtgtccggcgtgcccgacagattttctggcagcggctccggcaccgacttcaccctgaagatcagccgggtggaagccgaggacgtgggcgtgtactactgcgcccagaacctggaactgccctacacctttggcggcggaacaaaggtggaaatcaagcggggcggaggcggaagtggaggcggaggatctggcggcggaggctctcaggtgcaactggtgcagagcggagccgaagtgaaaaagcccggcagcagcgtgaaggtgtcctgcaaggccagcggctacgccttcagctactcctggatcaactgggtgcgccaggcccctggacagggcctggaatggatgggcagaatcttccccggcgacggcgacaccgactacaacggcaagttcaagggcagagtgaccatcaccgccgacaagagcaccagcaccgcctacatggaactgagcagcctgcggagcgaggataccgccgtgtactattgtgccagaaacgtgttcgacggctactggctggtgtactggggccagggaacacttgtgaccgtgtccagcacgcgtgagcagaaactgatctcggaagaggatctggcgaagcccaccacgacgccagcgccgcgaccaccaacaccggcgcccaccatcgcgtcgcagcccctgtccctgcgcccagaggcgtgccggccagcggcggggggcgcagtgcacacgagggggctggacttcgcctgtgacatctacatctgggcgcccttggccgggacttgtggggtccttctcctgtcactggttatcaccctttactgcaaacggggcagaaagaaactcctgtatatattcaaacaaccatttatgagaccagtacaaactactcaagaggaagatggctgtagctgccgatttccagaagaagaagaaggaggatgtgaactgagagtgaagttcagcaggagcgcagacgcccccgcgtaccagcagggccagaaccagctctataacgagctgaatctaggacgaagagaggagtacgatgttttggacaagagacgtggccgggaccctgagatggggggaaagccgagaaggaagaaccctcaggaaggcctgtacaatgaactgcagaaagataagatggcggaggcctacagtgagattgggatgaaaggcgagcgccggaggggcaaggggcacgatggcctttaccagggtctcagtacagccaccaaggacacctacgacgcccttcacatgcaggccctgccccctcgctctagtggctccggcgagggcagaggaagtctactaacctgcggagatgtggaagaaaatcctggcccacatatgaccgagtacaagcccacggtgcgcctcgccacccgcgacgacgtccccagggccgtacgcaccctcgccgccgcgttcgccgactaccccgccacgcgccacaccgtcgatccggaccgccacatcgagcgggtcaccgagctgcaagaactcttcctcacgcgcgtcgggctcgacatcggcaaggtgtgggtcgcggacgacggcgccgcggtggcggtctggaccacgccggagagcgtcgaagcgggggcggtgttcgccgagatcggcccgcgcatggccgagttgagcggttcccggctggccgcgcagcaacagatggaaggcctcctggcgccgcaccggcccaaggagcccgcgtggttcctggccaccgtcggcgtctcgcccgaccaccagggcaagggtctgggcagcgccgtcgtgctccccggagtggaggcggccgagcgcgccggggtgcccgccttcctggagacctccgcgccccgcaacctccccttctacgagcggctcggcttcaccgtcaccgccgacgtcgaggtgcccgaaggaccgcgcacctggtgcatgacccgcaagcccggtgcctga

SEQ ID NO: 1506 - DNA, 2181 bp, Artificial Sequence
  Synthetic Polynucleotides
atggccttaccagtgaccgccttgctcctgccgctggccttgctgctccacgccgccaggccggacatcgtgctgacacagagccctgccatcatcacagcctctccaggcgagaaagtgaccatgacctgtagagccagcagcagcgtgaactacatggactggtatcagaagaagcccggcagcagccccaagccttggatctacgccacaagcaatctggcctctggcgtgcccagcagattttctggctctggcagcggcaccacctacagcatgacaatctctagcctggaagccgaggacgccgccacctactattgtcagcagtggtccttcaatcctcctaccttcggcggaggcaccaagctggaaatcaaaagaggcggaggcggaagtggaggcggaggatctggcggcggaggctctgaagttcagcttcagcagagcggagccgagctgaagaaacctggcgcttctgtgaaggtgtcctgcaaggccagcggctacacctttaccagctacaacatgcactgggtcaagcagaccccaggccagggactcgaatggatcggagccatctatcccggcaacggcgacacctcctacaaccagaagttcaagggcaagaccacactgaccgccgacaagagcagctccaccgcctacatggaactgagcagcctgagatccgaggataccgccgtgtactactgcgccagaagcaactactacggcagctcctactggttcttcgacgtgtggggcaccggcacaaccgtgacagtttcttctacgcgtgagcagaaactgatctcggaagaggatctggcgaagcccaccacgacgccagcgccgcgaccaccaacaccggcgcccaccatcgcgtcgcagcccctgtccctgcgcccagaggcgtgccggccagcggcggggggcgcagtgcacacgagggggctggacttcgcctgtgacatctacatctgggcgcccttggccgggacttgtggggtccttctcctgtcactggttatcaccctttactgcaaacggggcagaaagaaactcctgtatatattcaaacaaccatttatgagaccagtacaaactactcaagaggaagatggctgtagctgccgatttccagaagaagaagaaggaggatgtgaactgagagtgaagttcagcaggagcgcagacgcccccgcgtaccagcagggccagaaccagctctataacgagctgaatctaggacgaagagaggagtacgatgttttggacaagagacgtggccgggaccctgagatggggggaaagccgagaaggaagaaccctcaggaaggcctgtacaatgaactgcagaaagataagatggcggaggcctacagtgagattgggatgaaaggcgagcgccggaggggcaaggggcacgatggcctttaccagggtctcagtacagccaccaaggacacctacgacgcccttcacatgcaggccctgccccctcgctctagtggctccggcgagggcagaggaagtctactaacctgcggagatgtggaagaaaatcctggcccacatatgaccgagtacaagcccacggtgcgcctcgccacccgcgacgacgtccccagggccgtacgcaccctcgccgccgcgttcgccgactaccccgccacgcgccacaccgtcgatccggaccgccacatcgagcgggtcaccgagctgcaagaactcttcctcacgcgcgtcgggctcgacatcggcaaggtgtgggtcgcggacgacggcgccgcggtggcggtctggaccacgccggagagcgtcgaagcgggggcggtgttcgccgagatcggcccgcgcatggccgagttgagcggttcccggctggccgcgcagcaacagatggaaggcctcctggcgccgcaccggcccaaggagcccgcgtggttcctggccaccgtcggcgtctcgcccgaccaccagggcaagggtctgggcagcgccgtcgtgctccccggagtggaggcggccgagcgcgccggggtgcccgccttcctggagacctccgcgccccgcaacctccccttctacgagcggctcggcttcaccgtcaccgccgacgtcgaggtgcccgaaggaccgcgcacctggtgcatgacccgcaagcccggtgcctga

SEQ ID NO: 1507 - DNA, 2190 bp, Artificial Sequence
  Synthetic Polynucleotides
atggccttaccagtgaccgccttgctcctgccgctggccttgctgctccacgccgccaggccggagatcgtgctgacacagtctcccgccacactgtcactgtctccaggcgaaagagccacactgagctgtagagccagccagagcgtgtcctcttacctggcctggtatcagcagaagcctggacaggctccccggctgctgatctacgatgccagcaatagagccacaggcatccccgccagattttctggctctggcagcggcaccgatttcaccctgaccataagcagcctggaacctgaggacttcgccgtgtactactgccagcagagaagcgactggcccctgacatttggcggcggaacaaaggtggaaatcaaaggcggaggcggaagtggaggcggaggatctggcggcggaggctctgaagtgcaactggttcaatcaggtggcggcctggttcaccctggcggatctctgagactgtcttgtaccggcagcggcttcaccttcagctaccacgccatgcactgggtccgacaggcacctggaaaaggactggaatgggtgtccatcatcggcacaggcggcgtgacctactacgccgattctgtgaagggcagattcaccatcagccgggacaacgtgaagaacagcctgtacctccagatgaactccctgagagccgaggatatggccgtgtattattgcgccagagactactacggcgctggcagcttttacgacggcctgtacggaatggatgtgtggggccagggaaccaccgtgactgtctcttctacgcgtgagcagaaactgatctcggaagaggatctggcgaagcccaccacgacgccagcgccgcgaccaccaacaccggcgcccaccatcgcgtcgcagcccctgtccctgcgcccagaggcgtgccggccagcggcggggggcgcagtgcacacgagggggctggacttcgcctgtgacatctacatctgggcgcccttggccgggacttgtggggtccttctcctgtcactggttatcaccctttactgcaaacggggcagaaagaaactcctgtatatattcaaacaaccatttatgagaccagtacaaactactcaagaggaagatggctgtagctgccgatttccagaagaagaagaaggaggatgtgaactgagagtgaagttcagcaggagcgcagacgcccccgcgtaccagcagggccagaaccagctctataacgagctgaatctaggacgaagagaggagtacgatgttttggacaagagacgtggccgggaccctgagatggggggaaagccgagaaggaagaaccctcaggaaggcctgtacaatgaactgcagaaagataagatggcggaggcctacagtgagattgggatgaaaggcgagcgccggaggggcaaggggcacgatggcctttaccagggtctcagtacagccaccaaggacacctacgacgcccttcacatgcaggccctgccccctcgctctagtggctccggcgagggcagaggaagtctactaacctgcggagatgtggaagaaaatcctggcccacatatgaccgagtacaagcccacggtgcgcctcgccacccgcgacgacgtccccagggccgtacgcaccctcgccgccgcgttcgccgactaccccgccacgcgccacaccgtcgatccggaccgccacatcgagcgggtcaccgagctgcaagaactcttcctcacgcgcgtcgggctcgacatcggcaaggtgtgggtcgcggacgacggcgccgcggtggcggtctggaccacgccggagagcgtcgaagcgggggcggtgttcgccgagatcggcccgcgcatggccgagttgagcggttcccggctggccgcgcagcaacagatggaaggcctcctggcgccgcaccggcccaaggagcccgcgtggttcctggccaccgtcggcgtctcgcccgaccaccagggcaagggtctgggcagcgccgtcgtgctccccggagtggaggcggccgagcgcgccggggtgcccgccttcctggagacctccgcgccccgcaacctccccttctacgagcggctcggcttcaccgtcaccgccgacgtcgaggtgcccgaaggaccgcgcacctggtgcatgacccgcaagcccggtgcctga

SEQ ID NO: 1508 - DNA, 2184 bp, Artificial Sequence
  Synthetic Polynucleotides
atggccttaccagtgaccgccttgctcctgccgctggccttgctgctccacgccgccaggccggagatcgtgctgacacagtctcccgccacactgtcactgtctccaggcgaaagagccacactgagctgtagagccagccagagcgtgtcctcttacctggcctggtatcagcagaagcctggacaggctccccggctgctgatctacgatgccagcaatagagccacaggcatccccgccagattttctggctctggcagcggcaccgatttcaccctgaccataagcagcctggaacctgaggacttcgccgtgtactactgccagcagagaagcaactggcccctgacatttggcggaggcaccaaggtggaaatcaaaggcggaggcggaagtggaggcggaggatctggcggcggaggctctgctgtgcagctcgttgagtctggcggaggacttgttcagcctggcagatccctgagactgtcttgtgccgccagcggcttcaccttcggcgattacacaatgcactgggtccgacaggcccctggcaaaggacttgaatgggtgtccggcatctcctggaacagcggctctatcggctacgccgattccgtgaagggcagattcaccatcagccgggacaacgccaagaacagcctgtacctccagatgaactccctgagagccgaggacacagccctgtactattgcaccaaggacaaccagtacggctccggcagcacatacggacttggagtttggggccagggcaccctggttacagtctcttctacgcgtgagcagaaactgatctcggaagaggatctggcgaagcccaccacgacgccagcgccgcgaccaccaacaccggcgcccaccatcgcgtcgcagcccctgtccctgcgcccagaggcgtgccggccagcggcggggggcgcagtgcacacgagggggctggacttcgcctgtgacatctacatctgggcgcccttggccgggacttgtggggtccttctcctgtcactggttatcaccctttactgcaaacggggcagaaagaaactcctgtatatattcaaacaaccatttatgagaccagtacaaactactcaagaggaagatggctgtagctgccgatttccagaagaagaagaaggaggatgtgaactgagagtgaagttcagcaggagcgcagacgcccccgcgtaccagcagggccagaaccagctctataacgagctgaatctaggacgaagagaggagtacgatgttttggacaagagacgtggccgggaccctgagatggggggaaagccgagaaggaagaaccctcaggaaggcctgtacaatgaactgcagaaagataagatggcggaggcctacagtgagattgggatgaaaggcgagcgccggaggggcaaggggcacgatggcctttaccagggtctcagtacagccaccaaggacacctacgacgcccttcacatgcaggccctgccccctcgctctagtggctccggcgagggcagaggaagtctactaacctgcggagatgtggaagaaaatcctggcccacatatgaccgagtacaagcccacggtgcgcctcgccacccgcgacgacgtccccagggccgtacgcaccctcgccgccgcgttcgccgactaccccgccacgcgccacaccgtcgatccggaccgccacatcgagcgggtcaccgagctgcaagaactcttcctcacgcgcgtcgggctcgacatcggcaaggtgtgggtcgcggacgacggcgccgcggtggcggtctggaccacgccggagagcgtcgaagcgggggcggtgttcgccgagatcggcccgcgcatggccgagttgagcggttcccggctggccgcgcagcaacagatggaaggcctcctggcgccgcaccggcccaaggagcccgcgtggttcctggccaccgtcggcgtctcgcccgaccaccagggcaagggtctgggcagcgccgtcgtgctccccggagtggaggcggccgagcgcgccggggtgcccgccttcctggagacctccgcgccccgcaacctccccttctacgagcggctcggcttcaccgtcaccgccgacgtcgaggtgcccgaaggaccgcgcacctggtgcatgacccgcaagcccggtgcctga

SEQ ID NO: 1509 - DNA, 2181 bp, Artificial Sequence
  Synthetic Polynucleotides
atggccttaccagtgaccgccttgctcctgccgctggccttgctgctccacgccgccaggccggacatccagatgacacagagccctagcagcctgtctgccagcgtgggagacagagtgaccatcacctgtagagccagcagcagcgtgtcctacatgcactggtatcagcagaagcccggcaaggcccctaagcctctgatctacgcccctagcaatctggcctctggcgtgccaagcagattttctggcagcggctctggcaccgacttcaccctgacaatatccagcctccagcctgaggacttcgccacctactactgccagcagtggtccttcaatcctcctaccttcggccagggcaccaaggtggaaatcaaaagaggcggaggcggaagtggaggcggaggatctggcggcggaggctctgaagtgcagcttgttgaatctggcggcggactggttcagcctggcggatctctgagactgtcttgtgccgccagcggctacaccttcaccagctacaatatgcactgggtccgacaggcccctggcaaaggacttgaatgggtcggagccatctatcccggcaacggcgacacctcctacaaccagaagttcaagggcagattcaccatcagcgtggacaagagcaagaacaccctgtacctccagatgaactccctgagagccgaggacaccgccgtgtactattgtgccagagtggtgtactacagcaacagctactggtacttcgacgtgtggggccagggaaccctggtcacagtttcttctacgcgtgagcagaaactgatctcggaagaggatctggcgaagcccaccacgacgccagcgccgcgaccaccaacaccggcgcccaccatcgcgtcgcagcccctgtccctgcgcccagaggcgtgccggccagcggcggggggcgcagtgcacacgagggggctggacttcgcctgtgacatctacatctgggcgcccttggccgggacttgtggggtccttctcctgtcactggttatcaccctttactgcaaacggggcagaaagaaactcctgtatatattcaaacaaccatttatgagaccagtacaaactactcaagaggaagatggctgtagctgccgatttccagaagaagaagaaggaggatgtgaactgagagtgaagttcagcaggagcgcagacgcccccgcgtaccagcagggccagaaccagctctataacgagctgaatctaggacgaagagaggagtacgatgttttggacaagagacgtggccgggaccctgagatggggggaaagccgagaaggaagaaccctcaggaaggcctgtacaatgaactgcagaaagataagatggcggaggcctacagtgagattgggatgaaaggcgagcgccggaggggcaaggggcacgatggcctttaccagggtctcagtacagccaccaaggacacctacgacgcccttcacatgcaggccctgccccctcgctctagtggctccggcgagggcagaggaagtctactaacctgcggagatgtggaagaaaatcctggcccacatatgaccgagtacaagcccacggtgcgcctcgccacccgcgacgacgtccccagggccgtacgcaccctcgccgccgcgttcgccgactaccccgccacgcgccacaccgtcgatccggaccgccacatcgagcgggtcaccgagctgcaagaactcttcctcacgcgcgtcgggctcgacatcggcaaggtgtgggtcgcggacgacggcgccgcggtggcggtctggaccacgccggagagcgtcgaagcgggggcggtgttcgccgagatcggcccgcgcatggccgagttgagcggttcccggctggccgcgcagcaacagatggaaggcctcctggcgccgcaccggcccaaggagcccgcgtggttcctggccaccgtcggcgtctcgcccgaccaccagggcaagggtctgggcagcgccgtcgtgctccccggagtggaggcggccgagcgcgccggggtgcccgccttcctggagacctccgcgccccgcaacctccccttctacgagcggctcggcttcaccgtcaccgccgacgtcgaggtgcccgaaggaccgcgcacctggtgcatgacccgcaagcccggtgcctga

SEQ ID NO: 1510 - DNA, 2175 bp, Artificial Sequence
  Synthetic Polynucleotides
atggccttaccagtgaccgccttgctcctgccgctggccttgctgctccacgccgccaggccggacatccagctcacacagagcccttctagcctgtctgccagcgtgggcgatagagtgaccatgacctgtagagccagcagcagcgtgtcctacatccactggttccagcagaagcctggcaaggcccctaagccttggatctacgccaccagcaatctggcctctggcgtgccagtcagattttctggcagcggctctggcaccgactacaccttcacaatatccagcctccagcctgaggacattgccacctactactgccagcagtggacctccaatcctcctacctttggcggaggcaccaagctggaaatcaaaggcggaggcggaagtggaggcggaggatctggcggcggaggctctcaggttcagctccagcagtctggggccgaagtgaagaaacctggcagctccgtgaaagtgtcctgcaaggccagcggctacacctttaccagctacaacatgcactgggtcaagcaggcccctggacagggactcgaatggatcggagccatctatcccggcaacggcgacacctcctacaaccagaagttcaagggcaaagccacactgaccgccgacgagagcacaaacaccgcctacatggaactgagcagcctgagaagcgaggacaccgccttctactactgtgcccggtctacctactacggcggcgactggtactttgacgtgtggggccagggaaccaccgtgacagtttcttctacgcgtgagcagaaactgatctcggaagaggatctggcgaagcccaccacgacgccagcgccgcgaccaccaacaccggcgcccaccatcgcgtcgcagcccctgtccctgcgcccagaggcgtgccggccagcggcggggggcgcagtgcacacgagggggctggacttcgcctgtgacatctacatctgggcgcccttggccgggacttgtggggtccttctcctgtcactggttatcaccctttactgcaaacggggcagaaagaaactcctgtatatattcaaacaaccatttatgagaccagtacaaactactcaagaggaagatggctgtagctgccgatttccagaagaagaagaaggaggatgtgaactgagagtgaagttcagcaggagcgcagacgcccccgcgtaccagcagggccagaaccagctctataacgagctgaatctaggacgaagagaggagtacgatgttttggacaagagacgtggccgggaccctgagatggggggaaagccgagaaggaagaaccctcaggaaggcctgtacaatgaactgcagaaagataagatggcggaggcctacagtgagattgggatgaaaggcgagcgccggaggggcaaggggcacgatggcctttaccagggtctcagtacagccaccaaggacacctacgacgcccttcacatgcaggccctgccccctcgctctagtggctccggcgagggcagaggaagtctactaacctgcggagatgtggaagaaaatcctggcccacatatgaccgagtacaagcccacggtgcgcctcgccacccgcgacgacgtccccagggccgtacgcaccctcgccgccgcgttcgccgactaccccgccacgcgccacaccgtcgatccggaccgccacatcgagcgggtcaccgagctgcaagaactcttcctcacgcgcgtcgggctcgacatcggcaaggtgtgggtcgcggacgacggcgccgcggtggcggtctggaccacgccggagagcgtcgaagcgggggcggtgttcgccgagatcggcccgcgcatggccgagttgagcggttcccggctggccgcgcagcaacagatggaaggcctcctggcgccgcaccggcccaaggagcccgcgtggttcctggccaccgtcggcgtctcgcccgaccaccagggcaagggtctgggcagcgccgtcgtgctccccggagtggaggcggccgagcgcgccggggtgcccgccttcctggagacctccgcgccccgcaacctccccttctacgagcggctcggcttcaccgtcaccgccgacgtcgaggtgcccgaaggaccgcgcacctggtgcatgacccgcaagcccggtgcctga

SEQ ID NO: 1511 - DNA, 2211 bp, Artificial Sequence
  Synthetic Polynucleotides
atggccttaccagtgaccgccttgctcctgccgctggccttgctgctccacgccgccaggccgagcaccgtgatgacacagagccctgatagcctggccgtgtctctgggagagagagccaccatcaactgcaagagcagccagagcaacagcaacgacgtggcctggtatcagcagaagccaggacagagccccaaggtgctgatctacttcgccagcaacagatacagcggcgtgcccgatagattttccggcagcggctacggcaccgacttcacccttacaatcagcagcctccaggccgaggatgtggccgtgtacttctgtcagcaagactacagcagccctctgacctttggagccggcaccaagctggaactgaaaagagctgacgctggcggaggcggaagtggaggcggaggatctggcggcggaggctctcagattcagctggtgcagtctggcagcgagctgaagaaacctggggcctctgtgaaggtgtcctgcaaggcttccggctacacctttaccaacttcggcgtgaactgggtccgacaggcccctggaaaaggactggaatggatgggctggatcaacacctacaccggcgagcctagctacgcccagggctttacaggcagattcgtgttcagcctggacgcctctgtgtctaccgcctacctccagatcagctccctgaaagccgaggacaccgccacctatttctgcaccagacggaccaactactacgggacctcctactactacgctatggactactggggccagggcaccaccgtgacagtgtctagcgccaagacaaccacgcgtgagcagaaactgatctcggaagaggatctggcgaagcccaccacgacgccagcgccgcgaccaccaacaccggcgcccaccatcgcgtcgcagcccctgtccctgcgcccagaggcgtgccggccagcggcggggggcgcagtgcacacgagggggctggacttcgcctgtgacatctacatctgggcgcccttggccgggacttgtggggtccttctcctgtcactggttatcaccctttactgcaaacggggcagaaagaaactcctgtatatattcaaacaaccatttatgagaccagtacaaactactcaagaggaagatggctgtagctgccgatttccagaagaagaagaaggaggatgtgaactgagagtgaagttcagcaggagcgcagacgcccccgcgtaccagcagggccagaaccagctctataacgagctgaatctaggacgaagagaggagtacgatgttttggacaagagacgtggccgggaccctgagatggggggaaagccgagaaggaagaaccctcaggaaggcctgtacaatgaactgcagaaagataagatggcggaggcctacagtgagattgggatgaaaggcgagcgccggaggggcaaggggcacgatggcctttaccagggtctcagtacagccaccaaggacacctacgacgcccttcacatgcaggccctgccccctcgctctagtggctccggcgagggcagaggaagtctactaacctgcggagatgtggaagaaaatcctggcccacatatgaccgagtacaagcccacggtgcgcctcgccacccgcgacgacgtccccagggccgtacgcaccctcgccgccgcgttcgccgactaccccgccacgcgccacaccgtcgatccggaccgccacatcgagcgggtcaccgagctgcaagaactcttcctcacgcgcgtcgggctcgacatcggcaaggtgtgggtcgcggacgacggcgccgcggtggcggtctggaccacgccggagagcgtcgaagcgggggcggtgttcgccgagatcggcccgcgcatggccgagttgagcggttcccggctggccgcgcagcaacagatggaaggcctcctggcgccgcaccggcccaaggagcccgcgtggttcctggccaccgtcggcgtctcgcccgaccaccagggcaagggtctgggcagcgccgtcgtgctccccggagtggaggcggccgagcgcgccggggtgcccgccttcctggagacctccgcgccccgcaacctccccttctacgagcggctcggcttcaccgtcaccgccgacgtcgaggtgcccgaaggaccgcgcacctggtgcatgacccgcaagcccggtgcctga

SEQ ID NO: 1512 - DNA, 2187 bp, Artificial Sequence
  Synthetic Polynucleotides
atggccttaccagtgaccgccttgctcctgccgctggccttgctgctccacgccgccaggccgcagatcgtgctgtctcagtctcctgccatcctgagcgcttccccaggcgagaaagtgaccatgacctgtagagccagcagcagcgtgtcctacatgcactggtatcagcagaagcccggcagcagccctaagccttggatctacgccaccagcaatctggcctctggcgtgccagccagattttctggctctggcagcggcaccagctacagcttcacaatcagcagagtggaagccgaggacgccgccacctactattgtcagcagtggaccttcaatcctcctaccttcggcggaggcacccggctggaaatcaaaagaacagtggctgctggcggaggcggaagtggaggcggaggatctggcggcggaggctctcaggcttatctgcaacagagcggagccgaactcgtcagacctggcgcttctgtgaagatgagctgcaaggccagcggctacaccttcaccagctataatatgcactgggtcaagcagacccctcggcagggactcgaatggatcggcggaatctatcccggcaacggcgacacctcctacaaccagaagttcaagggcaaagccacactgaccgtgggcaagagcagcagcaccgcctatatgcagctcagcagcctgaccagcgaggacagcgccgtgtacttctgcgccagatacgactacaactacgctatggactactggggccagggcaccagcgtgacagttagctctgccagcacgcgtgagcagaaactgatctcggaagaggatctggcgaagcccaccacgacgccagcgccgcgaccaccaacaccggcgcccaccatcgcgtcgcagcccctgtccctgcgcccagaggcgtgccggccagcggcggggggcgcagtgcacacgagggggctggacttcgcctgtgacatctacatctgggcgcccttggccgggacttgtggggtccttctcctgtcactggttatcaccctttactgcaaacggggcagaaagaaactcctgtatatattcaaacaaccatttatgagaccagtacaaactactcaagaggaagatggctgtagctgccgatttccagaagaagaagaaggaggatgtgaactgagagtgaagttcagcaggagcgcagacgcccccgcgtaccagcagggccagaaccagctctataacgagctgaatctaggacgaagagaggagtacgatgttttggacaagagacgtggccgggaccctgagatggggggaaagccgagaaggaagaaccctcaggaaggcctgtacaatgaactgcagaaagataagatggcggaggcctacagtgagattgggatgaaaggcgagcgccggaggggcaaggggcacgatggcctttaccagggtctcagtacagccaccaaggacacctacgacgcccttcacatgcaggccctgccccctcgctctagtggctccggcgagggcagaggaagtctactaacctgcggagatgtggaagaaaatcctggcccacatatgaccgagtacaagcccacggtgcgcctcgccacccgcgacgacgtccccagggccgtacgcaccctcgccgccgcgttcgccgactaccccgccacgcgccacaccgtcgatccggaccgccacatcgagcgggtcaccgagctgcaagaactcttcctcacgcgcgtcgggctcgacatcggcaaggtgtgggtcgcggacgacggcgccgcggtggcggtctggaccacgccggagagcgtcgaagcgggggcggtgttcgccgagatcggcccgcgcatggccgagttgagcggttcccggctggccgcgcagcaacagatggaaggcctcctggcgccgcaccggcccaaggagcccgcgtggttcctggccaccgtcggcgtctcgcccgaccaccagggcaagggtctgggcagcgccgtcgtgctccccggagtggaggcggccgagcgcgccggggtgcccgccttcctggagacctccgcgccccgcaacctccccttctacgagcggctcggcttcaccgtcaccgccgacgtcgaggtgcccgaaggaccgcgcacctggtgcatgacccgcaagcccggtgcctga

SEQ ID NO: 1513 - DNA, 2181 bp, Artificial Sequence; identical to SEQ ID NO: 1509
  Synthetic Polynucleotides

SEQ ID NO: 1514 - DNA, 2178 bp, Artificial Sequence
  Synthetic Polynucleotides
atggccttaccagtgaccgccttgctcctgccgctggccttgctgctccacgccgccaggccggagatcgtgctgacacagagcccttctagcctgtctgccagcgtgggcgacagagtgaccatcacatgtagagccagcagcagcctgagcttcatgcactggtatcagcagaagcccggcaaggcccctaagccttggatctacgccaccagcaatctggcctctggcgtgccaagcagattttctggcagcggctctggcaccgactacaccctgacaatatccagcctccagcctgaggacttcgccacctacttttgccaccagtggtccagcaatcctctgacctttggcggaggcaccaaggtggaaatcaaaggcggaggcggaagtggaggcggaggatctggcggcggaggctctcaggtgcaactggtgcagtctggggccgaagtgaagaaacctggggcctctgtgaaggtgtcctgcaaggcttccggctacacctttaccagctacaatatgcactgggtccgacaggctcccggccagagacttgaatggatcggagccatctatcccggcaacggcgacacctcctacaaccagaaattcaagggccgcgtgaccgtgaccagagacacatctgccaacaccgcctacatggaactgtctagcctgaagtccgaggacaccgccgtgtactactgtgccagaagccactacggcagcaactacgtggactacttcgactactggggccagggcacactggtcacagtctcttctacgcgtgagcagaaactgatctcggaagaggatctggcgaagcccaccacgacgccagcgccgcgaccaccaacaccggcgcccaccatcgcgtcgcagcccctgtccctgcgcccagaggcgtgccggccagcggcggggggcgcagtgcacacgagggggctggacttcgcctgtgacatctacatctgggcgcccttggccgggacttgtggggtccttctcctgtcactggttatcaccctttactgcaaacggggcagaaagaaactcctgtatatattcaaacaaccatttatgagaccagtacaaactactcaagaggaagatggctgtagctgccgatttccagaagaagaagaaggaggatgtgaactgagagtgaagttcagcaggagcgcagacgcccccgcgtaccagcagggccagaaccagctctataacgagctgaatctaggacgaagagaggagtacgatgttttggacaagagacgtggccgggaccctgagatggggggaaagccgagaaggaagaaccctcaggaaggcctgtacaatgaactgcagaaagataagatggcggaggcctacagtgagattgggatgaaaggcgagcgccggaggggcaaggggcacgatggcctttaccagggtctcagtacagccaccaaggacacctacgacgcccttcacatgcaggccctgccccctcgctctagtggctccggcgagggcagaggaagtctactaacctgcggagatgtggaagaaaatcctggcccacatatgaccgagtacaagcccacggtgcgcctcgccacccgcgacgacgtccccagggccgtacgcaccctcgccgccgcgttcgccgactaccccgccacgcgccacaccgtcgatccggaccgccacatcgagcgggtcaccgagctgcaagaactcttcctcacgcgcgtcgggctcgacatcggcaaggtgtgggtcgcggacgacggcgccgcggtggcggtctggaccacgccggagagcgtcgaagcgggggcggtgttcgccgagatcggcccgcgcatggccgagttgagcggttcccggctggccgcgcagcaacagatggaaggcctcctggcgccgcaccggcccaaggagcccgcgtggttcctggccaccgtcggcgtctcgcccgaccaccagggcaagggtctgggcagcgccgtcgtgctccccggagtggaggcggccgagcgcgccggggtgcccgccttcctggagacctccgcgccccgcaacctccccttctacgagcggctcggcttcaccgtcaccgccgacgtcgaggtgcccgaaggaccgcgcacctggtgcatgacccgcaagcccggtgcctga

SEQ ID NO: 1515 - DNA, 2184 bp, Artificial Sequence
  Synthetic Polynucleotides
atggccttaccagtgaccgccttgctcctgccgctggccttgctgctccacgccgccaggccggacgagatcgtgctgacacagagccctgccaccctgtctctgagccctggcgaaagagccaccctgagctgtagagccagccagagcgtgtccagctacctggcctggtatcagcagaagcccggccaggctccccggctgctgatctacgatgccagcaatagagccaccggcatccccgccagattttccggctctggcagcggcaccgacttcaccctgaccatcagctccctggaacccgaggacttcgccgtgtactactgccagcagcggagcaactggcccatcacattcggccagggcacccggctggaaatcaaaggcggaggcggaagtggaggcggaggatctggcggcggaggctctgaggtgcagcttgttgagtctggcggaggactggtgcagcccgatagaagcctgagactgtcttgtgccgccagcggcttcaccttccacgattatgccatgcactgggtccgacaggcccctggcaaaggacttgaatgggtgtccaccatctcttggaacagcggcacaatcggctacgccgactctgtgaagggcagattcaccatcagccgggacaacgccaagaacagcctgtacctccagatgaactccctgagagccgaggacacagccctgtactactgcgccaaggacatccagtacggcaactactactacggcatggacgtgtggggccagggcacaacagtgacagtctcttctacgcgtgagcagaaactgatctcggaagaggatctggcgaagcccaccacgacgccagcgccgcgaccaccaacaccggcgcccaccatcgcgtcgcagcccctgtccctgcgcccagaggcgtgccggccagcggcggggggcgcagtgcacacgagggggctggacttcgcctgtgacatctacatctgggcgcccttggccgggacttgtggggtccttctcctgtcactggttatcaccctttactgcaaacggggcagaaagaaactcctgtatatattcaaacaaccatttatgagaccagtacaaactactcaagaggaagatggctgtagctgccgatttccagaagaagaagaaggaggatgtgaactgagagtgaagttcagcaggagcgcagacgcccccgcgtaccagcagggccagaaccagctctataacgagctgaatctaggacgaagagaggagtacgatgttttggacaagagacgtggccgggaccctgagatggggggaaagccgagaaggaagaaccctcaggaaggcctgtacaatgaactgcagaaagataagatggcggaggcctacagtgagattgggatgaaaggcgagcgccggaggggcaaggggcacgatggcctttaccagggtctcagtacagccaccaaggacacctacgacgcccttcacatgcaggccctgccccctcgctctagtggctccggcgagggcagaggaagtctactaacctgcggagatgtggaagaaaatcctggcccacatatgaccgagtacaagcccacggtgcgcctcgccacccgcgacgacgtccccagggccgtacgcaccctcgccgccgcgttcgccgactaccccgccacgcgccacaccgtcgatccggaccgccacatcgagcgggtcaccgagctgcaagaactcttcctcacgcgcgtcgggctcgacatcggcaaggtgtgggtcgcggacgacggcgccgcggtggcggtctggaccacgccggagagcgtcgaagcgggggcggtgttcgccgagatcggcccgcgcatggccgagttgagcggttcccggctggccgcgcagcaacagatggaaggcctcctggcgccgcaccggcccaaggagcccgcgtggttcctggccaccgtcggcgtctcgcccgaccaccagggcaagggtctgggcagcgccgtcgtgctccccggagtggaggcggccgagcgcgccggggtgcccgccttcctggagacctccgcgccccgcaacctccccttctacgagcggctcggcttcaccgtcaccgccgacgtcgaggtgcccgaaggaccgcgcacctggtgcatgacccgcaagcccggtgcctga

SEQ ID NO: 1516 - DNA, 2178 bp, Artificial Sequence
  Synthetic Polynucleotides
atggccttaccagtgaccgccttgctcctgccgctggccttgctgctccacgccgccaggccggagatcgtgctgacacagagccctggcacactgtcactgtctccaggcgaaagagccacactgagctgtagagccagcagcagcgtgccctacatccactggtatcagcagaagcctggacaggcccctcggctgctgatctatgccacatctgctctggcctctggcatccccgatagattttctggcagcggctccggcaccgacttcaccctgacaatcagcagactggaacccgaggacttcgccgtgtactactgtcagcagtggctgagcaaccctcctacattcggccagggcaccaagctggaactgaaaagaggcggaggcggaagtggaggcggaggatctggcggcggaggctctgaagttcagctggttcagagcggagccgaagtgaagaagccaggcgagagcctgaagctgagctgcaaaggcagcggcagaaccttcaccagctacaacatgcactgggtccgacagatgcccggcaaaggactggaatggatgggcgctatctaccctctgaccggcgacacctcctacaaccagaaaagcaagctgcaagtgaccatcagcgccgacaagagcatcagcacagcctacctccagtggtcctctctgaaggccagcgacaccgccatgtactattgtgccagaagcacctacgtcggcggcgactggcagtttgatgtgtggggcaagggcaccaccgtgaccgtttcttctacgcgtgagcagaaactgatctcggaagaggatctggcgaagcccaccacgacgccagcgccgcgaccaccaacaccggcgcccaccatcgcgtcgcagcccctgtccctgcgcccagaggcgtgccggccagcggcggggggcgcagtgcacacgagggggctggacttcgcctgtgacatctacatctgggcgcccttggccgggacttgtggggtccttctcctgtcactggttatcaccctttactgcaaacggggcagaaagaaactcctgtatatattcaaacaaccatttatgagaccagtacaaactactcaagaggaagatggctgtagctgccgatttccagaagaagaagaaggaggatgtgaactgagagtgaagttcagcaggagcgcagacgcccccgcgtaccagcagggccagaaccagctctataacgagctgaatctaggacgaagagaggagtacgatgttttggacaagagacgtggccgggaccctgagatggggggaaagccgagaaggaagaaccctcaggaaggcctgtacaatgaactgcagaaagataagatggcggaggcctacagtgagattgggatgaaaggcgagcgccggaggggcaaggggcacgatggcctttaccagggtctcagtacagccaccaaggacacctacgacgcccttcacatgcaggccctgccccctcgctctagtggctccggcgagggcagaggaagtctactaacctgcggagatgtggaagaaaatcctggcccacatatgaccgagtacaagcccacggtgcgcctcgccacccgcgacgacgtccccagggccgtacgcaccctcgccgccgcgttcgccgactaccccgccacgcgccacaccgtcgatccggaccgccacatcgagcgggtcaccgagctgcaagaactcttcctcacgcgcgtcgggctcgacatcggcaaggtgtgggtcgcggacgacggcgccgcggtggcggtctggaccacgccggagagcgtcgaagcgggggcggtgttcgccgagatcggcccgcgcatggccgagttgagcggttcccggctggccgcgcagcaacagatggaaggcctcctggcgccgcaccggcccaaggagcccgcgtggttcctggccaccgtcggcgtctcgcccgaccaccagggcaagggtctgggcagcgccgtcgtgctccccggagtggaggcggccgagcgcgccggggtgcccgccttcctggagacctccgcgccccgcaacctccccttctacgagcggctcggcttcaccgtcaccgccgacgtcgaggtgcccgaaggaccgcgcacctggtgcatgacccgcaagcccggtgcctga

SEQ ID NO: 1517 - DNA, 2193 bp, Artificial Sequence
  Synthetic Polynucleotides
atggccttaccagtgaccgccttgctcctgccgctggccttgctgctccacgccgccaggccggacatccagatgacccagagccccagcagcctgtctgccagcgtgggcgacagagtgaccatcacctgtcggagcagccagagcatcgtgcactccgtgggcaacaccttcctggaatggtatcagcagaagcccggcaaggcccccaagctgctgatctacaaggtgtccaacagattcagcggcgtgcccagcaggtttagcggctctggcagcggcaccgacttcaccctgaccatctctagcctccagcccgaggacttcgccacctactactgttttcaaggcagccagttcccctacaccttcggccagggaacaaaggtggaaatcaagcggggcggaggcggaagtggaggcggaggatctggcggcggaggctctgaagtgcaactggtggaaagcggaggcggcctggtgcagcctggcggatctctgagactgagctgtgccgccagcggctacgagttcagccggtcctggatgaactgggtgcgccaggcccctggcaagggactggaatgggtgggaagaatctaccccggcgacggcgacaccaactacagcggcaagttcaagggccggttcaccatcagcgccgacaccagcaagaacaccgcctacctccagatgaacagcctgcgggccgaggataccgccgtgtactactgtgccagagatggcagctcctgggactggtacttcgacgtgtggggacagggaacccttgtgaccgtgtccagcacgcgtgagcagaaactgatctcggaagaggatctggcgaagcccaccacgacgccagcgccgcgaccaccaacaccggcgcccaccatcgcgtcgcagcccctgtccctgcgcccagaggcgtgccggccagcggcggggggcgcagtgcacacgagggggctggacttcgcctgtgacatctacatctgggcgcccttggccgggacttgtggggtccttctcctgtcactggttatcaccctttactgcaaacggggcagaaagaaactcctgtatatattcaaacaaccatttatgagaccagtacaaactactcaagaggaagatggctgtagctgccgatttccagaagaagaagaaggaggatgtgaactgagagtgaagttcagcaggagcgcagacgcccccgcgtaccagcagggccagaaccagctctataacgagctgaatctaggacgaagagaggagtacgatgttttggacaagagacgtggccgggaccctgagatggggggaaagccgagaaggaagaaccctcaggaaggcctgtacaatgaactgcagaaagataagatggcggaggcctacagtgagattgggatgaaaggcgagcgccggaggggcaaggggcacgatggcctttaccagggtctcagtacagccaccaaggacacctacgacgcccttcacatgcaggccctgccccctcgctctagtggctccggcgagggcagaggaagtctactaacctgcggagatgtggaagaaaatcctggcccacatatgaccgagtacaagcccacggtgcgcctcgccacccgcgacgacgtccccagggccgtacgcaccctcgccgccgcgttcgccgactaccccgccacgcgccacaccgtcgatccggaccgccacatcgagcgggtcaccgagctgcaagaactcttcctcacgcgcgtcgggctcgacatcggcaaggtgtgggtcgcggacgacggcgccgcggtggcggtctggaccacgccggagagcgtcgaagcgggggcggtgttcgccgagatcggcccgcgcatggccgagttgagcggttcccggctggccgcgcagcaacagatggaaggcctcctggcgccgcaccggcccaaggagcccgcgtggttcctggccaccgtcggcgtctcgcccgaccaccagggcaagggtctgggcagcgccgtcgtgctccccggagtggaggcggccgagcgcgccggggtgcccgccttcctggagacctccgcgccccgcaacctccccttctacgagcggctcggcttcaccgtcaccgccgacgtcgaggtgcccgaaggaccgcgcacctggtgcatgacccgcaagcccggtgcctga

SEQ ID NO: 1518 - DNA, 2169 bp, Artificial Sequence
  Synthetic Polynucleotides
atggccttaccagtgaccgccttgctcctgccgctggccttgctgctccacgccgccaggccggacatcgtgatgacccagagccccagcagcctgtctgccagcgtgggcgacagagtgaccatcacatgcaaggccagccagagcgtgaccaacgacgtggcctggtatcagcagaagcccggcaaggcccccaagctgctgatctactacgccagcaacagatacaccggcgtgcccagcagattcagcggctctggcagcggcaccgacttcaccctgaccatctctagcctccagcccgaggacttcgccacctactactgtcagcaggactacagaagcccctggaccttcggcggaggcaccaaggtggaaatcaagcggggcggaggcggaagtggaggcggaggatctggcggcggaggctctcaggtgcaactggaagaaagcgggggaggcgtcgtgcggcctggaagaagtctgagactgagctgtgccgccagcggcttcaccttcagcgactacggcgtgaactggatcagacaggcccctggcaagggcctggaatgggtcacaatcatctggggcgacggcagaaccgactacaacagcgccctgaagtcccggttcaccgtgtcccggaacaacagcaacaacaccctgagcctccagatgaacagcctgaccaccgaggacaccgccgtgtactactgtgtgcgggctcccggcaaccgggctatggaatattggggacagggcgtactcgtgaccgtgtcctctacgcgtgagcagaaactgatctcggaagaggatctggcgaagcccaccacgacgccagcgccgcgaccaccaacaccggcgcccaccatcgcgtcgcagcccctgtccctgcgcccagaggcgtgccggccagcggcggggggcgcagtgcacacgagggggctggacttcgcctgtgacatctacatctgggcgcccttggccgggacttgtggggtccttctcctgtcactggttatcaccctttactgcaaacggggcagaaagaaactcctgtatatattcaaacaaccatttatgagaccagtacaaactactcaagaggaagatggctgtagctgccgatttccagaagaagaagaaggaggatgtgaactgagagtgaagttcagcaggagcgcagacgcccccgcgtaccagcagggccagaaccagctctataacgagctgaatctaggacgaagagaggagtacgatgttttggacaagagacgtggccgggaccctgagatggggggaaagccgagaaggaagaaccctcaggaaggcctgtacaatgaactgcagaaagataagatggcggaggcctacagtgagattgggatgaaaggcgagcgccggaggggcaaggggcacgatggcctttaccagggtctcagtacagccaccaaggacacctacgacgcccttcacatgcaggccctgccccctcgctctagtggctccggcgagggcagaggaagtctactaacctgcggagatgtggaagaaaatcctggcccacatatgaccgagtacaagcccacggtgcgcctcgccacccgcgacgacgtccccagggccgtacgcaccctcgccgccgcgttcgccgactaccccgccacgcgccacaccgtcgatccggaccgccacatcgagcgggtcaccgagctgcaagaactcttcctcacgcgcgtcgggctcgacatcggcaaggtgtgggtcgcggacgacggcgccgcggtggcggtctggaccacgccggagagcgtcgaagcgggggcggtgttcgccgagatcggcccgcgcatggccgagttgagcggttcccggctggccgcgcagcaacagatggaaggcctcctggcgccgcaccggcccaaggagcccgcgtggttcctggccaccgtcggcgtctcgcccgaccaccagggcaagggtctgggcagcgccgtcgtgctccccggagtggaggcggccgagcgcgccggggtgcccgccttcctggagacctccgcgccccgcaacctccccttctacgagcggctcggcttcaccgtcaccgccgacgtcgaggtgcccgaaggaccgcgcacctggtgcatgacccgcaagcccggtgcctga

SEQ ID NO: 1519 - DNA, 2187 bp, Artificial Sequence
  Synthetic Polynucleotides
atggccttaccagtgaccgccttgctcctgccgctggccttgctgctccacgccgccaggccggacatccagatgacccagagccccagcagcctgtctgccagcgtgggcgacagagtgaccatcacctgtagagccagccagaccatctggtcctacctgaactggtatcagcagaggcccggcaaggcccccaacctgctgatctatgccgccagctctctccagagcggcgtgcccagcagattttccggcagaggcagcggcaccgacttcaccctgaccatcagttccttgcaggccgaggacttcgccacctactactgccagcagagctacagcatcccccagattttcggccagggcaccaagctggaaatcaagggcggaggcggaagtggaggcggaggatctggcggcggaggctctcaggtgcagctccagcagtctggacccggcctcgtgaagcctagccagacactgagcctgacctgcgccatcagcggcgatagcgtgtccagcaatagcgccgcctggaactggatcagacagtccccctctcggggcctggaatggctgggccggacctactaccgcagcaagtggtacaacgactacgccgtgtccgtgaagtcccggatcaccatcaaccccgacaccagcaagaaccagttctccttgcaactgaacagcgtgacccccgaggacaccgccgtgtactactgcgccagagaagtgaccggcgacctggaagatgccttcgacatctggggccagggaacaatggtcacagtgtccagcacgcgtgagcagaaactgatctcggaagaggatctggcgaagcccaccacgacgccagcgccgcgaccaccaacaccggcgcccaccatcgcgtcgcagcccctgtccctgcgcccagaggcgtgccggccagcggcggggggcgcagtgcacacgagggggctggacttcgcctgtgacatctacatctgggcgcccttggccgggacttgtggggtccttctcctgtcactggttatcaccctttactgcaaacggggcagaaagaaactcctgtatatattcaaacaaccatttatgagaccagtacaaactactcaagaggaagatggctgtagctgccgatttccagaagaagaagaaggaggatgtgaactgagagtgaagttcagcaggagcgcagacgcccccgcgtaccagcagggccagaaccagctctataacgagctgaatctaggacgaagagaggagtacgatgttttggacaagagacgtggccgggaccctgagatggggggaaagccgagaaggaagaaccctcaggaaggcctgtacaatgaactgcagaaagataagatggcggaggcctacagtgagattgggatgaaaggcgagcgccggaggggcaaggggcacgatggcctttaccagggtctcagtacagccaccaaggacacctacgacgcccttcacatgcaggccctgccccctcgctctagtggctccggcgagggcagaggaagtctactaacctgcggagatgtggaagaaaatcctggcccacatatgaccgagtacaagcccacggtgcgcctcgccacccgcgacgacgtccccagggccgtacgcaccctcgccgccgcgttcgccgactaccccgccacgcgccacaccgtcgatccggaccgccacatcgagcgggtcaccgagctgcaagaactcttcctcacgcgcgtcgggctcgacatcggcaaggtgtgggtcgcggacgacggcgccgcggtggcggtctggaccacgccggagagcgtcgaagcgggggcggtgttcgccgagatcggcccgcgcatggccgagttgagcggttcccggctggccgcgcagcaacagatggaaggcctcctggcgccgcaccggcccaaggagcccgcgtggttcctggccaccgtcggcgtctcgcccgaccaccagggcaagggtctgggcagcgccgtcgtgctccccggagtggaggcggccgagcgcgccggggtgcccgccttcctggagacctccgcgccccgcaacctccccttctacgagcggctcggcttcaccgtcaccgccgacgtcgaggtgcccgaaggaccgcgcacctggtgcatgacccgcaagcccggtgcctga

SEQ ID NO: 1520 - DNA, 2187 bp, Artificial Sequence
  Synthetic Polynucleotides
atggccttaccagtgaccgccttgctcctgccgctggccttgctgctccacgccgccaggccgcaggtgcagctccagcagtctggacccggcctcgtgaagcctagccagacactgagcctgacctgcgccatcagcggcgatagcgtgtccagcaatagcgccgcctggaactggatcagacagtccccctctcggggcctggaatggctgggccggacctactaccgcagcaagtggtacaacgactacgccgtgtccgtgaagtcccggatcaccatcaaccccgacaccagcaagaaccagttctccttgcaactgaacagcgtgacccccgaggacaccgccgtgtactactgcgccagagaagtgaccggcgacctggaagatgccttcgacatctggggccagggaacaatggtcacagtgtccagcggcggaggcggaagtggaggcggaggatctggcggcggaggctctgacatccagatgacccagagccccagcagcctgtctgccagcgtgggcgacagagtgaccatcacctgtagagccagccagaccatctggtcctacctgaactggtatcagcagaggcccggcaaggcccccaacctgctgatctatgccgccagctctctccagagcggcgtgcccagcagattttccggcagaggcagcggcaccgacttcaccctgaccatcagttccttgcaggccgaggacttcgccacctactactgccagcagagctacagcatcccccagattttcggccagggcaccaagctggaaatcaagacgcgtgagcagaaactgatctcggaagaggatctggcgaagcccaccacgacgccagcgccgcgaccaccaacaccggcgcccaccatcgcgtcgcagcccctgtccctgcgcccagaggcgtgccggccagcggcggggggcgcagtgcacacgagggggctggacttcgcctgtgacatctacatctgggcgcccttggccgggacttgtggggtccttctcctgtcactggttatcaccctttactgcaaacggggcagaaagaaactcctgtatatattcaaacaaccatttatgagaccagtacaaactactcaagaggaagatggctgtagctgccgatttccagaagaagaagaaggaggatgtgaactgagagtgaagttcagcaggagcgcagacgcccccgcgtaccagcagggccagaaccagctctataacgagctgaatctaggacgaagagaggagtacgatgttttggacaagagacgtggccgggaccctgagatggggggaaagccgagaaggaagaaccctcaggaaggcctgtacaatgaactgcagaaagataagatggcggaggcctacagtgagattgggatgaaaggcgagcgccggaggggcaaggggcacgatggcctttaccagggtctcagtacagccaccaaggacacctacgacgcccttcacatgcaggccctgccccctcgctctagtggctccggcgagggcagaggaagtctactaacctgcggagatgtggaagaaaatcctggcccacatatgaccgagtacaagcccacggtgcgcctcgccacccgcgacgacgtccccagggccgtacgcaccctcgccgccgcgttcgccgactaccccgccacgcgccacaccgtcgatccggaccgccacatcgagcgggtcaccgagctgcaagaactcttcctcacgcgcgtcgggctcgacatcggcaaggtgtgggtcgcggacgacggcgccgcggtggcggtctggaccacgccggagagcgtcgaagcgggggcggtgttcgccgagatcggcccgcgcatggccgagttgagcggttcccggctggccgcgcagcaacagatggaaggcctcctggcgccgcaccggcccaaggagcccgcgtggttcctggccaccgtcggcgtctcgcccgaccaccagggcaagggtctgggcagcgccgtcgtgctccccggagtggaggcggccgagcgcgccggggtgcccgccttcctggagacctccgcgccccgcaacctccccttctacgagcggctcggcttcaccgtcaccgccgacgtcgaggtgcccgaaggaccgcgcacctggtgcatgacccgcaagcccggtgcctga

SEQ ID NO: 1521 - DNA, 2166 bp, Artificial Sequence
  Synthetic Polynucleotides
atggccttaccagtgaccgccttgctcctgccgctggccttgctgctccacgccgccaggccggacatccagatgacccagagccccgccaccatcgagaacacaagcctgtctgccagcgtgggcgacagagtgaccatcacctgtagagccagccagggcatcagctcttggctgacctggtatcagcagaagcccgagaaggcccccaagagcctgatctacgccgccagctctctgcagtctggcgtgcccagcagattttccggcagcggctctggcaccgacttcaccctgacaatcagcagcctgcagcccgaggacttcgccacctactactgccagcagtacgacagctaccccatcaccttcggccagggcacccggctggaaatcaagggcggaggcggaagtggaggcggaggatctggcggcggaggctctcaggtgcaactgcagcagtggggagccggactgctgaagcctagcgagacactgagcctgacctgcgccgtgtacggcggcagcttcagcgcctactattggagctggatcagacagccccctggcaagggcctggaatggatcggcgacatcaatcacggcggaggcaccaactacaaccccagcctgaagtcccgcgtgaccatctccgtggacaccagcaagaaccagttctccctgaagctgaacagcgtgacagccgccgacacagccgtgtactactgtgccagcctgaccgcctattggggccagggatctcttgtgaccgtgtccagcacgcgtgagcagaaactgatctcggaagaggatctggcgaagcccaccacgacgccagcgccgcgaccaccaacaccggcgcccaccatcgcgtcgcagcccctgtccctgcgcccagaggcgtgccggccagcggcggggggcgcagtgcacacgagggggctggacttcgcctgtgacatctacatctgggcgcccttggccgggacttgtggggtccttctcctgtcactggttatcaccctttactgcaaacggggcagaaagaaactcctgtatatattcaaacaaccatttatgagaccagtacaaactactcaagaggaagatggctgtagctgccgatttccagaagaagaagaaggaggatgtgaactgagagtgaagttcagcaggagcgcagacgcccccgcgtaccagcagggccagaaccagctctataacgagctgaatctaggacgaagagaggagtacgatgttttggacaagagacgtggccgggaccctgagatggggggaaagccgagaaggaagaaccctcaggaaggcctgtacaatgaactgcagaaagataagatggcggaggcctacagtgagattgggatgaaaggcgagcgccggaggggcaaggggcacgatggcctttaccagggtctcagtacagccaccaaggacacctacgacgcccttcacatgcaggccctgccccctcgctctagtggctccggcgagggcagaggaagtctactaacctgcggagatgtggaagaaaatcctggcccacatatgaccgagtacaagcccacggtgcgcctcgccacccgcgacgacgtccccagggccgtacgcaccctcgccgccgcgttcgccgactaccccgccacgcgccacaccgtcgatccggaccgccacatcgagcgggtcaccgagctgcaagaactcttcctcacgcgcgtcgggctcgacatcggcaaggtgtgggtcgcggacgacggcgccgcggtggcggtctggaccacgccggagagcgtcgaagcgggggcggtgttcgccgagatcggcccgcgcatggccgagttgagcggttcccggctggccgcgcagcaacagatggaaggcctcctggcgccgcaccggcccaaggagcccgcgtggttcctggccaccgtcggcgtctcgcccgaccaccagggcaagggtctgggcagcgccgtcgtgctccccggagtggaggcggccgagcgcgccggggtgcccgccttcctggagacctccgcgccccgcaacctccccttctacgagcggctcggcttcaccgtcaccgccgacgtcgaggtgcccgaaggaccgcgcacctggtgcatgacccgcaagcccggtgcctga

SEQ ID NO: 1522 - DNA, 2181 bp, Artificial Sequence
  Synthetic Polynucleotides
atggccttaccagtgaccgccttgctcctgccgctggccttgctgctccacgccgccaggccggacgagatcgtgctgacccagagccctgatagcctggccgtgtctctgggcgagagagccaccatcaactgcaaggccagccagagcgtggacttcgacggcgacagctacctgaactggtatcagcagaagcccggccagccccccaaggtgctgatctatgccgccagcacactgcagagcggcgtgcccagcagattttctggcagcggctccggcaccgacttcaccctgaccatcaacagcctggaagccgaggacgccgccacctactactgccagcagagcaacgaggacccctggacctttggcggcggaacaaaggtggaaatcaagggcggaggcggaagtggaggcggaggatctggcggcggaggctctcaggtgcaactggtgcagtccggcgctgaagtgaagaaacctggggccagcgtgaaggtgtcctgcaaggtgtccggctacacctttaccgactactacattacctgggtgcgccaggcccctggacaggccctggaatggatgggctggatctaccccggcagcggcaacaccaagtacagccagaagttccagggcagattcgtgttcagcgtggacaccagcgccagcaccgcctacctgcaactgtctagcctgaaggccgaagataccgccgtgtactactgcgccaactacggcaactattggttcgcctattggggccagggaacccttgtgaccgtgtcctctacgcgtgagcagaaactgatctcggaagaggatctggcgaagcccaccacgacgccagcgccgcgaccaccaacaccggcgcccaccatcgcgtcgcagcccctgtccctgcgcccagaggcgtgccggccagcggcggggggcgcagtgcacacgagggggctggacttcgcctgtgacatctacatctgggcgcccttggccgggacttgtggggtccttctcctgtcactggttatcaccctttactgcaaacggggcagaaagaaactcctgtatatattcaaacaaccatttatgagaccagtacaaactactcaagaggaagatggctgtagctgccgatttccagaagaagaagaaggaggatgtgaactgagagtgaagttcagcaggagcgcagacgcccccgcgtaccagcagggccagaaccagctctataacgagctgaatctaggacgaagagaggagtacgatgttttggacaagagacgtggccgggaccctgagatggggggaaagccgagaaggaagaaccctcaggaaggcctgtacaatgaactgcagaaagataagatggcggaggcctacagtgagattgggatgaaaggcgagcgccggaggggcaaggggcacgatggcctttaccagggtctcagtacagccaccaaggacacctacgacgcccttcacatgcaggccctgccccctcgctctagtggctccggcgagggcagaggaagtctactaacctgcggagatgtggaagaaaatcctggcccacatatgaccgagtacaagcccacggtgcgcctcgccacccgcgacgacgtccccagggccgtacgcaccctcgccgccgcgttcgccgactaccccgccacgcgccacaccgtcgatccggaccgccacatcgagcgggtcaccgagctgcaagaactcttcctcacgcgcgtcgggctcgacatcggcaaggtgtgggtcgcggacgacggcgccgcggtggcggtctggaccacgccggagagcgtcgaagcgggggcggtgttcgccgagatcggcccgcgcatggccgagttgagcggttcccggctggccgcgcagcaacagatggaaggcctcctggcgccgcaccggcccaaggagcccgcgtggttcctggccaccgtcggcgtctcgcccgaccaccagggcaagggtctgggcagcgccgtcgtgctccccggagtggaggcggccgagcgcgccggggtgcccgccttcctggagacctccgcgccccgcaacctccccttctacgagcggctcggcttcaccgtcaccgccgacgtcgaggtgcccgaaggaccgcgcacctggtgcatgacccgcaagcccggtgcctga

SEQ ID NO: 1523 - DNA, 2172 bp, Artificial Sequence
  Synthetic Polynucleotides
atggccttaccagtgaccgccttgctcctgccgctggccttgctgctccacgccgccaggccggacatccagatgacccagagccccagcagcctgtctgccagcgtgggcgacagagtgaccatcacctgtagagccagccagggcatcagctcttggctggcctggtatcagcagaagcccgagaaggcccccaagagcctgatctacgccgcctctagtctccagagcggcgtgcccagcagattttctggcagcggctccggcaccgacttcaccctgacaatcagctccctccagcccgaggacttcgccacctactactgccagcagtacaacagctaccctcccacctttggcggaggcaccaaggtggaaatcaagggcggaggcggaagtggaggcggaggatctggcggcggaggctctgaagtgcaactggtgcagtctggcggagggctggtgcatcctgggggaagcctgagactgagctgtgccggctctggcttcgccttcagcagcagcaccatgcactggatcagacaggcccctggcaagggcctggaatggatcagcctgatcggaagcggagggggcatctactacggcgacagcgtgaagggccggttcaccatcagccgggacaacgccaagaacagcctgtacctccagatgaactccctgcgggccgaggacatggccgtgtactattgtgtgcggggctacttcgactgggtggactacttcgattactggggccagggcaccctcgtgaccgtgtcatctacgcgtgagcagaaactgatctcggaagaggatctggcgaagcccaccacgacgccagcgccgcgaccaccaacaccggcgcccaccatcgcgtcgcagcccctgtccctgcgcccagaggcgtgccggccagcggcggggggcgcagtgcacacgagggggctggacttcgcctgtgacatctacatctgggcgcccttggccgggacttgtggggtccttctcctgtcactggttatcaccctttactgcaaacggggcagaaagaaactcctgtatatattcaaacaaccatttatgagaccagtacaaactactcaagaggaagatggctgtagctgccgatttccagaagaagaagaaggaggatgtgaactgagagtgaagttcagcaggagcgcagacgcccccgcgtaccagcagggccagaaccagctctataacgagctgaatctaggacgaagagaggagtacgatgttttggacaagagacgtggccgggaccctgagatggggggaaagccgagaaggaagaaccctcaggaaggcctgtacaatgaactgcagaaagataagatggcggaggcctacagtgagattgggatgaaaggcgagcgccggaggggcaaggggcacgatggcctttaccagggtctcagtacagccaccaaggacacctacgacgcccttcacatgcaggccctgccccctcgctctagtggctccggcgagggcagaggaagtctactaacctgcggagatgtggaagaaaatcctggcccacatatgaccgagtacaagcccacggtgcgcctcgccacccgcgacgacgtccccagggccgtacgcaccctcgccgccgcgttcgccgactaccccgccacgcgccacaccgtcgatccggaccgccacatcgagcgggtcaccgagctgcaagaactcttcctcacgcgcgtcgggctcgacatcggcaaggtgtgggtcgcggacgacggcgccgcggtggcggtctggaccacgccggagagcgtcgaagcgggggcggtgttcgccgagatcggcccgcgcatggccgagttgagcggttcccggctggccgcgcagcaacagatggaaggcctcctggcgccgcaccggcccaaggagcccgcgtggttcctggccaccgtcggcgtctcgcccgaccaccagggcaagggtctgggcagcgccgtcgtgctccccggagtggaggcggccgagcgcgccggggtgcccgccttcctggagacctccgcgccccgcaacctccccttctacgagcggctcggcttcaccgtcaccgccgacgtcgaggtgcccgaaggaccgcgcacctggtgcatgacccgcaagcccggtgcctga

SEQ ID NO: 1524 - DNA, 2202 bp, Artificial Sequence
  Synthetic Polynucleotides
atggccttaccagtgaccgccttgctcctgccgctggccttgctgctccacgccgccaggccggacgacatcgtgatgacacagtcaccagatagcctcaccgtctccctgggggagcggaccaccattaattgtaaatccagccaaagcgtgctggactcaagcaagaacaagaatagcctcgcctggtatcagcagaagcccggtcagcctccaaagctgctgctttcttgggcctccaccagagagtccgggattcctgataggtttagtggttcaggctccggcacagattttactctgaccattgattctctccagccagaggattctgcaacttattactgccagcaaagcgcccactttcctataacttttggccagggaacccgacttgaaatcaagggcggaggcggaagtggaggcggaggatctggcggcggaggctctcaggtgcagctggtgcagagcggtgccgaagtgaagaaaccaggtgcatccgttaaagtttcatgtaaggctagtggatataccttcaccaattacggaatgaactgggtgaaacaggcccctggccagggactgaagtggatggggtggattaacacctacaccggggagccgacttatgcagacgactttaaggggcgggtcacgatgacctccgacacctccaccagtaccgcctacctggagctgcacaaccttaggtcagacgataccgccgtgtattactgtgcccgatggtcttggtccgacggatactatgtctacttcgactattggggccaggggaccacagttaccgtgtcctctacgcgtgagcagaaactgatctcggaagaggatctggcgaagcccaccacgacgccagcgccgcgaccaccaacaccggcgcccaccatcgcgtcgcagcccctgtccctgcgcccagaggcgtgccggccagcggcggggggcgcagtgcacacgagggggctggacttcgcctgtgacatctacatctgggcgcccttggccgggacttgtggggtccttctcctgtcactggttatcaccctttactgcaaacggggcagaaagaaactcctgtatatattcaaacaaccatttatgagaccagtacaaactactcaagaggaagatggctgtagctgccgatttccagaagaagaagaaggaggatgtgaactgagagtgaagttcagcaggagcgcagacgcccccgcgtaccagcagggccagaaccagctctataacgagctgaatctaggacgaagagaggagtacgatgttttggacaagagacgtggccgggaccctgagatggggggaaagccgagaaggaagaaccctcaggaaggcctgtacaatgaactgcagaaagataagatggcggaggcctacagtgagattgggatgaaaggcgagcgccggaggggcaaggggcacgatggcctttaccagggtctcagtacagccaccaaggacacctacgacgcccttcacatgcaggccctgccccctcgctctagtggctccggcgagggcagaggaagtctactaacctgcggagatgtggaagaaaatcctggcccacatatgaccgagtacaagcccacggtgcgcctcgccacccgcgacgacgtccccagggccgtacgcaccctcgccgccgcgttcgccgactaccccgccacgcgccacaccgtcgatccggaccgccacatcgagcgggtcaccgagctgcaagaactcttcctcacgcgcgtcgggctcgacatcggcaaggtgtgggtcgcggacgacggcgccgcggtggcggtctggaccacgccggagagcgtcgaagcgggggcggtgttcgccgagatcggcccgcgcatggccgagttgagcggttcccggctggccgcgcagcaacagatggaaggcctcctggcgccgcaccggcccaaggagcccgcgtggttcctggccaccgtcggcgtctcgcccgaccaccagggcaagggtctgggcagcgccgtcgtgctccccggagtggaggcggccgagcgcgccggggtgcccgccttcctggagacctccgcgccccgcaacctccccttctacgagcggctcggcttcaccgtcaccgccgacgtcgaggtgcccgaaggaccgcgcacctggtgcatgacccgcaagcccggtgcctga

SEQ ID NO: 1525 - DNA, 2190 bp, Artificial Sequence
  Synthetic Polynucleotides
atggccttaccagtgaccgccttgctcctgccgctggccttgctgctccacgccgccaggccggacgagatcgtgctgacacagagccctggaagcctggccgtgtctcctggcgagcgcgtgacaatgagctgcaagagcagccagagcgtgttcttcagcagctcccagaagaactacctggcctggtatcagcagatccccggccagagccccagactgctgatctactgggccagcaccagagaaagcggcgtgcccgatagattcaccggcagcggctctggcaccgacttcaccctgacaatcagcagcgtgcagcccgaggacctggctatctactactgccaccagtacctgagcagccggaccttcggccagggcaccaagctggaaatcaagagaggcggaggcggaagtggaggcggaggatctggcggcggaggctctcaggtgcaactgcagcagcctggcgctgaggtcgtgaagccaggcgcttccgtgaagatgtcctgcaaggccagcggctacaccttcaccagctactacatccactggatcaagcagacccctggacagggcctggaatgggtgggagtgatctaccccggcaacgacgacatcagctacaaccagaagttccagggcaaggccaccctgaccgccgacaagtctagcaccaccgcctacatgcaactgtccagcctgaccagcgaggacagcgccgtgtactactgcgccagagaagtgcggctgcggtacttcgatgtgtggggccagggaaccaccgtgaccgtgtcatctacgcgtgagcagaaactgatctcggaagaggatctggcgaagcccaccacgacgccagcgccgcgaccaccaacaccggcgcccaccatcgcgtcgcagcccctgtccctgcgcccagaggcgtgccggccagcggcggggggcgcagtgcacacgagggggctggacttcgcctgtgacatctacatctgggcgcccttggccgggacttgtggggtccttctcctgtcactggttatcaccctttactgcaaacggggcagaaagaaactcctgtatatattcaaacaaccatttatgagaccagtacaaactactcaagaggaagatggctgtagctgccgatttccagaagaagaagaaggaggatgtgaactgagagtgaagttcagcaggagcgcagacgcccccgcgtaccagcagggccagaaccagctctataacgagctgaatctaggacgaagagaggagtacgatgttttggacaagagacgtggccgggaccctgagatggggggaaagccgagaaggaagaaccctcaggaaggcctgtacaatgaactgcagaaagataagatggcggaggcctacagtgagattgggatgaaaggcgagcgccggaggggcaaggggcacgatggcctttaccagggtctcagtacagccaccaaggacacctacgacgcccttcacatgcaggccctgccccctcgctctagtggctccggcgagggcagaggaagtctactaacctgcggagatgtggaagaaaatcctggcccacatatgaccgagtacaagcccacggtgcgcctcgccacccgcgacgacgtccccagggccgtacgcaccctcgccgccgcgttcgccgactaccccgccacgcgccacaccgtcgatccggaccgccacatcgagcgggtcaccgagctgcaagaactcttcctcacgcgcgtcgggctcgacatcggcaaggtgtgggtcgcggacgacggcgccgcggtggcggtctggaccacgccggagagcgtcgaagcgggggcggtgttcgccgagatcggcccgcgcatggccgagttgagcggttcccggctggccgcgcagcaacagatggaaggcctcctggcgccgcaccggcccaaggagcccgcgtggttcctggccaccgtcggcgtctcgcccgaccaccagggcaagggtctgggcagcgccgtcgtgctccccggagtggaggcggccgagcgcgccggggtgcccgccttcctggagacctccgcgccccgcaacctccccttctacgagcggctcggcttcaccgtcaccgccgacgtcgaggtgcccgaaggaccgcgcacctggtgcatgacccgcaagcccggtgcctga

SEQ ID NO: 1526 - DNA, 2268 bp, Artificial Sequence
  Synthetic Polynucleotides
atggccttaccagtgaccgccttgctcctgccgctggccttgctgctccacgccgccaggccgtacatcaacatctacaacgccgagcctgccaatcctagcgagaagaacagccccacacagtacgcctacggcagcggagaattcgacatccagctgacacagagcccttctagcctgtctgccagcgtgggcgacagagtgaccatcacatgtagagccagccagggcatcagctctgtgctggcttggtatcagcagaagcctggcaaggcccctaagctgctgatctacgatgccagcagcctggaaagcggcgtgccaagcagattttctggcagcggctctggcaccgacttcaccctgacaatatccagcctccagcctgaggacttcgccacctactactgccagcagttcaacagcagcatcaccttcggccagggcaccaagctggaaatcaagagaacagtggcagccggcggaggcggaagtggaggcggaggatctggcggcggaggctctcaagttcagctggttcagtctggggccgaagtgaagaaacctggcagcagcgtgaaggtgtcctgcaaagcaagcggcggcaccttcagcgattacgccatctcttgggtccgacaggcccctggacaaggactggaatggatgggcagaatcatccccatcctgggcgtcgccaattacgcccagaaattccagggccgcgtgacaatcaccgccgacaagtctaccagaaccgcctacatggaactgagcagcctgagaagcgaggacaccgccgtgtactactgcgccagaaattgggccgacgccttcgacatttggggccagggaacaatggtcaccgtgtctagcgcctccacgcgtgagcagaaactgatctcggaagaggatctggcgaagcccaccacgacgccagcgccgcgaccaccaacaccggcgcccaccatcgcgtcgcagcccctgtccctgcgcccagaggcgtgccggccagcggcggggggcgcagtgcacacgagggggctggacttcgcctgtgacatctacatctgggcgcccttggccgggacttgtggggtccttctcctgtcactggttatcaccctttactgcaaacggggcagaaagaaactcctgtatatattcaaacaaccatttatgagaccagtacaaactactcaagaggaagatggctgtagctgccgatttccagaagaagaagaaggaggatgtgaactgagagtgaagttcagcaggagcgcagacgcccccgcgtaccagcagggccagaaccagctctataacgagctgaatctaggacgaagagaggagtacgatgttttggacaagagacgtggccgggaccctgagatggggggaaagccgagaaggaagaaccctcaggaaggcctgtacaatgaactgcagaaagataagatggcggaggcctacagtgagattgggatgaaaggcgagcgccggaggggcaaggggcacgatggcctttaccagggtctcagtacagccaccaaggacacctacgacgcccttcacatgcaggccctgccccctcgctctagtggctccggcgagggcagaggaagtctactaacctgcggagatgtggaagaaaatcctggcccacatatgaccgagtacaagcccacggtgcgcctcgccacccgcgacgacgtccccagggccgtacgcaccctcgccgccgcgttcgccgactaccccgccacgcgccacaccgtcgatccggaccgccacatcgagcgggtcaccgagctgcaagaactcttcctcacgcgcgtcgggctcgacatcggcaaggtgtgggtcgcggacgacggcgccgcggtggcggtctggaccacgccggagagcgtcgaagcgggggcggtgttcgccgagatcggcccgcgcatggccgagttgagcggttcccggctggccgcgcagcaacagatggaaggcctcctggcgccgcaccggcccaaggagcccgcgtggttcctggccaccgtcggcgtctcgcccgaccaccagggcaagggtctgggcagcgccgtcgtgctccccggagtggaggcggccgagcgcgccggggtgcccgccttcctggagacctccgcgccccgcaacctccccttctacgagcggctcggcttcaccgtcaccgccgacgtcgaggtgcccgaaggaccgcgcacctggtgcatgacccgcaagcccggtgcctga

SEQ ID NO: 1527 - DNA, 2265 bp, Artificial Sequence
  Synthetic Polynucleotides
atggccttaccagtgaccgccttgctcctgccgctggccttgctgctccacgccgccaggccgtacatcaacatctacaacgccgagcctgccaatcctagcgagaagaacagccccacacagtacgcctacggcagcggagaattcgacatcgtgatgacacagagccctagcagcctgtctgcctctctcggcggcaaagtgaccatcacatgcaaggccagccaggacatcaacaagtatatcgcctggtatcagcacaagcccggcaagggacctagactgctgatccactacaccagcacactccagcctggcatccccagcagattttctggcagcggctccggcagagactacagcttcagcatcagcaacctggaacctgaggacattgccacctactactgcctccagtacgacaacctgctgacctttggagccggcaccaagctggaactgaaaagaggcggaggcggaagtggaggcggaggatctggcggcggaggctctgaagtgaaactccagcagagcggccctgagctggttaagcctggcaccagcgtgaaggtgtcctgtaaagccagcggctactccttcaccgactacaacatgtactgggtcaagcagagccacggcaagagcctggaatggatcggctacatcgacccctacaaaggcggcaccatctacaaccagaagttcaagggcaaagccacactgaccgtggacaagagcagcagcaccgccttcatgcacctgaacagcctgaccagcgaggacagcgccgtgtactattgcgccagagagatgattaccgcctactacttcgactactggggccagggaagcagcgtgaccgttagctctctggaaagaacgcgtgagcagaaactgatctcggaagaggatctggcgaagcccaccacgacgccagcgccgcgaccaccaacaccggcgcccaccatcgcgtcgcagcccctgtccctgcgcccagaggcgtgccggccagcggcggggggcgcagtgcacacgagggggctggacttcgcctgtgacatctacatctgggcgcccttggccgggacttgtggggtccttctcctgtcactggttatcaccctttactgcaaacggggcagaaagaaactcctgtatatattcaaacaaccatttatgagaccagtacaaactactcaagaggaagatggctgtagctgccgatttccagaagaagaagaaggaggatgtgaactgagagtgaagttcagcaggagcgcagacgcccccgcgtaccagcagggccagaaccagctctataacgagctgaatctaggacgaagagaggagtacgatgttttggacaagagacgtggccgggaccctgagatggggggaaagccgagaaggaagaaccctcaggaaggcctgtacaatgaactgcagaaagataagatggcggaggcctacagtgagattgggatgaaaggcgagcgccggaggggcaaggggcacgatggcctttaccagggtctcagtacagccaccaaggacacctacgacgcccttcacatgcaggccctgccccctcgctctagtggctccggcgagggcagaggaagtctactaacctgcggagatgtggaagaaaatcctggcccacatatgaccgagtacaagcccacggtgcgcctcgccacccgcgacgacgtccccagggccgtacgcaccctcgccgccgcgttcgccgactaccccgccacgcgccacaccgtcgatccggaccgccacatcgagcgggtcaccgagctgcaagaactcttcctcacgcgcgtcgggctcgacatcggcaaggtgtgggtcgcggacgacggcgccgcggtggcggtctggaccacgccggagagcgtcgaagcgggggcggtgttcgccgagatcggcccgcgcatggccgagttgagcggttcccggctggccgcgcagcaacagatggaaggcctcctggcgccgcaccggcccaaggagcccgcgtggttcctggccaccgtcggcgtctcgcccgaccaccagggcaagggtctgggcagcgccgtcgtgctccccggagtggaggcggccgagcgcgccggggtgcccgccttcctggagacctccgcgccccgcaacctccccttctacgagcggctcggcttcaccgtcaccgccgacgtcgaggtgcccgaaggaccgcgcacctggtgcatgacccgcaagcccggtgcctga

SEQ ID NO: 1528 - DNA, 2313 bp, Artificial Sequence
  Synthetic Polynucleotides
atggccttaccagtgaccgccttgctcctgccgctggccttgctgctccacgccgccaggccggacatccagatgacacagagccctagcagcctgtctgccagcgtgggagatagagtgaccatcaactgcaaggccagccaggacatcaacagctacctgagctggttccagcagaagcctggcaaggcccctaagacactgatctaccgggccaacagactggtggatggcgtgccaagcagattttctggcagcggcagcggccaggattacaccctgacaatatccagcctccagcctgaggacttcgccacctactactgcctccagtacgacgagttccctctgacctttggcggaggcaccaaggtggaaatcaaaggcggaggcggaagtggaggcggaggatctggcggcggaggctctcaggtgcaactggtgcagtctggggccgaagtgaagaaacctggggcctctgtgaaggtgtcctgcaaagccagcggctacacctttaccaactacgacatcaactgggtccgacaggctccaggccaaggactggaatggatcggctggatctatcctggcgacggcagcaccaagtacaacgagaagttcaaggccaaggccacactgaccgccgataccagcacaagcaccgcctacatggaactgcggagcctgagaagcgacgacaccgccgtgtactattgtgcctccggctacgaggacgctatggactattggggccagggcaccaccgtgacagtgtctagtgccaagcctaccaccacaccagctccaagacctccaactcctgctcctacaatcgccagccagcctctgtctctcagacccgaagcctgtagacctgctgctggcggagctgtgcataccagaggactggatttcgcctgcgacatcacgcgtgagcagaaactgatctcggaagaggatctggcgaagcccaccacgacgccagcgccgcgaccaccaacaccggcgcccaccatcgcgtcgcagcccctgtccctgcgcccagaggcgtgccggccagcggcggggggcgcagtgcacacgagggggctggacttcgcctgtgacatctacatctgggcgcccttggccgggacttgtggggtccttctcctgtcactggttatcaccctttactgcaaacggggcagaaagaaactcctgtatatattcaaacaaccatttatgagaccagtacaaactactcaagaggaagatggctgtagctgccgatttccagaagaagaagaaggaggatgtgaactgagagtgaagttcagcaggagcgcagacgcccccgcgtaccagcagggccagaaccagctctataacgagctgaatctaggacgaagagaggagtacgatgttttggacaagagacgtggccgggaccctgagatggggggaaagccgagaaggaagaaccctcaggaaggcctgtacaatgaactgcagaaagataagatggcggaggcctacagtgagattgggatgaaaggcgagcgccggaggggcaaggggcacgatggcctttaccagggtctcagtacagccaccaaggacacctacgacgcccttcacatgcaggccctgccccctcgctctagtggctccggcgagggcagaggaagtctactaacctgcggagatgtggaagaaaatcctggcccacatatgaccgagtacaagcccacggtgcgcctcgccacccgcgacgacgtccccagggccgtacgcaccctcgccgccgcgttcgccgactaccccgccacgcgccacaccgtcgatccggaccgccacatcgagcgggtcaccgagctgcaagaactcttcctcacgcgcgtcgggctcgacatcggcaaggtgtgggtcgcggacgacggcgccgcggtggcggtctggaccacgccggagagcgtcgaagcgggggcggtgttcgccgagatcggcccgcgcatggccgagttgagcggttcccggctggccgcgcagcaacagatggaaggcctcctggcgccgcaccggcccaaggagcccgcgtggttcctggccaccgtcggcgtctcgcccgaccaccagggcaagggtctgggcagcgccgtcgtgctccccggagtggaggcggccgagcgcgccggggtgcccgccttcctggagacctccgcgccccgcaacctccccttctacgagcggctcggcttcaccgtcaccgccgacgtcgaggtgcccgaaggaccgcgcacctggtgcatgacccgcaagcccggtgcctga

SEQ ID NO: 1529 - DNA, 2181 bp, Artificial Sequence
  Synthetic Polynucleotides
atggccttaccagtgaccgccttgctcctgccgctggccttgctgctccacgccgccaggccggagatcgtgctgacacagagccctctgagcctgcctgttacacctggcgagcctgccagcatctcctgtagaagctctcagagcctgctgcacagcaacggctacaactacctggactggtatctccagaagcctggacagagcccacagctcctgatctacctgggcgtgaactctgtgtccggcgtgcccgatagattttctggcagcggctctggcaccgacttcaccctgaagatcagcagagtggaagccgaggacgtgggcgtgtactactgtatgcaggccctccagacaccttggacattcggccagggcaccaaggtggaaatcaaaggcggcggaggatctggcggaggtggaagtggcggaggcggatctcaagtgcaactggttcagagcggagccgaagtgaagaaacctggcagcagcgtgaaggtgtcctgcaaagcctctggcggcatcttcagcaaccacgccatctcttgggtccgacaggctcctggacaaggactggaatggatgggcggcatcatccccatcttcggcacagccaattacgcccagaaattccagggcagagtgaccatcaccgccgacgagtctaccagcaccgccttcatggaactgagcagcctgagaagcgaggacaccgccgtgtactattgcgccagagaatgggccgacgtgttcgacatttggggccagggaacaatggtcaccgtgtcctctacgcgtgagcagaaactgatctcggaagaggatctggcgaagcccaccacgacgccagcgccgcgaccaccaacaccggcgcccaccatcgcgtcgcagcccctgtccctgcgcccagaggcgtgccggccagcggcggggggcgcagtgcacacgagggggctggacttcgcctgtgacatctacatctgggcgcccttggccgggacttgtggggtccttctcctgtcactggttatcaccctttactgcaaacggggcagaaagaaactcctgtatatattcaaacaaccatttatgagaccagtacaaactactcaagaggaagatggctgtagctgccgatttccagaagaagaagaaggaggatgtgaactgagagtgaagttcagcaggagcgcagacgcccccgcgtaccagcagggccagaaccagctctataacgagctgaatctaggacgaagagaggagtacgatgttttggacaagagacgtggccgggaccctgagatggggggaaagccgagaaggaagaaccctcaggaaggcctgtacaatgaactgcagaaagataagatggcggaggcctacagtgagattgggatgaaaggcgagcgccggaggggcaaggggcacgatggcctttaccagggtctcagtacagccaccaaggacacctacgacgcccttcacatgcaggccctgccccctcgctctagtggctccggcgagggcagaggaagtctactaacctgcggagatgtggaagaaaatcctggcccacatatgaccgagtacaagcccacggtgcgcctcgccacccgcgacgacgtccccagggccgtacgcaccctcgccgccgcgttcgccgactaccccgccacgcgccacaccgtcgatccggaccgccacatcgagcgggtcaccgagctgcaagaactcttcctcacgcgcgtcgggctcgacatcggcaaggtgtgggtcgcggacgacggcgccgcggtggcggtctggaccacgccggagagcgtcgaagcgggggcggtgttcgccgagatcggcccgcgcatggccgagttgagcggttcccggctggccgcgcagcaacagatggaaggcctcctggcgccgcaccggcccaaggagcccgcgtggttcctggccaccgtcggcgtctcgcccgaccaccagggcaagggtctgggcagcgccgtcgtgctccccggagtggaggcggccgagcgcgccggggtgcccgccttcctggagacctccgcgccccgcaacctccccttctacgagcggctcggcttcaccgtcaccgccgacgtcgaggtgcccgaaggaccgcgcacctggtgcatgacccgcaagcccggtgcctga

SEQ ID NO: 1530 - DNA, 2178 bp, Artificial Sequence
  Synthetic Polynucleotides
atggccttaccagtgaccgccttgctcctgccgctggccttgctgctccacgccgccaggccggacatccagatgacacagtctccagccagcctgaccgtgtcactgggacagagagccaccatctcttgcagagccagcgagagcgtggacagctacggcaatagctacctgcactggtatcagcagaagcccggccagcctcctcagctcctgatctacctggcctccaatctggaaagcggcgtgccagccagattttctggcagcggcagcagaaccgacttcaccctgaccattgatcccgtggaagccgatgatgccgccacctactactgccagcagaacaacgaggacccctggacatttggcggaggcaccaaggtggaaatcaaaggcggcggaggatctggcggaggtggaagtggcggaggcggatctgaagttcagctccagcagagcggagccgagcttgtgaaacctggcgcttccgtgaagatgagctgcaaagccttcggctacaccttcaccacctttccaatcgagtggatgaagcagagccacggcaagagcctggaatggatcggcaactttcacccctacaacgaccagaccaagtacaacgaagagttcaagggcagagccaagctgaccatcgacagatccagcagcaccgtgtacctggaactgggcagactgacctccgatgacagcgccgtgtactactgtgccagaggctactactacgccttcgacttttggggccagggcaccacactgacagtgtctagcacgcgtgagcagaaactgatctcggaagaggatctggcgaagcccaccacgacgccagcgccgcgaccaccaacaccggcgcccaccatcgcgtcgcagcccctgtccctgcgcccagaggcgtgccggccagcggcggggggcgcagtgcacacgagggggctggacttcgcctgtgacatctacatctgggcgcccttggccgggacttgtggggtccttctcctgtcactggttatcaccctttactgcaaacggggcagaaagaaactcctgtatatattcaaacaaccatttatgagaccagtacaaactactcaagaggaagatggctgtagctgccgatttccagaagaagaagaaggaggatgtgaactgagagtgaagttcagcaggagcgcagacgcccccgcgtaccagcagggccagaaccagctctataacgagctgaatctaggacgaagagaggagtacgatgttttggacaagagacgtggccgggaccctgagatggggggaaagccgagaaggaagaaccctcaggaaggcctgtacaatgaactgcagaaagataagatggcggaggcctacagtgagattgggatgaaaggcgagcgccggaggggcaaggggcacgatggcctttaccagggtctcagtacagccaccaaggacacctacgacgcccttcacatgcaggccctgccccctcgctctagtggctccggcgagggcagaggaagtctactaacctgcggagatgtggaagaaaatcctggcccacatatgaccgagtacaagcccacggtgcgcctcgccacccgcgacgacgtccccagggccgtacgcaccctcgccgccgcgttcgccgactaccccgccacgcgccacaccgtcgatccggaccgccacatcgagcgggtcaccgagctgcaagaactcttcctcacgcgcgtcgggctcgacatcggcaaggtgtgggtcgcggacgacggcgccgcggtggcggtctggaccacgccggagagcgtcgaagcgggggcggtgttcgccgagatcggcccgcgcatggccgagttgagcggttcccggctggccgcgcagcaacagatggaaggcctcctggcgccgcaccggcccaaggagcccgcgtggttcctggccaccgtcggcgtctcgcccgaccaccagggcaagggtctgggcagcgccgtcgtgctccccggagtggaggcggccgagcgcgccggggtgcccgccttcctggagacctccgcgccccgcaacctccccttctacgagcggctcggcttcaccgtcaccgccgacgtcgaggtgcccgaaggaccgcgcacctggtgcatgacccgcaagcccggtgcctga

SEQ ID NO: 1531 - DNA, 2169 bp, Artificial Sequence
  Synthetic Polynucleotides
atggccttaccagtgaccgccttgctcctgccgctggccttgctgctccacgccgccaggccggacatccagatgacacagagccctagcagcctgtctgccagcgtgggagacagagtgaccatcacctgtagagccagccagggcatcagaaacgacctcggctggtatcagcagaagcctggcaaggcccctaagcggctgatctatgccgcttcctctctgcaatctggcgtgcccagcagattttctggcagcggctctggcaccgagttcaccctgacaatatccagcctccagcctgaggacttcgccacctactactgcctccagcacaacagctacccctggacctttggacagggcaccaagctggaaatcaaaggcggaggcggaagtggaggcggaggatctggcggcggaggctctgaagtgcaactggttgaatctggcggcgctctgattcagcctggcggatctctgagactgagctgtgtggcctccggctttaccatcagcggcaactacatgagctgggtccgacaggcccctggcaaaggacttgaatgggtgtccctgatctacagcggcgacagcacctattacgccgacagcgtgaagggcagattcaccatcagccgggacatcagcaagaacaccgtgtacctccagatgaactccctgagagtggaagataccgccgtgtactactgcgtccgcgacggctactacgtgtccgatatggttgtgtggggcaagggcaccaccgtgacagtctcttctacgcgtgagcagaaactgatctcggaagaggatctggcgaagcccaccacgacgccagcgccgcgaccaccaacaccggcgcccaccatcgcgtcgcagcccctgtccctgcgcccagaggcgtgccggccagcggcggggggcgcagtgcacacgagggggctggacttcgcctgtgacatctacatctgggcgcccttggccgggacttgtggggtccttctcctgtcactggttatcaccctttactgcaaacggggcagaaagaaactcctgtatatattcaaacaaccatttatgagaccagtacaaactactcaagaggaagatggctgtagctgccgatttccagaagaagaagaaggaggatgtgaactgagagtgaagttcagcaggagcgcagacgcccccgcgtaccagcagggccagaaccagctctataacgagctgaatctaggacgaagagaggagtacgatgttttggacaagagacgtggccgggaccctgagatggggggaaagccgagaaggaagaaccctcaggaaggcctgtacaatgaactgcagaaagataagatggcggaggcctacagtgagattgggatgaaaggcgagcgccggaggggcaaggggcacgatggcctttaccagggtctcagtacagccaccaaggacacctacgacgcccttcacatgcaggccctgccccctcgctctagtggctccggcgagggcagaggaagtctactaacctgcggagatgtggaagaaaatcctggcccacatatgaccgagtacaagcccacggtgcgcctcgccacccgcgacgacgtccccagggccgtacgcaccctcgccgccgcgttcgccgactaccccgccacgcgccacaccgtcgatccggaccgccacatcgagcgggtcaccgagctgcaagaactcttcctcacgcgcgtcgggctcgacatcggcaaggtgtgggtcgcggacgacggcgccgcggtggcggtctggaccacgccggagagcgtcgaagcgggggcggtgttcgccgagatcggcccgcgcatggccgagttgagcggttcccggctggccgcgcagcaacagatggaaggcctcctggcgccgcaccggcccaaggagcccgcgtggttcctggccaccgtcggcgtctcgcccgaccaccagggcaagggtctgggcagcgccgtcgtgctccccggagtggaggcggccgagcgcgccggggtgcccgccttcctggagacctccgcgccccgcaacctccccttctacgagcggctcggcttcaccgtcaccgccgacgtcgaggtgcccgaaggaccgcgcacctggtgcatgacccgcaagcccggtgcctga

SEQ ID NO: 1532 - DNA, 2199 bp, Artificial Sequence
  Synthetic Polynucleotides
atggccttaccagtgaccgccttgctcctgccgctggccttgctgctccacgccgccaggccggatgtgctgctgacccagagccctctgagcctgcctgtgacactgggacagcctgccagcatctcctgtcggagcagccagaccatcgtgcacagcaacggcaacacctacctggaatggttccagcagcggccaggccagagccccagactgctgatctaccaggtgtccaacagattcagcggcgtgcccgacagattctccggcagcggctctggcaccgacttcaccctgaagatcagccgggtggaagccgaggacgtgggcgtgtactactgttttcaaggcagccacgtgccccggacctttggcggaggaacaaaggtggaaatcaagagaggcggaggcggaagtggaggcggaggatctggcggcggaggctctcagatccaactggtgcagagcggcagcgagctgaagaaacctggggccagcgtgaaggtgtcctgcaaggccagcggctacacctttaccaactacggcatgaactgggtgcgccaggcccctggacagggcctgaaatggatgggctggatcaacaccaacaccggcgagcctaagtacgccgaagagttcaagggcagattcgccctgagcctggacaccagcgtgtccacagcctacctccagatcaacagcctgaaggccgaggataccgccgtgtacttctgcgccagaggctacggcaactacgccagaggggcttggctggcctattggggccagggaacactcgtgaccgtgtcctctacgcgtgagcagaaactgatctcggaagaggatctggcgaagcccaccacgacgccagcgccgcgaccaccaacaccggcgcccaccatcgcgtcgcagcccctgtccctgcgcccagaggcgtgccggccagcggcggggggcgcagtgcacacgagggggctggacttcgcctgtgacatctacatctgggcgcccttggccgggacttgtggggtccttctcctgtcactggttatcaccctttactgcaaacggggcagaaagaaactcctgtatatattcaaacaaccatttatgagaccagtacaaactactcaagaggaagatggctgtagctgccgatttccagaagaagaagaaggaggatgtgaactgagagtgaagttcagcaggagcgcagacgcccccgcgtaccagcagggccagaaccagctctataacgagctgaatctaggacgaagagaggagtacgatgttttggacaagagacgtggccgggaccctgagatggggggaaagccgagaaggaagaaccctcaggaaggcctgtacaatgaactgcagaaagataagatggcggaggcctacagtgagattgggatgaaaggcgagcgccggaggggcaaggggcacgatggcctttaccagggtctcagtacagccaccaaggacacctacgacgcccttcacatgcaggccctgccccctcgctctagtggctccggcgagggcagaggaagtctactaacctgcggagatgtggaagaaaatcctggcccacatatgaccgagtacaagcccacggtgcgcctcgccacccgcgacgacgtccccagggccgtacgcaccctcgccgccgcgttcgccgactaccccgccacgcgccacaccgtcgatccggaccgccacatcgagcgggtcaccgagctgcaagaactcttcctcacgcgcgtcgggctcgacatcggcaaggtgtgggtcgcggacgacggcgccgcggtggcggtctggaccacgccggagagcgtcgaagcgggggcggtgttcgccgagatcggcccgcgcatggccgagttgagcggttcccggctggccgcgcagcaacagatggaaggcctcctggcgccgcaccggcccaaggagcccgcgtggttcctggccaccgtcggcgtctcgcccgaccaccagggcaagggtctgggcagcgccgtcgtgctccccggagtggaggcggccgagcgcgccggggtgcccgccttcctggagacctccgcgccccgcaacctccccttctacgagcggctcggcttcaccgtcaccgccgacgtcgaggtgcccgaaggaccgcgcacctggtgcatgacccgcaagcccggtgcctga

SEQ ID NO: 1533 - DNA, 2160 bp, Artificial Sequence
  Synthetic Polynucleotides
atggccttaccagtgaccgccttgctcctgccgctggccttgctgctccacgccgccaggccggacgagatcgtgctgacacagagccctgccacactctctctgagccctggcgaaagagccaccctgagctgtagcgccagcagcagcatcaactacatctactggctccagcagaagcccggccaggcccccagaatcctgatctacctgaccagcaacctggcctccggcgtgccagccagattttctggcagcggctccggcaccgacttcaccctgacaatcagcagcctggaacccgaggacttcgccgtgtactactgcctccagtggtccagcaaccccctgacctttggcggaggcaccaaggtggaaatcaagggcggaggcggaagtggaggcggaggatctggcggcggaggctctttcgaagtgcaactggtggaaagcgggggaggacttgtgaagcctggcggctctctgagactgagctgtgccgcctctggcttcaccttcagcagctacgacatgagctgggtgcgccaggctcctggcaagggactggaatgggtgtccaccatcagcagcggcggcagctacacctactacctggacagcatcaagggccggttcaccatctccagagacaacgccaagaacagcctgtacctccagatgaactccctgcgggccgaggacacagccgtgtattattgcgccagacagggcctggattactggggcagaggcacccttgtgaccgtgtcctctacgcgtgagcagaaactgatctcggaagaggatctggcgaagcccaccacgacgccagcgccgcgaccaccaacaccggcgcccaccatcgcgtcgcagcccctgtccctgcgcccagaggcgtgccggccagcggcggggggcgcagtgcacacgagggggctggacttcgcctgtgacatctacatctgggcgcccttggccgggacttgtggggtccttctcctgtcactggttatcaccctttactgcaaacggggcagaaagaaactcctgtatatattcaaacaaccatttatgagaccagtacaaactactcaagaggaagatggctgtagctgccgatttccagaagaagaagaaggaggatgtgaactgagagtgaagttcagcaggagcgcagacgcccccgcgtaccagcagggccagaaccagctctataacgagctgaatctaggacgaagagaggagtacgatgttttggacaagagacgtggccgggaccctgagatggggggaaagccgagaaggaagaaccctcaggaaggcctgtacaatgaactgcagaaagataagatggcggaggcctacagtgagattgggatgaaaggcgagcgccggaggggcaaggggcacgatggcctttaccagggtctcagtacagccaccaaggacacctacgacgcccttcacatgcaggccctgccccctcgctctagtggctccggcgagggcagaggaagtctactaacctgcggagatgtggaagaaaatcctggcccacatatgaccgagtacaagcccacggtgcgcctcgccacccgcgacgacgtccccagggccgtacgcaccctcgccgccgcgttcgccgactaccccgccacgcgccacaccgtcgatccggaccgccacatcgagcgggtcaccgagctgcaagaactcttcctcacgcgcgtcgggctcgacatcggcaaggtgtgggtcgcggacgacggcgccgcggtggcggtctggaccacgccggagagcgtcgaagcgggggcggtgttcgccgagatcggcccgcgcatggccgagttgagcggttcccggctggccgcgcagcaacagatggaaggcctcctggcgccgcaccggcccaaggagcccgcgtggttcctggccaccgtcggcgtctcgcccgaccaccagggcaagggtctgggcagcgccgtcgtgctccccggagtggaggcggccgagcgcgccggggtgcccgccttcctggagacctccgcgccccgcaacctccccttctacgagcggctcggcttcaccgtcaccgccgacgtcgaggtgcccgaaggaccgcgcacctggtgcatgacccgcaagcccggtgcctga

SEQ ID NO: 1534 - DNA, 2184 bp, Artificial Sequence
  Synthetic Polynucleotides
atggccttaccagtgaccgccttgctcctgccgctggccttgctgctccacgccgccaggccggacatcgtgatgacccagagccccgatagcctggccgtgtctctgggagagagagccaccatcaactgccgggccagcaagagcgtgtccaccagcggctacagcttcatgcactggtatcagcagaagcccggccagccccccaagctgctgatctacctggcctccaacctggaaagcggcgtgcccgatagattcagcggcagcggctctggcaccgacttcaccctgaccatcagttctcttcaggccgaggacgtggccgtgtactactgccagcacagcagagaggtgccctggacattcggccagggcacaaaggtggaaatcaagcggggcggaggcggaagtggaggcggaggatctggcggcggaggctctcaggtgcagctggtgcagtctggggccgaagtgaagaaacctggggccagcgtgaaggtgtcctgcaaggccagcggatacacctttaccaactacggcatgaactgggtgcgccaggcccctggacagggcctggaatggatgggctggatcaacacctacaccggcgagcccacatacgccgacgccttcaagggcagattcgccttcagcctggacaccagcacctccaccgcctacctccagatcaacagcctgcggagcgacgacaccgccgtgtattattgcgccagagattacggcgactacgggatggactattggggccagggaaccaccgtgaccgtgtcctctacgcgtgagcagaaactgatctcggaagaggatctggcgaagcccaccacgacgccagcgccgcgaccaccaacaccggcgcccaccatcgcgtcgcagcccctgtccctgcgcccagaggcgtgccggccagcggcggggggcgcagtgcacacgagggggctggacttcgcctgtgacatctacatctgggcgcccttggccgggacttgtggggtccttctcctgtcactggttatcaccctttactgcaaacggggcagaaagaaactcctgtatatattcaaacaaccatttatgagaccagtacaaactactcaagaggaagatggctgtagctgccgatttccagaagaagaagaaggaggatgtgaactgagagtgaagttcagcaggagcgcagacgcccccgcgtaccagcagggccagaaccagctctataacgagctgaatctaggacgaagagaggagtacgatgttttggacaagagacgtggccgggaccctgagatggggggaaagccgagaaggaagaaccctcaggaaggcctgtacaatgaactgcagaaagataagatggcggaggcctacagtgagattgggatgaaaggcgagcgccggaggggcaaggggcacgatggcctttaccagggtctcagtacagccaccaaggacacctacgacgcccttcacatgcaggccctgccccctcgctctagtggctccggcgagggcagaggaagtctactaacctgcggagatgtggaagaaaatcctggcccacatatgaccgagtacaagcccacggtgcgcctcgccacccgcgacgacgtccccagggccgtacgcaccctcgccgccgcgttcgccgactaccccgccacgcgccacaccgtcgatccggaccgccacatcgagcgggtcaccgagctgcaagaactcttcctcacgcgcgtcgggctcgacatcggcaaggtgtgggtcgcggacgacggcgccgcggtggcggtctggaccacgccggagagcgtcgaagcgggggcggtgttcgccgagatcggcccgcgcatggccgagttgagcggttcccggctggccgcgcagcaacagatggaaggcctcctggcgccgcaccggcccaaggagcccgcgtggttcctggccaccgtcggcgtctcgcccgaccaccagggcaagggtctgggcagcgccgtcgtgctccccggagtggaggcggccgagcgcgccggggtgcccgccttcctggagacctccgcgccccgcaacctccccttctacgagcggctcggcttcaccgtcaccgccgacgtcgaggtgcccgaaggaccgcgcacctggtgcatgacccgcaagcccggtgcctga

SEQ ID NO: 1535 - DNA, 2172 bp, Artificial Sequence
  Synthetic Polynucleotides
atggccttaccagtgaccgccttgctcctgccgctggccttgctgctccacgccgccaggccggacatcgtgatgacccagacccccctgaccctgagcgtgacaatcggacagcctgccagcatctcctgcaagagcagccagagcctgctggacagcgacggcaagacctacctgaactggctgctgcagaggccaggccagagccccgagagactgatctacctggtgtccaagctggactccggcgtgcccgatagattcacaggcagcggctccggcaccgacttcaccctgaagatcagccgggtggaagccgaggacctgggcgtgtactgttgttggcagggcacccacttcccttacaccttcggcggagggaccaaggtggaaatcaagggcggcggaggcggaagtggaggcggaggatctggcggcggaggctctcaggtgcaactgcagcagcctggcgctgaacttgtgcggccaggcgcctctgtgaagctgagctgtaaagccagcggctacaccttcaccagctactggatgaactgggtcaagcagcgcccaggccagggcctggaatggatcggaatgatcgaccccagcgacagcgagacacactacaaccacatcttcaaggacaaggccaccctgaccgtggacaagtccagcagcacagcctacctgcaactgtccagcctgaccagcgaggacagcgccgtgtactactgcgcccggaacctgtatctgtggggccagggaacaagcgtgaccgtgtctagcacgcgtgagcagaaactgatctcggaagaggatctggcgaagcccaccacgacgccagcgccgcgaccaccaacaccggcgcccaccatcgcgtcgcagcccctgtccctgcgcccagaggcgtgccggccagcggcggggggcgcagtgcacacgagggggctggacttcgcctgtgacatctacatctgggcgcccttggccgggacttgtggggtccttctcctgtcactggttatcaccctttactgcaaacggggcagaaagaaactcctgtatatattcaaacaaccatttatgagaccagtacaaactactcaagaggaagatggctgtagctgccgatttccagaagaagaagaaggaggatgtgaactgagagtgaagttcagcaggagcgcagacgcccccgcgtaccagcagggccagaaccagctctataacgagctgaatctaggacgaagagaggagtacgatgttttggacaagagacgtggccgggaccctgagatggggggaaagccgagaaggaagaaccctcaggaaggcctgtacaatgaactgcagaaagataagatggcggaggcctacagtgagattgggatgaaaggcgagcgccggaggggcaaggggcacgatggcctttaccagggtctcagtacagccaccaaggacacctacgacgcccttcacatgcaggccctgccccctcgctctagtggctccggcgagggcagaggaagtctactaacctgcggagatgtggaagaaaatcctggcccacatatgaccgagtacaagcccacggtgcgcctcgccacccgcgacgacgtccccagggccgtacgcaccctcgccgccgcgttcgccgactaccccgccacgcgccacaccgtcgatccggaccgccacatcgagcgggtcaccgagctgcaagaactcttcctcacgcgcgtcgggctcgacatcggcaaggtgtgggtcgcggacgacggcgccgcggtggcggtctggaccacgccggagagcgtcgaagcgggggcggtgttcgccgagatcggcccgcgcatggccgagttgagcggttcccggctggccgcgcagcaacagatggaaggcctcctggcgccgcaccggcccaaggagcccgcgtggttcctggccaccgtcggcgtctcgcccgaccaccagggcaagggtctgggcagcgccgtcgtgctccccggagtggaggcggccgagcgcgccggggtgcccgccttcctggagacctccgcgccccgcaacctccccttctacgagcggctcggcttcaccgtcaccgccgacgtcgaggtgcccgaaggaccgcgcacctggtgcatgacccgcaagcccggtgcctga

SEQ ID NO: 1536 - DNA, 2184 bp, Artificial Sequence
  Synthetic Polynucleotides
atggccttaccagtgaccgccttgctcctgccgctggccttgctgctccacgccgccaggccggacgacatccagttgacccagtcccccagctcactcagcgccagtgtgggggaccgggtgaccattacctgtaaagccagtcagagtgtggactatgagggggatagcttcctgaattggtatcagcagaagcctggcaaagccccaaagctgctgatctacgctgcatctaatctggagtcaggcgtgccttctaggttctccggtagtgggtctgggaccgatttcacattgaccatttcatccctccaacccgaggatttcgctacatattactgtcagcagtccaatgaggaccctctcacctttggccagggcaccaaagttgaaattaagagaggcggaggcggaagtggaggcggaggatctggcggcggaggctctgaagtccaacttgtggagtctggagggggcctggtgcagcccggcggctctctcagactgtcttgtgcggcaagcggctacaccttcagctcttactggatagaatgggtgaggcaggcacctggaaagggactggagtggattggagagattctgccaggagggggagatacaaattacaatgaaatcttcaaggggcgggccaccttttcagcggataccagcaagaatacagcttacctgcagatgaatagcctccgggcagaagataccgctgtttattattgcacgagacgggtgccaataagactggactattgggggcaagggactcttgtcaccgtcagttcaacgcgtgagcagaaactgatctcggaagaggatctggcgaagcccaccacgacgccagcgccgcgaccaccaacaccggcgcccaccatcgcgtcgcagcccctgtccctgcgcccagaggcgtgccggccagcggcggggggcgcagtgcacacgagggggctggacttcgcctgtgacatctacatctgggcgcccttggccgggacttgtggggtccttctcctgtcactggttatcaccctttactgcaaacggggcagaaagaaactcctgtatatattcaaacaaccatttatgagaccagtacaaactactcaagaggaagatggctgtagctgccgatttccagaagaagaagaaggaggatgtgaactgagagtgaagttcagcaggagcgcagacgcccccgcgtaccagcagggccagaaccagctctataacgagctgaatctaggacgaagagaggagtacgatgttttggacaagagacgtggccgggaccctgagatggggggaaagccgagaaggaagaaccctcaggaaggcctgtacaatgaactgcagaaagataagatggcggaggcctacagtgagattgggatgaaaggcgagcgccggaggggcaaggggcacgatggcctttaccagggtctcagtacagccaccaaggacacctacgacgcccttcacatgcaggccctgccccctcgctctagtggctccggcgagggcagaggaagtctactaacctgcggagatgtggaagaaaatcctggcccacatatgaccgagtacaagcccacggtgcgcctcgccacccgcgacgacgtccccagggccgtacgcaccctcgccgccgcgttcgccgactaccccgccacgcgccacaccgtcgatccggaccgccacatcgagcgggtcaccgagctgcaagaactcttcctcacgcgcgtcgggctcgacatcggcaaggtgtgggtcgcggacgacggcgccgcggtggcggtctggaccacgccggagagcgtcgaagcgggggcggtgttcgccgagatcggcccgcgcatggccgagttgagcggttcccggctggccgcgcagcaacagatggaaggcctcctggcgccgcaccggcccaaggagcccgcgtggttcctggccaccgtcggcgtctcgcccgaccaccagggcaagggtctgggcagcgccgtcgtgctccccggagtggaggcggccgagcgcgccggggtgcccgccttcctggagacctccgcgccccgcaacctccccttctacgagcggctcggcttcaccgtcaccgccgacgtcgaggtgcccgaaggaccgcgcacctggtgcatgacccgcaagcccggtgcctga

SEQ ID NO: 1537 - DNA, 2172 bp, Artificial Sequence
  Synthetic Polynucleotides
atggccttaccagtgaccgccttgctcctgccgctggccttgctgctccacgccgccaggccggacatcgtgatgacccagacacctctgagcctgagcgtgacacctggacagcctgccagcattagctgcaagagcagccagtctctgctggacggcgacggcaagacctacctgaattggctgctccagaagcctggacagagccctcagcggctgatctacctggtgtccaagctggatagcggcgtgcccgatagattttctggcagcggctctggcaccgacttcaccctgaagatcagcagagtggaagccgaggacgtgggcgtgtactactgttggcagggcacacacttccccagaacattcggccagggcacaaagctggaaatcaaaggcggaggcggaagtggaggcggaggatctggcggcggaggctctcaagtgcaactggttcagagcggagccgaagtgaagaaacctggggcctctgtgaaggtgtcctgcaaggccagcggctacaccttcaaggacacctacatccactgggtccgacaggcccctggacaaggacttgagtggatgggcagaatcgaccccgccaacggcaacaccaaatacgaccccaagttccagggcagagtgaccatgaccagagacaccagcatcagcaccgcctacatggaactgagccggctgagatccgatgacaccgccgtgtactattgcgctagaagaggcggagtggattggggccagggaacactggttaccgtgtctagtacgcgtgagcagaaactgatctcggaagaggatctggcgaagcccaccacgacgccagcgccgcgaccaccaacaccggcgcccaccatcgcgtcgcagcccctgtccctgcgcccagaggcgtgccggccagcggcggggggcgcagtgcacacgagggggctggacttcgcctgtgacatctacatctgggcgcccttggccgggacttgtggggtccttctcctgtcactggttatcaccctttactgcaaacggggcagaaagaaactcctgtatatattcaaacaaccatttatgagaccagtacaaactactcaagaggaagatggctgtagctgccgatttccagaagaagaagaaggaggatgtgaactgagagtgaagttcagcaggagcgcagacgcccccgcgtaccagcagggccagaaccagctctataacgagctgaatctaggacgaagagaggagtacgatgttttggacaagagacgtggccgggaccctgagatggggggaaagccgagaaggaagaaccctcaggaaggcctgtacaatgaactgcagaaagataagatggcggaggcctacagtgagattgggatgaaaggcgagcgccggaggggcaaggggcacgatggcctttaccagggtctcagtacagccaccaaggacacctacgacgcccttcacatgcaggccctgccccctcgctctagtggctccggcgagggcagaggaagtctactaacctgcggagatgtggaagaaaatcctggcccacatatgaccgagtacaagcccacggtgcgcctcgccacccgcgacgacgtccccagggccgtacgcaccctcgccgccgcgttcgccgactaccccgccacgcgccacaccgtcgatccggaccgccacatcgagcgggtcaccgagctgcaagaactcttcctcacgcgcgtcgggctcgacatcggcaaggtgtgggtcgcggacgacggcgccgcggtggcggtctggaccacgccggagagcgtcgaagcgggggcggtgttcgccgagatcggcccgcgcatggccgagttgagcggttcccggctggccgcgcagcaacagatggaaggcctcctggcgccgcaccggcccaaggagcccgcgtggttcctggccaccgtcggcgtctcgcccgaccaccagggcaagggtctgggcagcgccgtcgtgctccccggagtggaggcggccgagcgcgccggggtgcccgccttcctggagacctccgcgccccgcaacctccccttctacgagcggctcggcttcaccgtcaccgccgacgtcgaggtgcccgaaggaccgcgcacctggtgcatgacccgcaagcccggtgcctga

SEQ ID NO: 1538 - DNA, 2196 bp, Artificial Sequence
  Synthetic Polynucleotides
atggccttaccagtgaccgccttgctcctgccgctggccttgctgctccacgccgccaggccggacatcgtgatgacccagagccccgatagcctggccgtgtctctgggagagagagccaccatcaactgcgagagcagccagagcctgctgaacagcggcaaccagaagaactacctgacctggtatcagcagaagcccggccagccccccaagcccctgatctattgggccagcaccagagaaagcggcgtgcccgatagattcagcggcagcggaagcggcaccgacttcaccctgaccatcagttctcttcaggccgaggacgtggccgtgtactactgccagaacgactacagctacccctacaccttcggccagggcaccaagctggaaatcaagagaggcggaggcggaagtggaggcggaggatctggcggcggaggctctgaagtgcagctggtgcagtctggggccgaagtgaagaagcctggcgagagcctgaagatcagctgcaagggcagcggctacagcttcaccgactactacatgaagtgggccagacagatgcccggcaagggcctggaatggatgggcgacatcatccccagcaacggggccaccttctacaaccagaaattcaagggccaagtgaccatctccgccgacaagagcatcagcaccacctacctccagtggtccagcctgaaggccagcgacaccgccatgtactattgcgccagaagccatctgctgcgggccagttggttcgcctattggggccagggaacaatggtcacagtgtccagcacgcgtgagcagaaactgatctcggaagaggatctggcgaagcccaccacgacgccagcgccgcgaccaccaacaccggcgcccaccatcgcgtcgcagcccctgtccctgcgcccagaggcgtgccggccagcggcggggggcgcagtgcacacgagggggctggacttcgcctgtgacatctacatctgggcgcccttggccgggacttgtggggtccttctcctgtcactggttatcaccctttactgcaaacggggcagaaagaaactcctgtatatattcaaacaaccatttatgagaccagtacaaactactcaagaggaagatggctgtagctgccgatttccagaagaagaagaaggaggatgtgaactgagagtgaagttcagcaggagcgcagacgcccccgcgtaccagcagggccagaaccagctctataacgagctgaatctaggacgaagagaggagtacgatgttttggacaagagacgtggccgggaccctgagatggggggaaagccgagaaggaagaaccctcaggaaggcctgtacaatgaactgcagaaagataagatggcggaggcctacagtgagattgggatgaaaggcgagcgccggaggggcaaggggcacgatggcctttaccagggtctcagtacagccaccaaggacacctacgacgcccttcacatgcaggccctgccccctcgctctagtggctccggcgagggcagaggaagtctactaacctgcggagatgtggaagaaaatcctggcccacatatgaccgagtacaagcccacggtgcgcctcgccacccgcgacgacgtccccagggccgtacgcaccctcgccgccgcgttcgccgactaccccgccacgcgccacaccgtcgatccggaccgccacatcgagcgggtcaccgagctgcaagaactcttcctcacgcgcgtcgggctcgacatcggcaaggtgtgggtcgcggacgacggcgccgcggtggcggtctggaccacgccggagagcgtcgaagcgggggcggtgttcgccgagatcggcccgcgcatggccgagttgagcggttcccggctggccgcgcagcaacagatggaaggcctcctggcgccgcaccggcccaaggagcccgcgtggttcctggccaccgtcggcgtctcgcccgaccaccagggcaagggtctgggcagcgccgtcgtgctccccggagtggaggcggccgagcgcgccggggtgcccgccttcctggagacctccgcgccccgcaacctccccttctacgagcggctcggcttcaccgtcaccgccgacgtcgaggtgcccgaaggaccgcgcacctggtgcatgacccgcaagcccggtgcctga

SEQ ID NO: 1539 - DNA, 2181 bp, Artificial Sequence
  Synthetic Polynucleotides
atggccttaccagtgaccgccttgctcctgccgctggccttgctgctccacgccgccaggccggacatcgtgctgacacagagccctgcttctctggccgtgtctctgggacagagagccaccatcagctgtagagccagcgagagcgtggacaactacggcaacaccttcatgcactggtatcagcagaagcccggccagcctcctaagctgctgatctacagagccagcaacctggaaagcggcatccccgccagattttctggcagcggcagcagaaccgacttcaccctgaccatcaatcccgtggaagccgacgacgtggcaacctactactgccagcagagcaacgaggaccctcctacatttggagccggcaccaagctggaactgaaaggcggaggcggaagtggaggcggaggatctggcggcggaggctctcagattcagctggtgcagtctggccccgagctgaagaaacctggcgagacagtgaagatcagctgcaaggccagcggctacatcttcaccaattacggcatgaactgggtcaagcaggcccctggcaagagcttcaagtggatgggctggatcaacacctacaccggcgagagcacatacagcgccgacttcaagggcagattcgccttcagcctggaaaccagcgccagcacagcctacctgcacatcaacgacctgaagaacgaggacaccgccacctacttttgcgccagaagcggcggctacgaccctatggattattggggccagggcaccagcgtgaccgtttcttctacgcgtgagcagaaactgatctcggaagaggatctggcgaagcccaccacgacgccagcgccgcgaccaccaacaccggcgcccaccatcgcgtcgcagcccctgtccctgcgcccagaggcgtgccggccagcggcggggggcgcagtgcacacgagggggctggacttcgcctgtgacatctacatctgggcgcccttggccgggacttgtggggtccttctcctgtcactggttatcaccctttactgcaaacggggcagaaagaaactcctgtatatattcaaacaaccatttatgagaccagtacaaactactcaagaggaagatggctgtagctgccgatttccagaagaagaagaaggaggatgtgaactgagagtgaagttcagcaggagcgcagacgcccccgcgtaccagcagggccagaaccagctctataacgagctgaatctaggacgaagagaggagtacgatgttttggacaagagacgtggccgggaccctgagatggggggaaagccgagaaggaagaaccctcaggaaggcctgtacaatgaactgcagaaagataagatggcggaggcctacagtgagattgggatgaaaggcgagcgccggaggggcaaggggcacgatggcctttaccagggtctcagtacagccaccaaggacacctacgacgcccttcacatgcaggccctgccccctcgctctagtggctccggcgagggcagaggaagtctactaacctgcggagatgtggaagaaaatcctggcccacatatgaccgagtacaagcccacggtgcgcctcgccacccgcgacgacgtccccagggccgtacgcaccctcgccgccgcgttcgccgactaccccgccacgcgccacaccgtcgatccggaccgccacatcgagcgggtcaccgagctgcaagaactcttcctcacgcgcgtcgggctcgacatcggcaaggtgtgggtcgcggacgacggcgccgcggtggcggtctggaccacgccggagagcgtcgaagcgggggcggtgttcgccgagatcggcccgcgcatggccgagttgagcggttcccggctggccgcgcagcaacagatggaaggcctcctggcgccgcaccggcccaaggagcccgcgtggttcctggccaccgtcggcgtctcgcccgaccaccagggcaagggtctgggcagcgccgtcgtgctccccggagtggaggcggccgagcgcgccggggtgcccgccttcctggagacctccgcgccccgcaacctccccttctacgagcggctcggcttcaccgtcaccgccgacgtcgaggtgcccgaaggaccgcgcacctggtgcatgacccgcaagcccggtgcctga

SEQ ID NO: 1540 - DNA, 2193 bp, Artificial Sequence
  Synthetic Polynucleotides
atggccttaccagtgaccgccttgctcctgccgctggccttgctgctccacgccgccaggccggacttcgtgatgacacagagccctgatagcctggccgtgtctctcggcgagcgagtgaccatgagctgcaagtctagccagagcctgctgaacagcggcaaccagaagaactacctgacctggtatcagcagaagcccggccagcctcctaagctgctgatctactgggccagcaccagagaaagcggcgtgcccgatagattttctggctctggcagcggcaccgacttcaccctgacaatttctagcctgcaagccgaggacgtggccgtgtactactgccagaacgactacagctacccctacaccttcggccagggcaccaagctggaaatcaaaggcggaggcggaagtggaggcggaggatctggcggcggaggctctgaagtgcaactggttcagagcggagccgagctgaagaaacctggggccagcgtgaaggtgtcctgtaaagccagcggctacacctttaccgactactacatgaaatgggtccgacaggccccaggccagggactcgaatggatcggcgatattatccccagcaacggggccaccttctacaaccagaaattcaagggccgcgtgaccatcaccgtggacaagagcacaagcaccgcctacatggaactgagcagcctgagaagcgaggacaccgccgtgtattattgcgccagaagccatctgctgcgggccagttggttcgcctattggggacagggaaccctggtcaccgttagctctacgcgtgagcagaaactgatctcggaagaggatctggcgaagcccaccacgacgccagcgccgcgaccaccaacaccggcgcccaccatcgcgtcgcagcccctgtccctgcgcccagaggcgtgccggccagcggcggggggcgcagtgcacacgagggggctggacttcgcctgtgacatctacatctgggcgcccttggccgggacttgtggggtccttctcctgtcactggttatcaccctttactgcaaacggggcagaaagaaactcctgtatatattcaaacaaccatttatgagaccagtacaaactactcaagaggaagatggctgtagctgccgatttccagaagaagaagaaggaggatgtgaactgagagtgaagttcagcaggagcgcagacgcccccgcgtaccagcagggccagaaccagctctataacgagctgaatctaggacgaagagaggagtacgatgttttggacaagagacgtggccgggaccctgagatggggggaaagccgagaaggaagaaccctcaggaaggcctgtacaatgaactgcagaaagataagatggcggaggcctacagtgagattgggatgaaaggcgagcgccggaggggcaaggggcacgatggcctttaccagggtctcagtacagccaccaaggacacctacgacgcccttcacatgcaggccctgccccctcgctctagtggctccggcgagggcagaggaagtctactaacctgcggagatgtggaagaaaatcctggcccacatatgaccgagtacaagcccacggtgcgcctcgccacccgcgacgacgtccccagggccgtacgcaccctcgccgccgcgttcgccgactaccccgccacgcgccacaccgtcgatccggaccgccacatcgagcgggtcaccgagctgcaagaactcttcctcacgcgcgtcgggctcgacatcggcaaggtgtgggtcgcggacgacggcgccgcggtggcggtctggaccacgccggagagcgtcgaagcgggggcggtgttcgccgagatcggcccgcgcatggccgagttgagcggttcccggctggccgcgcagcaacagatggaaggcctcctggcgccgcaccggcccaaggagcccgcgtggttcctggccaccgtcggcgtctcgcccgaccaccagggcaagggtctgggcagcgccgtcgtgctccccggagtggaggcggccgagcgcgccggggtgcccgccttcctggagacctccgcgccccgcaacctccccttctacgagcggctcggcttcaccgtcaccgccgacgtcgaggtgcccgaaggaccgcgcacctggtgcatgacccgcaagcccggtgcctga

SEQ ID NO: 1541 - DNA, 2193 bp, Artificial Sequence
  Synthetic Polynucleotides
atggccttaccagtgaccgccttgctcctgccgctggccttgctgctccacgccgccaggccggacttcgtgatgacacagagccctgatagcctggccgtgtctctcggcgagcgagtgaccatgagctgcaagtctagccagagcctgctgaacagcggcaaccagaagaactacctgacctggtatcagcagaagcccggccagcctcctaagctgctgatctactgggccagcaccagagaaagcggcgtgcccgatagattttctggctctggcagcggcaccgacttcaccctgacaatttctagcctgcaagccgaggacgtggccgtgtactactgccagaacgactacagctacccctacaccttcggccagggcaccaagctggaaatcaaaggcggaggcggaagtggaggcggaggatctggcggcggaggctctcaagtgcaactggttcagagcggagccgagctgaagaaacctggggccagcgtgaaggtgtcctgtaaagccagcggctacacctttaccgactactacatgaaatgggtccgacaggccccaggccagggactcgaatggatcggcgatattatccccagcaacggggccaccttctacaaccagaaattcaagggccgcgtgaccatcaccgtggacaagagcacaagcaccgcctacatggaactgagcagcctgagaagcgaggacaccgccgtgtattattgcgccagaagccatctgctgcgggccagttggttcgcctattggggacagggaaccctggtcaccgttagctctacgcgtgagcagaaactgatctcggaagaggatctggcgaagcccaccacgacgccagcgccgcgaccaccaacaccggcgcccaccatcgcgtcgcagcccctgtccctgcgcccagaggcgtgccggccagcggcggggggcgcagtgcacacgagggggctggacttcgcctgtgacatctacatctgggcgcccttggccgggacttgtggggtccttctcctgtcactggttatcaccctttactgcaaacggggcagaaagaaactcctgtatatattcaaacaaccatttatgagaccagtacaaactactcaagaggaagatggctgtagctgccgatttccagaagaagaagaaggaggatgtgaactgagagtgaagttcagcaggagcgcagacgcccccgcgtaccagcagggccagaaccagctctataacgagctgaatctaggacgaagagaggagtacgatgttttggacaagagacgtggccgggaccctgagatggggggaaagccgagaaggaagaaccctcaggaaggcctgtacaatgaactgcagaaagataagatggcggaggcctacagtgagattgggatgaaaggcgagcgccggaggggcaaggggcacgatggcctttaccagggtctcagtacagccaccaaggacacctacgacgcccttcacatgcaggccctgccccctcgctctagtggctccggcgagggcagaggaagtctactaacctgcggagatgtggaagaaaatcctggcccacatatgaccgagtacaagcccacggtgcgcctcgccacccgcgacgacgtccccagggccgtacgcaccctcgccgccgcgttcgccgactaccccgccacgcgccacaccgtcgatccggaccgccacatcgagcgggtcaccgagctgcaagaactcttcctcacgcgcgtcgggctcgacatcggcaaggtgtgggtcgcggacgacggcgccgcggtggcggtctggaccacgccggagagcgtcgaagcgggggcggtgttcgccgagatcggcccgcgcatggccgagttgagcggttcccggctggccgcgcagcaacagatggaaggcctcctggcgccgcaccggcccaaggagcccgcgtggttcctggccaccgtcggcgtctcgcccgaccaccagggcaagggtctgggcagcgccgtcgtgctccccggagtggaggcggccgagcgcgccggggtgcccgccttcctggagacctccgcgccccgcaacctccccttctacgagcggctcggcttcaccgtcaccgccgacgtcgaggtgcccgaaggaccgcgcacctggtgcatgacccgcaagcccggtgcctga

SEQ ID NO: 1542 - DNA, 2175 bp, Artificial Sequence
  Synthetic Polynucleotides
atggccttaccagtgaccgccttgctcctgccgctggccttgctgctccacgccgccaggccggagatcgtgctgacacagagccctggcacactgtcactgtctccaggcgaaagagccacactgagctgtagagccagccagagcgtgtccagctcttacctggcttggtatcagcagaagcccggacaggctcccagactgctgatctacggtgcctctagcagagccacaggcatccccgatagattttctggcagcggctccggcaccgacttcaccctgacaatcagcagactggaacccgaggacttcgccgtgtactactgccagcaggactacggcttcccttggacctttggacagggcaccaaggtggaaatcaagagaggcggaggcggaagtggaggcggaggatctggcggcggaggctctgaagttcaactggttcagagcggagccgaagtgaagaagcctggcgagagcctgaagattagctgcaaaggctccggctactccttcaccagctactggatctcttgggtccgacagatgcccggcaaaggactggaatggatgggcatcatcgaccccagcgacagcgacaccagatacagccctagcttccagggccaagtgaccatcagcgccgacaagagcatcagcacagcctacctccagtggtcctctctgaaggccagcgataccgccatgtactattgcgccagaggcgacggcagcaccgacctggattattggggacagggaaccctggtcaccgtgtctagtacgcgtgagcagaaactgatctcggaagaggatctggcgaagcccaccacgacgccagcgccgcgaccaccaacaccggcgcccaccatcgcgtcgcagcccctgtccctgcgcccagaggcgtgccggccagcggcggggggcgcagtgcacacgagggggctggacttcgcctgtgacatctacatctgggcgcccttggccgggacttgtggggtccttctcctgtcactggttatcaccctttactgcaaacggggcagaaagaaactcctgtatatattcaaacaaccatttatgagaccagtacaaactactcaagaggaagatggctgtagctgccgatttccagaagaagaagaaggaggatgtgaactgagagtgaagttcagcaggagcgcagacgcccccgcgtaccagcagggccagaaccagctctataacgagctgaatctaggacgaagagaggagtacgatgttttggacaagagacgtggccgggaccctgagatggggggaaagccgagaaggaagaaccctcaggaaggcctgtacaatgaactgcagaaagataagatggcggaggcctacagtgagattgggatgaaaggcgagcgccggaggggcaaggggcacgatggcctttaccagggtctcagtacagccaccaaggacacctacgacgcccttcacatgcaggccctgccccctcgctctagtggctccggcgagggcagaggaagtctactaacctgcggagatgtggaagaaaatcctggcccacatatgaccgagtacaagcccacggtgcgcctcgccacccgcgacgacgtccccagggccgtacgcaccctcgccgccgcgttcgccgactaccccgccacgcgccacaccgtcgatccggaccgccacatcgagcgggtcaccgagctgcaagaactcttcctcacgcgcgtcgggctcgacatcggcaaggtgtgggtcgcggacgacggcgccgcggtggcggtctggaccacgccggagagcgtcgaagcgggggcggtgttcgccgagatcggcccgcgcatggccgagttgagcggttcccggctggccgcgcagcaacagatggaaggcctcctggcgccgcaccggcccaaggagcccgcgtggttcctggccaccgtcggcgtctcgcccgaccaccagggcaagggtctgggcagcgccgtcgtgctccccggagtggaggcggccgagcgcgccggggtgcccgccttcctggagacctccgcgccccgcaacctccccttctacgagcggctcggcttcaccgtcaccgccgacgtcgaggtgcccgaaggaccgcgcacctggtgcatgacccgcaagcccggtgcctga

SEQ ID NO: 1543 - DNA, 2181 bp, Artificial Sequence
  Synthetic Polynucleotides
atggccttaccagtgaccgccttgctcctgccgctggccttgctgctccacgccgccaggccgcagttcgtgctgacacagcctccaagcgtgtccaccaatcctggcagcacagtgaagctgagctgcaagagaaacaccggcaacatcggcagcaactacgtgaactggtatcagcagaagcccggacagagccccaccaccatgatctacagagatgacaagaggcccgacggcgtgcccgatagattttccggctctatcgacagaagcagcaacagcgccctgctgaccatcaacaacgtgcagacagaggacgaggccgactacttctgccagagctacagcagcggcatcaacatcatcttcggcggaggcaccaagctgacagttcttggcggaggcggaagtggaggcggaggatctggcggcggaggctctcaagtgcagctccaagaatctggccctggcctggtcaagcctagcgagacactgagcctgacctgtaccgtgtccggctttagcctgaccacctacgacgtgcactgggtccgacaacctccaggcaaaggactggaatggatgggcagaatccagaacgccggcatcaccgactacaatagcgccctgaagtcccggctgattatctccagagacaccagcaagagccaggtgttcctgaagatgaacagcgtgaccaccgccgacaccgccatgtacttttgtgccaagaccggcagctacttctacgccttcgatcactggggccagggcacactggttaccgtttcttctacgcgtgagcagaaactgatctcggaagaggatctggcgaagcccaccacgacgccagcgccgcgaccaccaacaccggcgcccaccatcgcgtcgcagcccctgtccctgcgcccagaggcgtgccggccagcggcggggggcgcagtgcacacgagggggctggacttcgcctgtgacatctacatctgggcgcccttggccgggacttgtggggtccttctcctgtcactggttatcaccctttactgcaaacggggcagaaagaaactcctgtatatattcaaacaaccatttatgagaccagtacaaactactcaagaggaagatggctgtagctgccgatttccagaagaagaagaaggaggatgtgaactgagagtgaagttcagcaggagcgcagacgcccccgcgtaccagcagggccagaaccagctctataacgagctgaatctaggacgaagagaggagtacgatgttttggacaagagacgtggccgggaccctgagatggggggaaagccgagaaggaagaaccctcaggaaggcctgtacaatgaactgcagaaagataagatggcggaggcctacagtgagattgggatgaaaggcgagcgccggaggggcaaggggcacgatggcctttaccagggtctcagtacagccaccaaggacacctacgacgcccttcacatgcaggccctgccccctcgctctagtggctccggcgagggcagaggaagtctactaacctgcggagatgtggaagaaaatcctggcccacatatgaccgagtacaagcccacggtgcgcctcgccacccgcgacgacgtccccagggccgtacgcaccctcgccgccgcgttcgccgactaccccgccacgcgccacaccgtcgatccggaccgccacatcgagcgggtcaccgagctgcaagaactcttcctcacgcgcgtcgggctcgacatcggcaaggtgtgggtcgcggacgacggcgccgcggtggcggtctggaccacgccggagagcgtcgaagcgggggcggtgttcgccgagatcggcccgcgcatggccgagttgagcggttcccggctggccgcgcagcaacagatggaaggcctcctggcgccgcaccggcccaaggagcccgcgtggttcctggccaccgtcggcgtctcgcccgaccaccagggcaagggtctgggcagcgccgtcgtgctccccggagtggaggcggccgagcgcgccggggtgcccgccttcctggagacctccgcgccccgcaacctccccttctacgagcggctcggcttcaccgtcaccgccgacgtcgaggtgcccgaaggaccgcgcacctggtgcatgacccgcaagcccggtgcctga

SEQ ID NO: 1544 - DNA, 2172 bp, Artificial Sequence
  Synthetic Polynucleotides
atggccttaccagtgaccgccttgctcctgccgctggccttgctgctccacgccgccaggccggacatccagatgacacagtctccagccagcctgtctgcctctctgggagagacagtgaccatcgagtgcagacccagcgaggacatccacagcaacgtggcctggtatcagcagaagcccggcaattctccccagctgctgatctacgacgccagcaatctggctgatggcgtgcccagcagattttctggcagcggctctggcacacagtacagcctgaagatcaacagcctccagagcgaggacgtggcctcctacttctgccaccagtacaacatctacccctacaccttcggcagcggcaccaagctggaacttaaaggcggaggcggaagtggaggcggaggatctggcggcggaggctctcaagttcagctgcaagagtctggccccacactggtcaagcctggcgatagcgtgaagatgagctgcaaggccagcggctacacctttaccgactacatcatccactgggtcaagcagagccacggcaagagcctggaatggatcggctacatcaacccttacagcgacggcaccaactacaacgagaagttcaagagcaaggccacactgaccgtggacaagagcaccagcacagcctacatggaattttcccggctgacctccgaggacagcgccatctatttctgcgccctgaactacggcagctactacgctatggatgcctggggccagggcacaagcgtgacagtttcttctacgcgtgagcagaaactgatctcggaagaggatctggcgaagcccaccacgacgccagcgccgcgaccaccaacaccggcgcccaccatcgcgtcgcagcccctgtccctgcgcccagaggcgtgccggccagcggcggggggcgcagtgcacacgagggggctggacttcgcctgtgacatctacatctgggcgcccttggccgggacttgtggggtccttctcctgtcactggttatcaccctttactgcaaacggggcagaaagaaactcctgtatatattcaaacaaccatttatgagaccagtacaaactactcaagaggaagatggctgtagctgccgatttccagaagaagaagaaggaggatgtgaactgagagtgaagttcagcaggagcgcagacgcccccgcgtaccagcagggccagaaccagctctataacgagctgaatctaggacgaagagaggagtacgatgttttggacaagagacgtggccgggaccctgagatggggggaaagccgagaaggaagaaccctcaggaaggcctgtacaatgaactgcagaaagataagatggcggaggcctacagtgagattgggatgaaaggcgagcgccggaggggcaaggggcacgatggcctttaccagggtctcagtacagccaccaaggacacctacgacgcccttcacatgcaggccctgccccctcgctctagtggctccggcgagggcagaggaagtctactaacctgcggagatgtggaagaaaatcctggcccacatatgaccgagtacaagcccacggtgcgcctcgccacccgcgacgacgtccccagggccgtacgcaccctcgccgccgcgttcgccgactaccccgccacgcgccacaccgtcgatccggaccgccacatcgagcgggtcaccgagctgcaagaactcttcctcacgcgcgtcgggctcgacatcggcaaggtgtgggtcgcggacgacggcgccgcggtggcggtctggaccacgccggagagcgtcgaagcgggggcggtgttcgccgagatcggcccgcgcatggccgagttgagcggttcccggctggccgcgcagcaacagatggaaggcctcctggcgccgcaccggcccaaggagcccgcgtggttcctggccaccgtcggcgtctcgcccgaccaccagggcaagggtctgggcagcgccgtcgtgctccccggagtggaggcggccgagcgcgccggggtgcccgccttcctggagacctccgcgccccgcaacctccccttctacgagcggctcggcttcaccgtcaccgccgacgtcgaggtgcccgaaggaccgcgcacctggtgcatgacccgcaagcccggtgcctga

SEQ ID NO: 1545 - DNA, 2175 bp, Artificial Sequence
  Synthetic Polynucleotides
atggccttaccagtgaccgccttgctcctgccgctggccttgctgctccacgccgccaggccggagatcgtgctgacacagtctcccgccacactgtcactgtctccaggcgaaagagccacactgagctgtagagccagccagagcgtgtcctcttacctggcctggtatcagcagaagcctggacaggctccccggctgctgatctacgatgccagcaatagagccacaggcatccccgccagattttctggctctggcagcggcaccgatttcaccctgaccataagcagcctggaacctgaggacttcgccgtgtactactgccagcagagaagcaactggcccctgacctttggacagggcaccaaggtggaaatcaagagaggcggaggcggaagtggaggcggaggatctggcggcggaggctctgaagttcagctccttgagagtggtggcggcctggttcaacctggcggatctctgagactgtcttgtgccgccagcggcttcacctttagcggctattggatgcactgggtccgacaggcccctggcaaaggacttgaatgggtgtccgccatcagaagcgacggcagcagcaagtactacgccgactctgtgaagggcagattcaccatcagccgggacaacagcaagaacaccctgtacctccagatgaacagcctgagagccgaggacacagccgtgtattattgcgccaaggacggcgtgatcgaggacacctttgattactggggccagggcaccctggtcaccgtttcttctacgcgtgagcagaaactgatctcggaagaggatctggcgaagcccaccacgacgccagcgccgcgaccaccaacaccggcgcccaccatcgcgtcgcagcccctgtccctgcgcccagaggcgtgccggccagcggcggggggcgcagtgcacacgagggggctggacttcgcctgtgacatctacatctgggcgcccttggccgggacttgtggggtccttctcctgtcactggttatcaccctttactgcaaacggggcagaaagaaactcctgtatatattcaaacaaccatttatgagaccagtacaaactactcaagaggaagatggctgtagctgccgatttccagaagaagaagaaggaggatgtgaactgagagtgaagttcagcaggagcgcagacgcccccgcgtaccagcagggccagaaccagctctataacgagctgaatctaggacgaagagaggagtacgatgttttggacaagagacgtggccgggaccctgagatggggggaaagccgagaaggaagaaccctcaggaaggcctgtacaatgaactgcagaaagataagatggcggaggcctacagtgagattgggatgaaaggcgagcgccggaggggcaaggggcacgatggcctttaccagggtctcagtacagccaccaaggacacctacgacgcccttcacatgcaggccctgccccctcgctctagtggctccggcgagggcagaggaagtctactaacctgcggagatgtggaagaaaatcctggcccacatatgaccgagtacaagcccacggtgcgcctcgccacccgcgacgacgtccccagggccgtacgcaccctcgccgccgcgttcgccgactaccccgccacgcgccacaccgtcgatccggaccgccacatcgagcgggtcaccgagctgcaagaactcttcctcacgcgcgtcgggctcgacatcggcaaggtgtgggtcgcggacgacggcgccgcggtggcggtctggaccacgccggagagcgtcgaagcgggggcggtgttcgccgagatcggcccgcgcatggccgagttgagcggttcccggctggccgcgcagcaacagatggaaggcctcctggcgccgcaccggcccaaggagcccgcgtggttcctggccaccgtcggcgtctcgcccgaccaccagggcaagggtctgggcagcgccgtcgtgctccccggagtggaggcggccgagcgcgccggggtgcccgccttcctggagacctccgcgccccgcaacctccccttctacgagcggctcggcttcaccgtcaccgccgacgtcgaggtgcccgaaggaccgcgcacctggtgcatgacccgcaagcccggtgcctga

SEQ ID NO: 1546 - DNA, 2163 bp, Artificial Sequence
  Synthetic Polynucleotides
atggccttaccagtgaccgccttgctcctgccgctggccttgctgctccacgccgccaggccggacgtgcagatcacacagagccctagctacctggctgcctctcctggcgagacaatcaccatcaactgtcgggccagcaagagcatcagcaaggacctggcctggtatcaagagaagcccggcaagaccaacaagctgctgatctacagcggcagcacactccagtctggcatccccagcagattttccggctctggcagcggcaccgatttcaccctgaccataagcagcctggaacctgaggacttcgccatgtactactgccagcagcacaacaagtacccctacacctttggcggaggcaccaagctggaaatcaagagaggcggaggcggaagtggaggcggaggatctggcggcggaggctctcaagttcaactgcaacagcctggggccgagcttgttagacctggcgcttctgtgaagctgagctgcaaggccagcggctacaccttcaccagctactggatgaactgggtcaagcagcggcctgaccagggcctcgaatggatcggcagaatcgacccctacgacagcgagacacactacaaccagaagttcaaggacaaggccatcctgaccgtggacaagagcagctccaccgcctacatgcaactgagcagcctgacctctgaggatagcgccgtgtactattgcgccagaggcaactgggacgactattggggccagggcacaaccctgacagtgtctagtacgcgtgagcagaaactgatctcggaagaggatctggcgaagcccaccacgacgccagcgccgcgaccaccaacaccggcgcccaccatcgcgtcgcagcccctgtccctgcgcccagaggcgtgccggccagcggcggggggcgcagtgcacacgagggggctggacttcgcctgtgacatctacatctgggcgcccttggccgggacttgtggggtccttctcctgtcactggttatcaccctttactgcaaacggggcagaaagaaactcctgtatatattcaaacaaccatttatgagaccagtacaaactactcaagaggaagatggctgtagctgccgatttccagaagaagaagaaggaggatgtgaactgagagtgaagttcagcaggagcgcagacgcccccgcgtaccagcagggccagaaccagctctataacgagctgaatctaggacgaagagaggagtacgatgttttggacaagagacgtggccgggaccctgagatggggggaaagccgagaaggaagaaccctcaggaaggcctgtacaatgaactgcagaaagataagatggcggaggcctacagtgagattgggatgaaaggcgagcgccggaggggcaaggggcacgatggcctttaccagggtctcagtacagccaccaaggacacctacgacgcccttcacatgcaggccctgccccctcgctctagtggctccggcgagggcagaggaagtctactaacctgcggagatgtggaagaaaatcctggcccacatatgaccgagtacaagcccacggtgcgcctcgccacccgcgacgacgtccccagggccgtacgcaccctcgccgccgcgttcgccgactaccccgccacgcgccacaccgtcgatccggaccgccacatcgagcgggtcaccgagctgcaagaactcttcctcacgcgcgtcgggctcgacatcggcaaggtgtgggtcgcggacgacggcgccgcggtggcggtctggaccacgccggagagcgtcgaagcgggggcggtgttcgccgagatcggcccgcgcatggccgagttgagcggttcccggctggccgcgcagcaacagatggaaggcctcctggcgccgcaccggcccaaggagcccgcgtggttcctggccaccgtcggcgtctcgcccgaccaccagggcaagggtctgggcagcgccgtcgtgctccccggagtggaggcggccgagcgcgccggggtgcccgccttcctggagacctccgcgccccgcaacctccccttctacgagcggctcggcttcaccgtcaccgccgacgtcgaggtgcccgaaggaccgcgcacctggtgcatgacccgcaagcccggtgcctga

SEQ ID NO: 1547 - DNA, 2256 bp, Artificial Sequence
  Synthetic Polynucleotides
atggccttaccagtgaccgccttgctcctgccgctggccttgctgctccacgccgccaggccgtacatcaacatctacaacgccgagcctgccaatcctagcgagaagaacagccccacacagtacgcctacggcagcggagaattcgacatccagatgacacagtctccagccagcctgtctgcctctctgggagagacagtgaccatcgagtgccggaccagcaaggacatctacagcaacctggcctggttccagcaagagcccggcaattctcctcagctcctgatctacgacgccagcaatctggctgatggcgtgcccagcagattttctggcagcggctctggcacacagtacagcctccagatcaacaacctccagagcgaggacgtggcctcctacttctgccaccagtacaacaactacccctacaccttcggcaccggcaccaagctggaacttaaaggcggaggcggaagtggaggcggaggatctggcggcggaggctctcaagtgcagctccaagagtctggccccacactggtcaatcctggcgacagcgtgaagatgagctgcaaggccagcggctacacctttaccgaccacatcatccactgggtcaagcagagccacggcaagagcctggaatggatcggctacatcaacccctatagcggcggagccaactacaacggcaagttcaagagcaaggccacactgacaatcgacaagagcagcagcaccgcctacatggaattttccagactgaccagcggcgactccgccatctactactgcgccctgaattacggcagctactacgctatggatgcctggggccagggcacaagcgtgacagtttcttctacgcgtgagcagaaactgatctcggaagaggatctggcgaagcccaccacgacgccagcgccgcgaccaccaacaccggcgcccaccatcgcgtcgcagcccctgtccctgcgcccagaggcgtgccggccagcggcggggggcgcagtgcacacgagggggctggacttcgcctgtgacatctacatctgggcgcccttggccgggacttgtggggtccttctcctgtcactggttatcaccctttactgcaaacggggcagaaagaaactcctgtatatattcaaacaaccatttatgagaccagtacaaactactcaagaggaagatggctgtagctgccgatttccagaagaagaagaaggaggatgtgaactgagagtgaagttcagcaggagcgcagacgcccccgcgtaccagcagggccagaaccagctctataacgagctgaatctaggacgaagagaggagtacgatgttttggacaagagacgtggccgggaccctgagatggggggaaagccgagaaggaagaaccctcaggaaggcctgtacaatgaactgcagaaagataagatggcggaggcctacagtgagattgggatgaaaggcgagcgccggaggggcaaggggcacgatggcctttaccagggtctcagtacagccaccaaggacacctacgacgcccttcacatgcaggccctgccccctcgctctagtggctccggcgagggcagaggaagtctactaacctgcggagatgtggaagaaaatcctggcccacatatgaccgagtacaagcccacggtgcgcctcgccacccgcgacgacgtccccagggccgtacgcaccctcgccgccgcgttcgccgactaccccgccacgcgccacaccgtcgatccggaccgccacatcgagcgggtcaccgagctgcaagaactcttcctcacgcgcgtcgggctcgacatcggcaaggtgtgggtcgcggacgacggcgccgcggtggcggtctggaccacgccggagagcgtcgaagcgggggcggtgttcgccgagatcggcccgcgcatggccgagttgagcggttcccggctggccgcgcagcaacagatggaaggcctcctggcgccgcaccggcccaaggagcccgcgtggttcctggccaccgtcggcgtctcgcccgaccaccagggcaagggtctgggcagcgccgtcgtgctccccggagtggaggcggccgagcgcgccggggtgcccgccttcctggagacctccgcgccccgcaacctccccttctacgagcggctcggcttcaccgtcaccgccgacgtcgaggtgcccgaaggaccgcgcacctggtgcatgacccgcaagcccggtgcctga

SEQ ID NO: 1548 - DNA, 2169 bp, Artificial Sequence
  Synthetic Polynucleotides
atggccttaccagtgaccgccttgctcctgccgctggccttgctgctccacgccgccaggccggagatcgtgctgacacagagccctaccagcatgacagcctctccaggcgagcaagtgaccatcacctgtagagccagcagcagcatcaactacatgcactggtatcagcagaagcctggcgcaagccccagaccttggatctacgagacaagcaagctggcctccggcgtgcccgatagattttctggatctgccagcggcaccagctacagcctgaccatcaacaacatggaagccgaggacgccgccacctactactgccagcagtggaattacccctcctggacctttggcggaggcaccaagctggaacttaaaggcggaggcggaagtggaggcggaggatctggcggcggaggctctgaagtgcagctcgttgagtctggtggcggactggttcagcctggaagaagcctgaagctgagctgtgccgccagcggcttcaccttcagcgactacaatatggcctgggtccgacaggcccctaagaaaggactggaatgggtcgccaccatcctgtacgatggcggcagaacctactaccggggcagcgtgaagggcagattcaccatcagcagagacaacgccaagagcaccctgtacctgcggatggactctctgagaagcgaggataccgccacatattactgtgccacacacagccggggcaccgactactttgattattggggccagggcgtgatggttaccgtgtctagtacgcgtgagcagaaactgatctcggaagaggatctggcgaagcccaccacgacgccagcgccgcgaccaccaacaccggcgcccaccatcgcgtcgcagcccctgtccctgcgcccagaggcgtgccggccagcggcggggggcgcagtgcacacgagggggctggacttcgcctgtgacatctacatctgggcgcccttggccgggacttgtggggtccttctcctgtcactggttatcaccctttactgcaaacggggcagaaagaaactcctgtatatattcaaacaaccatttatgagaccagtacaaactactcaagaggaagatggctgtagctgccgatttccagaagaagaagaaggaggatgtgaactgagagtgaagttcagcaggagcgcagacgcccccgcgtaccagcagggccagaaccagctctataacgagctgaatctaggacgaagagaggagtacgatgttttggacaagagacgtggccgggaccctgagatggggggaaagccgagaaggaagaaccctcaggaaggcctgtacaatgaactgcagaaagataagatggcggaggcctacagtgagattgggatgaaaggcgagcgccggaggggcaaggggcacgatggcctttaccagggtctcagtacagccaccaaggacacctacgacgcccttcacatgcaggccctgccccctcgctctagtggctccggcgagggcagaggaagtctactaacctgcggagatgtggaagaaaatcctggcccacatatgaccgagtacaagcccacggtgcgcctcgccacccgcgacgacgtccccagggccgtacgcaccctcgccgccgcgttcgccgactaccccgccacgcgccacaccgtcgatccggaccgccacatcgagcgggtcaccgagctgcaagaactcttcctcacgcgcgtcgggctcgacatcggcaaggtgtgggtcgcggacgacggcgccgcggtggcggtctggaccacgccggagagcgtcgaagcgggggcggtgttcgccgagatcggcccgcgcatggccgagttgagcggttcccggctggccgcgcagcaacagatggaaggcctcctggcgccgcaccggcccaaggagcccgcgtggttcctggccaccgtcggcgtctcgcccgaccaccagggcaagggtctgggcagcgccgtcgtgctccccggagtggaggcggccgagcgcgccggggtgcccgccttcctggagacctccgcgccccgcaacctccccttctacgagcggctcggcttcaccgtcaccgccgacgtcgaggtgcccgaaggaccgcgcacctggtgcatgacccgcaagcccggtgcctga

SEQ ID NO: 1549 - DNA, 2196 bp, Artificial Sequence
  Synthetic Polynucleotides
atggccttaccagtgaccgccttgctcctgccgctggccttgctgctccacgccgccaggccggacatcgtgatgacacagagcccttctagcctggccgtgtctgagggcgagacagtgaccatcaactgcaagagcagccagagcttcctgtctagcggcgacggcaagaattacgtggcctggtatcagtacaagcccggacagagccccaagctgctgatctactgggccagcacaagacagagcggcgtgcccgatagattcatcggctctggcagcggcaccgacttcaccctgacaatctctacagtgcaggccgaggacctggctatctactactgccagcagtattacgacacccctctgacctttggctccggcaccaagctggaaatcaaaggcggaggcggaagtggaggcggaggatctggcggcggaggctctgaagtgaagctgcaagagtctggccccagcctggtgcagagtagccaaacactgagcctgacctgtaccgtgtccggctttagcctgaccagctaccacatccactgggtccgacagacccctggcaaaggactggaatggatgggcgtgatgtggagcgacggcgacaccagctataacagcgccctgaagtcccggctgagcatcagcagagatacaagccagagccaggtgttcctgaagatgaacagcctccagaccgaggacaccgccacctactattgtgccagaggctactacagcagctacctgtacctttggttcgcctattggggccagggcaccctggttacagtcagctctacgcgtgagcagaaactgatctcggaagaggatctggcgaagcccaccacgacgccagcgccgcgaccaccaacaccggcgcccaccatcgcgtcgcagcccctgtccctgcgcccagaggcgtgccggccagcggcggggggcgcagtgcacacgagggggctggacttcgcctgtgacatctacatctgggcgcccttggccgggacttgtggggtccttctcctgtcactggttatcaccctttactgcaaacggggcagaaagaaactcctgtatatattcaaacaaccatttatgagaccagtacaaactactcaagaggaagatggctgtagctgccgatttccagaagaagaagaaggaggatgtgaactgagagtgaagttcagcaggagcgcagacgcccccgcgtaccagcagggccagaaccagctctataacgagctgaatctaggacgaagagaggagtacgatgttttggacaagagacgtggccgggaccctgagatggggggaaagccgagaaggaagaaccctcaggaaggcctgtacaatgaactgcagaaagataagatggcggaggcctacagtgagattgggatgaaaggcgagcgccggaggggcaaggggcacgatggcctttaccagggtctcagtacagccaccaaggacacctacgacgcccttcacatgcaggccctgccccctcgctctagtggctccggcgagggcagaggaagtctactaacctgcggagatgtggaagaaaatcctggcccacatatgaccgagtacaagcccacggtgcgcctcgccacccgcgacgacgtccccagggccgtacgcaccctcgccgccgcgttcgccgactaccccgccacgcgccacaccgtcgatccggaccgccacatcgagcgggtcaccgagctgcaagaactcttcctcacgcgcgtcgggctcgacatcggcaaggtgtgggtcgcggacgacggcgccgcggtggcggtctggaccacgccggagagcgtcgaagcgggggcggtgttcgccgagatcggcccgcgcatggccgagttgagcggttcccggctggccgcgcagcaacagatggaaggcctcctggcgccgcaccggcccaaggagcccgcgtggttcctggccaccgtcggcgtctcgcccgaccaccagggcaagggtctgggcagcgccgtcgtgctccccggagtggaggcggccgagcgcgccggggtgcccgccttcctggagacctccgcgccccgcaacctccccttctacgagcggctcggcttcaccgtcaccgccgacgtcgaggtgcccgaaggaccgcgcacctggtgcatgacccgcaagcccggtgcctga

SEQ ID NO: 1550 - DNA, 2208 bp, Artificial Sequence
  Synthetic Polynucleotides
atggccttaccagtgaccgccttgctcctgccgctggccttgctgctccacgccgccaggccggacgtgctgatgacccagacacctgtgtctctgccagtgtctctcggaggccaggtgtccatctcctgtagaagcagccagagcctggtgcactccgacggcgatacctacctgcactggtatctccagaagcctggacagagccctcagctcctgatctaccgggtgtccaacagattcagcggcgtgcccgatagattttccggcagcggctctggcaccgacttcaccctgaagatcagcagagtggaacccgaggacctgggcctgtactactgtctccagaccacacacttcccaccttggacctttggcggaggcaccaagctggaaatgaaaggcggaggcggaagtggaggcggaggatctggcggcggaggctctcaggttcagctccagcagtctggacccgagcttagaaggccaggatctagcgtcagactgagctgcaaggccagcggctaccggatcaaggacttcctgatccactggattaagaacagacccgagcacggcctggaatggatcggatggattgaccctgaggacggcgagactaagtacgcccagaagttccagaccaaggccacactgaccgccgacacctctagcaacaccgcctacatgcaactgagcagcctgaccagcgaggacaccgccacctacttttgtgctagatggggcgacgtgtactacggcctgatgagaggccatgtgatggatgcctggggccagggaacaagcgtgacagtctcttctacgcgtgagcagaaactgatctcggaagaggatctggcgaagcccaccacgacgccagcgccgcgaccaccaacaccggcgcccaccatcgcgtcgcagcccctgtccctgcgcccagaggcgtgccggccagcggcggggggcgcagtgcacacgagggggctggacttcgcctgtgacatctacatctgggcgcccttggccgggacttgtggggtccttctcctgtcactggttatcaccctttactgcaaacggggcagaaagaaactcctgtatatattcaaacaaccatttatgagaccagtacaaactactcaagaggaagatggctgtagctgccgatttccagaagaagaagaaggaggatgtgaactgagagtgaagttcagcaggagcgcagacgcccccgcgtaccagcagggccagaaccagctctataacgagctgaatctaggacgaagagaggagtacgatgttttggacaagagacgtggccgggaccctgagatggggggaaagccgagaaggaagaaccctcaggaaggcctgtacaatgaactgcagaaagataagatggcggaggcctacagtgagattgggatgaaaggcgagcgccggaggggcaaggggcacgatggcctttaccagggtctcagtacagccaccaaggacacctacgacgcccttcacatgcaggccctgccccctcgctctagtggctccggcgagggcagaggaagtctactaacctgcggagatgtggaagaaaatcctggcccacatatgaccgagtacaagcccacggtgcgcctcgccacccgcgacgacgtccccagggccgtacgcaccctcgccgccgcgttcgccgactaccccgccacgcgccacaccgtcgatccggaccgccacatcgagcgggtcaccgagctgcaagaactcttcctcacgcgcgtcgggctcgacatcggcaaggtgtgggtcgcggacgacggcgccgcggtggcggtctggaccacgccggagagcgtcgaagcgggggcggtgttcgccgagatcggcccgcgcatggccgagttgagcggttcccggctggccgcgcagcaacagatggaaggcctcctggcgccgcaccggcccaaggagcccgcgtggttcctggccaccgtcggcgtctcgcccgaccaccagggcaagggtctgggcagcgccgtcgtgctccccggagtggaggcggccgagcgcgccggggtgcccgccttcctggagacctccgcgccccgcaacctccccttctacgagcggctcggcttcaccgtcaccgccgacgtcgaggtgcccgaaggaccgcgcacctggtgcatgacccgcaagcccggtgcctga

SEQ ID NO: 1551 - DNA, 2181 bp, Artificial Sequence
  Synthetic Polynucleotides
atggccttaccagtgaccgccttgctcctgccgctggccttgctgctccacgccgccaggccggacatccagatgacccagtctaccagttccctgagtgcatccctcggagacagggtgacgatcagttgcagcgcaagccaagggatcaataactatctgaactggtatcagcagaaaccggacggaacagtcgaactcctgatttattacaccagcacccttcagagtggcgtcccttcccggttcagtggctccggaagcgggaccgattactccctgaccatttctaatctggagccagaggacataggaacgtattattgccagcagtatagtaaactgccacgaacttttggaggggggacgaaactggagatcaaaggcggaggcggaagtggaggcggaggatctggcggcggaggctctcaggtgcaactccagcagtccggaagcgagcttatgatgccaggggcatcagtgaagatcagctgcaaggctactggctacaccttctctaattactggatagagtgggttaaacaaaggccagggcacggcctggaatggatcggcgagatcctgcctgggacaggccgaaccatttataacgagaagttcaaaggcaaggctactttcaccgcagatataagctctaatacagtgcaaatgcagctctcttccctgacaagtgaggatagtgccgtgtattattgcgcacgaagagattactatggaaatttttattacgctatggattattggggtcaaggaacaagtgtgaccgttagcagcacgcgtgagcagaaactgatctcggaagaggatctggcgaagcccaccacgacgccagcgccgcgaccaccaacaccggcgcccaccatcgcgtcgcagcccctgtccctgcgcccagaggcgtgccggccagcggcggggggcgcagtgcacacgagggggctggacttcgcctgtgacatctacatctgggcgcccttggccgggacttgtggggtccttctcctgtcactggttatcaccctttactgcaaacggggcagaaagaaactcctgtatatattcaaacaaccatttatgagaccagtacaaactactcaagaggaagatggctgtagctgccgatttccagaagaagaagaaggaggatgtgaactgagagtgaagttcagcaggagcgcagacgcccccgcgtaccagcagggccagaaccagctctataacgagctgaatctaggacgaagagaggagtacgatgttttggacaagagacgtggccgggaccctgagatggggggaaagccgagaaggaagaaccctcaggaaggcctgtacaatgaactgcagaaagataagatggcggaggcctacagtgagattgggatgaaaggcgagcgccggaggggcaaggggcacgatggcctttaccagggtctcagtacagccaccaaggacacctacgacgcccttcacatgcaggccctgccccctcgctctagtggctccggcgagggcagaggaagtctactaacctgcggagatgtggaagaaaatcctggcccacatatgaccgagtacaagcccacggtgcgcctcgccacccgcgacgacgtccccagggccgtacgcaccctcgccgccgcgttcgccgactaccccgccacgcgccacaccgtcgatccggaccgccacatcgagcgggtcaccgagctgcaagaactcttcctcacgcgcgtcgggctcgacatcggcaaggtgtgggtcgcggacgacggcgccgcggtggcggtctggaccacgccggagagcgtcgaagcgggggcggtgttcgccgagatcggcccgcgcatggccgagttgagcggttcccggctggccgcgcagcaacagatggaaggcctcctggcgccgcaccggcccaaggagcccgcgtggttcctggccaccgtcggcgtctcgcccgaccaccagggcaagggtctgggcagcgccgtcgtgctccccggagtggaggcggccgagcgcgccggggtgcccgccttcctggagacctccgcgccccgcaacctccccttctacgagcggctcggcttcaccgtcaccgccgacgtcgaggtgcccgaaggaccgcgcacctggtgcatgacccgcaagcccggtgcctga

SEQ ID NO: 1552 - DNA, 2166 bp, Artificial Sequence
  Synthetic Polynucleotides
atggccttaccagtgaccgccttgctcctgccgctggccttgctgctccacgccgccaggccggacatccagatgacccagagccctgccagcctgtccgtgtctgtgggcgagacagtgaccatcacctgtcgggccagcgagaacatctacagcaacctggcctggtatcagcagaagcagggcaagagcccccaactgctggtgtacgccgccaccaatctggccgatggcgtgcccagcagattttccggctctggcagcggcacccagtacagcctgaagatcaacagcctccagagcgaggacttcggcagctactactgccagcacttctggggcacctggacctttggaggaggcaccaccctggaaatcaagggcggaggcggaagtggaggcggaggatctggcggcggaggctctgaagtgcaactccagcagagcggccctgagcttgtgaagcctggcgcttccgtgaagatgagctgcaaggccagcggctacaccttcaccgactactacatgaagtggatgaagcagagccacggcaagtccctggaatggatcggcgacatcaaccccaacaacggcggcaccacctacaaccagaagttcaagggcaaggccaccctgaccgtggacaagagcagcagcaccgcctacatgcaactgaacagcctgaccagcgaggacagcgccgtgtactactgcgccagagactacggctacggctatttcgactactggggccagggcacaaccctgacagtgtcctctacgcgtgagcagaaactgatctcggaagaggatctggcgaagcccaccacgacgccagcgccgcgaccaccaacaccggcgcccaccatcgcgtcgcagcccctgtccctgcgcccagaggcgtgccggccagcggcggggggcgcagtgcacacgagggggctggacttcgcctgtgacatctacatctgggcgcccttggccgggacttgtggggtccttctcctgtcactggttatcaccctttactgcaaacggggcagaaagaaactcctgtatatattcaaacaaccatttatgagaccagtacaaactactcaagaggaagatggctgtagctgccgatttccagaagaagaagaaggaggatgtgaactgagagtgaagttcagcaggagcgcagacgcccccgcgtaccagcagggccagaaccagctctataacgagctgaatctaggacgaagagaggagtacgatgttttggacaagagacgtggccgggaccctgagatggggggaaagccgagaaggaagaaccctcaggaaggcctgtacaatgaactgcagaaagataagatggcggaggcctacagtgagattgggatgaaaggcgagcgccggaggggcaaggggcacgatggcctttaccagggtctcagtacagccaccaaggacacctacgacgcccttcacatgcaggccctgccccctcgctctagtggctccggcgagggcagaggaagtctactaacctgcggagatgtggaagaaaatcctggcccacatatgaccgagtacaagcccacggtgcgcctcgccacccgcgacgacgtccccagggccgtacgcaccctcgccgccgcgttcgccgactaccccgccacgcgccacaccgtcgatccggaccgccacatcgagcgggtcaccgagctgcaagaactcttcctcacgcgcgtcgggctcgacatcggcaaggtgtgggtcgcggacgacggcgccgcggtggcggtctggaccacgccggagagcgtcgaagcgggggcggtgttcgccgagatcggcccgcgcatggccgagttgagcggttcccggctggccgcgcagcaacagatggaaggcctcctggcgccgcaccggcccaaggagcccgcgtggttcctggccaccgtcggcgtctcgcccgaccaccagggcaagggtctgggcagcgccgtcgtgctccccggagtggaggcggccgagcgcgccggggtgcccgccttcctggagacctccgcgccccgcaacctccccttctacgagcggctcggcttcaccgtcaccgccgacgtcgaggtgcccgaaggaccgcgcacctggtgcatgacccgcaagcccggtgcctga

SEQ ID NO: 1553 - DNA, 2175 bp, Artificial Sequence
  Synthetic Polynucleotides
atggccttaccagtgaccgccttgctcctgccgctggccttgctgctccacgccgccaggccggagatcgtgctgacacagagccctggcaccctgagcctgtctccaggcgaaagagccacactgagctgtcgggcctctcagagcgtgggaggctacctggcttggtatcagcagaagccaggccaggcccccagactgctgatctacgacgccagcaatcgggccacaggcatccccgccagattttctggcagcggctccggcaccgacttcaccctgacaatcagcagcctggaacccgaggacttcgccgtgtactactgccagcagcggaacaactggccccccatgtacacattcggccagggcaccaagctggaaatcaagagaggcggaggcggaagtggaggcggaggatctggcggcggaggctctcaggtgcaactggtgcagagcggagccgaagtgaagaaacccggcagcagcgtgaaggtgtcctgcaaggcttccggcggcaccttcagcagctacgccatttcttgggtgcgccaggctcctggacagggcctggaatggatgggcggcatcatccctatcctgggcaccgccaactacgcccagaaattccagggcagagtgaccatcaccgccgacgagagcaccagcaccgcctacatggaactgagcagcctgcggagcgaggacacagccgtgtattattgcgccagatggggcggaggggccttcgacatttggggccagggaacaatggtcaccgtgtccagcacgcgtgagcagaaactgatctcggaagaggatctggcgaagcccaccacgacgccagcgccgcgaccaccaacaccggcgcccaccatcgcgtcgcagcccctgtccctgcgcccagaggcgtgccggccagcggcggggggcgcagtgcacacgagggggctggacttcgcctgtgacatctacatctgggcgcccttggccgggacttgtggggtccttctcctgtcactggttatcaccctttactgcaaacggggcagaaagaaactcctgtatatattcaaacaaccatttatgagaccagtacaaactactcaagaggaagatggctgtagctgccgatttccagaagaagaagaaggaggatgtgaactgagagtgaagttcagcaggagcgcagacgcccccgcgtaccagcagggccagaaccagctctataacgagctgaatctaggacgaagagaggagtacgatgttttggacaagagacgtggccgggaccctgagatggggggaaagccgagaaggaagaaccctcaggaaggcctgtacaatgaactgcagaaagataagatggcggaggcctacagtgagattgggatgaaaggcgagcgccggaggggcaaggggcacgatggcctttaccagggtctcagtacagccaccaaggacacctacgacgcccttcacatgcaggccctgccccctcgctctagtggctccggcgagggcagaggaagtctactaacctgcggagatgtggaagaaaatcctggcccacatatgaccgagtacaagcccacggtgcgcctcgccacccgcgacgacgtccccagggccgtacgcaccctcgccgccgcgttcgccgactaccccgccacgcgccacaccgtcgatccggaccgccacatcgagcgggtcaccgagctgcaagaactcttcctcacgcgcgtcgggctcgacatcggcaaggtgtgggtcgcggacgacggcgccgcggtggcggtctggaccacgccggagagcgtcgaagcgggggcggtgttcgccgagatcggcccgcgcatggccgagttgagcggttcccggctggccgcgcagcaacagatggaaggcctcctggcgccgcaccggcccaaggagcccgcgtggttcctggccaccgtcggcgtctcgcccgaccaccagggcaagggtctgggcagcgccgtcgtgctccccggagtggaggcggccgagcgcgccggggtgcccgccttcctggagacctccgcgccccgcaacctccccttctacgagcggctcggcttcaccgtcaccgccgacgtcgaggtgcccgaaggaccgcgcacctggtgcatgacccgcaagcccggtgcctga

SEQ ID NO: 1554 - DNA, 2160 bp, Artificial Sequence
  Synthetic Polynucleotides
atggccttaccagtgaccgccttgctcctgccgctggccttgctgctccacgccgccaggccgcagatcgtgctgacacagagccctgccctgatgagcgccagccctggcgagaaagtgaccatgacctgtagcgccagcagcagcgtgcgctacatgtactggtatcagcagaagcccagaagcagccccaagccctggattcacctgaccagcaatctggcctctggcgtgcccgctagattttccggctctggcagcggcaccagctacagcctgaccatcagcagcatggaagccgaggacgccgccacctactactgccagcagtggtccagccaccccttcacatttggctccggcaccaagctggaaatcaagggcggaggcggaagtggaggcggaggatctggcggcggaggctctgatgtgcaactccaggaaagcggccctggccttgtgaagcctagccagagcctgtccctgacctgtaccgtgaccggcttcagcatcaccagcgactactcttggaactggatcagacagttccctggcaacaaactggaatggatgggctacatcagctactccggccacacctcctacaaccccagcctggaaagccggatctccatcaccagagacaccagcaagaaccagttcttcttgcaactgaacagcgtgaccaccgaggataccgccacatattactgtaccagaggcaactgggacgtggtgtactggggccagggcacacttgtgaccgtgtctgctacgcgtgagcagaaactgatctcggaagaggatctggcgaagcccaccacgacgccagcgccgcgaccaccaacaccggcgcccaccatcgcgtcgcagcccctgtccctgcgcccagaggcgtgccggccagcggcggggggcgcagtgcacacgagggggctggacttcgcctgtgacatctacatctgggcgcccttggccgggacttgtggggtccttctcctgtcactggttatcaccctttactgcaaacggggcagaaagaaactcctgtatatattcaaacaaccatttatgagaccagtacaaactactcaagaggaagatggctgtagctgccgatttccagaagaagaagaaggaggatgtgaactgagagtgaagttcagcaggagcgcagacgcccccgcgtaccagcagggccagaaccagctctataacgagctgaatctaggacgaagagaggagtacgatgttttggacaagagacgtggccgggaccctgagatggggggaaagccgagaaggaagaaccctcaggaaggcctgtacaatgaactgcagaaagataagatggcggaggcctacagtgagattgggatgaaaggcgagcgccggaggggcaaggggcacgatggcctttaccagggtctcagtacagccaccaaggacacctacgacgcccttcacatgcaggccctgccccctcgctctagtggctccggcgagggcagaggaagtctactaacctgcggagatgtggaagaaaatcctggcccacatatgaccgagtacaagcccacggtgcgcctcgccacccgcgacgacgtccccagggccgtacgcaccctcgccgccgcgttcgccgactaccccgccacgcgccacaccgtcgatccggaccgccacatcgagcgggtcaccgagctgcaagaactcttcctcacgcgcgtcgggctcgacatcggcaaggtgtgggtcgcggacgacggcgccgcggtggcggtctggaccacgccggagagcgtcgaagcgggggcggtgttcgccgagatcggcccgcgcatggccgagttgagcggttcccggctggccgcgcagcaacagatggaaggcctcctggcgccgcaccggcccaaggagcccgcgtggttcctggccaccgtcggcgtctcgcccgaccaccagggcaagggtctgggcagcgccgtcgtgctccccggagtggaggcggccgagcgcgccggggtgcccgccttcctggagacctccgcgccccgcaacctccccttctacgagcggctcggcttcaccgtcaccgccgacgtcgaggtgcccgaaggaccgcgcacctggtgcatgacccgcaagcccggtgcctga

SEQ ID NO: 1555 - DNA, 2190 bp, Artificial Sequence
  Synthetic Polynucleotides
atggccttaccagtgaccgccttgctcctgccgctggccttgctgctccacgccgccaggccggacgtcgtgatgacccagagccctctgagcctgcctgtgacactgggacagcctgccagcatctcctgtcggagcagccagagcatcgtgcacagcgacggcaacacctacctggaatggtatcagcagcggccaggccagagccccagacggctgatctacaaggtgtccaacagattcagcggcgtgcccgacagattctccggcagcggctctggcaccgacttcaccctgaagatcagcagagtggaagccgaggacgtgggcgtgtactactgttttcaaggcagccacgccccctggacctttggcggaggaacaaaggtggaaatcaagggcggaggcggaagtggaggcggaggatctggcggcggaggctctgaagtgcaactggtggaatcaggcggcggactggtgcagcctggcggatctctgagactgagctgtgccgccagcggcttcaccttcagcagctacggaatgcactgggtgcgccaggcccctggcaaaggactggaatgggtggcctacatcaccaccagaagcagcaccatctactacgccgacagcgtgaagggccggttcaccatctccagagacaacgccaagaacagcctgtacctccagatgaactccctgcgggccgaggacaccgccgtgtactattgcaccagagagcccctgaccggctactacgctatggactattggggccagggcaccagcgtgaccgtgtctagtacgcgtgagcagaaactgatctcggaagaggatctggcgaagcccaccacgacgccagcgccgcgaccaccaacaccggcgcccaccatcgcgtcgcagcccctgtccctgcgcccagaggcgtgccggccagcggcggggggcgcagtgcacacgagggggctggacttcgcctgtgacatctacatctgggcgcccttggccgggacttgtggggtccttctcctgtcactggttatcaccctttactgcaaacggggcagaaagaaactcctgtatatattcaaacaaccatttatgagaccagtacaaactactcaagaggaagatggctgtagctgccgatttccagaagaagaagaaggaggatgtgaactgagagtgaagttcagcaggagcgcagacgcccccgcgtaccagcagggccagaaccagctctataacgagctgaatctaggacgaagagaggagtacgatgttttggacaagagacgtggccgggaccctgagatggggggaaagccgagaaggaagaaccctcaggaaggcctgtacaatgaactgcagaaagataagatggcggaggcctacagtgagattgggatgaaaggcgagcgccggaggggcaaggggcacgatggcctttaccagggtctcagtacagccaccaaggacacctacgacgcccttcacatgcaggccctgccccctcgctctagtggctccggcgagggcagaggaagtctactaacctgcggagatgtggaagaaaatcctggcccacatatgaccgagtacaagcccacggtgcgcctcgccacccgcgacgacgtccccagggccgtacgcaccctcgccgccgcgttcgccgactaccccgccacgcgccacaccgtcgatccggaccgccacatcgagcgggtcaccgagctgcaagaactcttcctcacgcgcgtcgggctcgacatcggcaaggtgtgggtcgcggacgacggcgccgcggtggcggtctggaccacgccggagagcgtcgaagcgggggcggtgttcgccgagatcggcccgcgcatggccgagttgagcggttcccggctggccgcgcagcaacagatggaaggcctcctggcgccgcaccggcccaaggagcccgcgtggttcctggccaccgtcggcgtctcgcccgaccaccagggcaagggtctgggcagcgccgtcgtgctccccggagtggaggcggccgagcgcgccggggtgcccgccttcctggagacctccgcgccccgcaacctccccttctacgagcggctcggcttcaccgtcaccgccgacgtcgaggtgcccgaaggaccgcgcacctggtgcatgacccgcaagcccggtgcctga

SEQ ID NO: 1556 - DNA, 2166 bp, Artificial Sequence
  Synthetic Polynucleotides
atggccttaccagtgaccgccttgctcctgccgctggccttgctgctccacgccgccaggccggacatccagatgacccagagccccagcagcctgtctgccagcgtgggcgacagagtgaccatcacctgtagagccagccagagcatcagcctgtggctgaactggtatcagcagaagcccggcaaggcccccaagctgctgatctacgccgccagcacactccagagcggcgtgccaagcagattttccggcagcggctccggcaccgacttcaccctgacaatcagctccctccagcccgaggacttcgccacctactactgccagcagtactacaccagcccctacaccttcggccagggcaccaaggtggaaatcaagagaggcggaggcggaagtggaggcggaggatctggcggcggaggctctcaggtgcaactgctggaatctggcggcggactggtgcagcctggcggatctctgagactgagctgtgccgccagcggcttcaccttcagcagctacgccatgagctgggtgcgccaggcccctggaaaaggactggaatgggtgtccgtgatccggtccagcggcagcagcacctattacgccgatagcgtgaagggccggttcaccatcagccgggacaacagcaagaacaccctgtacctccagatgaacagcctgcgggccgaggacaccgccgtgtactattgtgctaggggaggcggctacttcgactactggggccagggaacactcgtgaccgtgtcctctacgcgtgagcagaaactgatctcggaagaggatctggcgaagcccaccacgacgccagcgccgcgaccaccaacaccggcgcccaccatcgcgtcgcagcccctgtccctgcgcccagaggcgtgccggccagcggcggggggcgcagtgcacacgagggggctggacttcgcctgtgacatctacatctgggcgcccttggccgggacttgtggggtccttctcctgtcactggttatcaccctttactgcaaacggggcagaaagaaactcctgtatatattcaaacaaccatttatgagaccagtacaaactactcaagaggaagatggctgtagctgccgatttccagaagaagaagaaggaggatgtgaactgagagtgaagttcagcaggagcgcagacgcccccgcgtaccagcagggccagaaccagctctataacgagctgaatctaggacgaagagaggagtacgatgttttggacaagagacgtggccgggaccctgagatggggggaaagccgagaaggaagaaccctcaggaaggcctgtacaatgaactgcagaaagataagatggcggaggcctacagtgagattgggatgaaaggcgagcgccggaggggcaaggggcacgatggcctttaccagggtctcagtacagccaccaaggacacctacgacgcccttcacatgcaggccctgccccctcgctctagtggctccggcgagggcagaggaagtctactaacctgcggagatgtggaagaaaatcctggcccacatatgaccgagtacaagcccacggtgcgcctcgccacccgcgacgacgtccccagggccgtacgcaccctcgccgccgcgttcgccgactaccccgccacgcgccacaccgtcgatccggaccgccacatcgagcgggtcaccgagctgcaagaactcttcctcacgcgcgtcgggctcgacatcggcaaggtgtgggtcgcggacgacggcgccgcggtggcggtctggaccacgccggagagcgtcgaagcgggggcggtgttcgccgagatcggcccgcgcatggccgagttgagcggttcccggctggccgcgcagcaacagatggaaggcctcctggcgccgcaccggcccaaggagcccgcgtggttcctggccaccgtcggcgtctcgcccgaccaccagggcaagggtctgggcagcgccgtcgtgctccccggagtggaggcggccgagcgcgccggggtgcccgccttcctggagacctccgcgccccgcaacctccccttctacgagcggctcggcttcaccgtcaccgccgacgtcgaggtgcccgaaggaccgcgcacctggtgcatgacccgcaagcccggtgcctga

SEQ ID NO: 1557 - DNA, 2175 bp, Artificial Sequence
  Synthetic Polynucleotides
atggccttaccagtgaccgccttgctcctgccgctggccttgctgctccacgccgccaggccggacatccagatgacccagagccccagcagcctgtctgccagcgtgggcgacagagtgaccatcacctgtagagccagccagagcatcagcagctacctgaactggtatcagcagaagcccggcaaggcccccaaactgctgatctacgccgtgtccacactccagagcggcgtgcccagcagattttctggcagcggctccggcaccgacttcaccctgacaatcagctccctccagcccgaggacttcgccacctactactgtcagcagagcggcaccttccctcccaccacatttggacagggcaccaaggtggaaatcaagagaggcggaggcggaagtggaggcggaggatctggcggcggaggctctcaggtgcaactgctggaatctggcggcggactggtgcagcctggcggatctctgagactgagctgtgccgccagcggcttcaccttcagcagccacggaatgcactgggtgcgccaggcccctggaaagggactggaatgggtgtccgtgatctccggcagcggcagcaataccggctacgccgatagcgtgaagggccggttcaccatcagccgggacaacagcaagaacaccctgtacctccagatgaacagcctgcgggccgaggacaccgccgtgtactattgtgccagacagtggggcagctacgccttcgattcttggggccagggcaccctcgtgaccgtgtcatctacgcgtgagcagaaactgatctcggaagaggatctggcgaagcccaccacgacgccagcgccgcgaccaccaacaccggcgcccaccatcgcgtcgcagcccctgtccctgcgcccagaggcgtgccggccagcggcggggggcgcagtgcacacgagggggctggacttcgcctgtgacatctacatctgggcgcccttggccgggacttgtggggtccttctcctgtcactggttatcaccctttactgcaaacggggcagaaagaaactcctgtatatattcaaacaaccatttatgagaccagtacaaactactcaagaggaagatggctgtagctgccgatttccagaagaagaagaaggaggatgtgaactgagagtgaagttcagcaggagcgcagacgcccccgcgtaccagcagggccagaaccagctctataacgagctgaatctaggacgaagagaggagtacgatgttttggacaagagacgtggccgggaccctgagatggggggaaagccgagaaggaagaaccctcaggaaggcctgtacaatgaactgcagaaagataagatggcggaggcctacagtgagattgggatgaaaggcgagcgccggaggggcaaggggcacgatggcctttaccagggtctcagtacagccaccaaggacacctacgacgcccttcacatgcaggccctgccccctcgctctagtggctccggcgagggcagaggaagtctactaacctgcggagatgtggaagaaaatcctggcccacatatgaccgagtacaagcccacggtgcgcctcgccacccgcgacgacgtccccagggccgtacgcaccctcgccgccgcgttcgccgactaccccgccacgcgccacaccgtcgatccggaccgccacatcgagcgggtcaccgagctgcaagaactcttcctcacgcgcgtcgggctcgacatcggcaaggtgtgggtcgcggacgacggcgccgcggtggcggtctggaccacgccggagagcgtcgaagcgggggcggtgttcgccgagatcggcccgcgcatggccgagttgagcggttcccggctggccgcgcagcaacagatggaaggcctcctggcgccgcaccggcccaaggagcccgcgtggttcctggccaccgtcggcgtctcgcccgaccaccagggcaagggtctgggcagcgccgtcgtgctccccggagtggaggcggccgagcgcgccggggtgcccgccttcctggagacctccgcgccccgcaacctccccttctacgagcggctcggcttcaccgtcaccgccgacgtcgaggtgcccgaaggaccgcgcacctggtgcatgacccgcaagcccggtgcctga

SEQ ID NO: 1558 - DNA, 2205 bp, Artificial Sequence
  Synthetic Polynucleotides
atggccttaccagtgaccgccttgctcctgccgctggccttgctgctccacgccgccaggccggacatcgtgatgagccagagccctagcagcctggccgtgtccgtgggcgagaaagtgaccatgagctgcaagagcagccagtccctgctgcacagcagcaaccagaagaactacctggcctggtatcagcagaagcccggccagtcccccaaggtgctgatctactgggccagcaccagagaaagcggcgtgcccgatagattcaccggcagcggctctggcaccgacttcaccctgaccatcaccagcgtgaagtccgaggacctggctgtgtactactgccagcagtattacagctacccctggaccttcggcggaggcacccggctggaaatcaaaagaggcggaggcggaagtggaggcggaggatctggcggcggaggctctgaagtgcaactccagcagagcgtggccgagcttgtgaagcctggcgcttccgtgaagatgtcctgcaaggtgtccggctacaccctgacagaccacaccatccactggatgaagcagcggcctgagcagggcctggaatggatcggctacatctaccccagggacggcatcaccggctacaacgagaagttcaagggcaaggccacactgaccgccgacaccagcagcagcacagcctacatgcaactgaacagcctgaccagcgaggacagcgccgtgtacttctgtgccagatggggctacagctacagaaactacgcctactactacgactactggggccagggcacaaccctgaccgtgtctagtacgcgtgagcagaaactgatctcggaagaggatctggcgaagcccaccacgacgccagcgccgcgaccaccaacaccggcgcccaccatcgcgtcgcagcccctgtccctgcgcccagaggcgtgccggccagcggcggggggcgcagtgcacacgagggggctggacttcgcctgtgacatctacatctgggcgcccttggccgggacttgtggggtccttctcctgtcactggttatcaccctttactgcaaacggggcagaaagaaactcctgtatatattcaaacaaccatttatgagaccagtacaaactactcaagaggaagatggctgtagctgccgatttccagaagaagaagaaggaggatgtgaactgagagtgaagttcagcaggagcgcagacgcccccgcgtaccagcagggccagaaccagctctataacgagctgaatctaggacgaagagaggagtacgatgttttggacaagagacgtggccgggaccctgagatggggggaaagccgagaaggaagaaccctcaggaaggcctgtacaatgaactgcagaaagataagatggcggaggcctacagtgagattgggatgaaaggcgagcgccggaggggcaaggggcacgatggcctttaccagggtctcagtacagccaccaaggacacctacgacgcccttcacatgcaggccctgccccctcgctctagtggctccggcgagggcagaggaagtctactaacctgcggagatgtggaagaaaatcctggcccacatatgaccgagtacaagcccacggtgcgcctcgccacccgcgacgacgtccccagggccgtacgcaccctcgccgccgcgttcgccgactaccccgccacgcgccacaccgtcgatccggaccgccacatcgagcgggtcaccgagctgcaagaactcttcctcacgcgcgtcgggctcgacatcggcaaggtgtgggtcgcggacgacggcgccgcggtggcggtctggaccacgccggagagcgtcgaagcgggggcggtgttcgccgagatcggcccgcgcatggccgagttgagcggttcccggctggccgcgcagcaacagatggaaggcctcctggcgccgcaccggcccaaggagcccgcgtggttcctggccaccgtcggcgtctcgcccgaccaccagggcaagggtctgggcagcgccgtcgtgctccccggagtggaggcggccgagcgcgccggggtgcccgccttcctggagacctccgcgccccgcaacctccccttctacgagcggctcggcttcaccgtcaccgccgacgtcgaggtgcccgaaggaccgcgcacctggtgcatgacccgcaagcccggtgcctga

SEQ ID NO: 1559 - DNA, 2196 bp, Artificial Sequence
  Synthetic Polynucleotides
atggccttaccagtgaccgccttgctcctgccgctggccttgctgctccacgccgccaggccggagatcgtgctgacacagagccctggcaccctgagcctgtctccaggcgaaagagccacactgagctgtcgggccagccagagcgtgtccagctcttacctggcctggtatcagcagaagcccggccaggctccccggctgctgatctacggaacaagcagcagagccaccggcatccccgacagattttctggcagcggctccggcaccgacttcaccctgacaatcagcagactggaacccgaggacttcgccgtgtactactgccagcagtacggcagcagccccttcacctttggcggaggcaccaaggtggaaatcaagagaggcggaggcggaagtggaggcggaggatctggcggcggaggctctcaggtgcaactccaggaatctggccccggactggctaagcccagcgagacactgagcctgacctgtaccgtgtccggcgacagcatcaccagctactactggtcctggatcagacagccccctggcaagggcctggaatggatcggctacatctactacagcggcagcaccaactacaaccccagcctgaagtccagagtgaccatcagcgtggacaccagcaagaaccagttctccctgaagctgagcagcgtgacagccgccgacaccgccgtgtattattgcgccagagatcagcggagaatcgccgctgccggcacccacttttacggcatggatgtgtggggccagggcaccaccgtgaccgtgtcatctacgcgtgagcagaaactgatctcggaagaggatctggcgaagcccaccacgacgccagcgccgcgaccaccaacaccggcgcccaccatcgcgtcgcagcccctgtccctgcgcccagaggcgtgccggccagcggcggggggcgcagtgcacacgagggggctggacttcgcctgtgacatctacatctgggcgcccttggccgggacttgtggggtccttctcctgtcactggttatcaccctttactgcaaacggggcagaaagaaactcctgtatatattcaaacaaccatttatgagaccagtacaaactactcaagaggaagatggctgtagctgccgatttccagaagaagaagaaggaggatgtgaactgagagtgaagttcagcaggagcgcagacgcccccgcgtaccagcagggccagaaccagctctataacgagctgaatctaggacgaagagaggagtacgatgttttggacaagagacgtggccgggaccctgagatggggggaaagccgagaaggaagaaccctcaggaaggcctgtacaatgaactgcagaaagataagatggcggaggcctacagtgagattgggatgaaaggcgagcgccggaggggcaaggggcacgatggcctttaccagggtctcagtacagccaccaaggacacctacgacgcccttcacatgcaggccctgccccctcgctctagtggctccggcgagggcagaggaagtctactaacctgcggagatgtggaagaaaatcctggcccacatatgaccgagtacaagcccacggtgcgcctcgccacccgcgacgacgtccccagggccgtacgcaccctcgccgccgcgttcgccgactaccccgccacgcgccacaccgtcgatccggaccgccacatcgagcgggtcaccgagctgcaagaactcttcctcacgcgcgtcgggctcgacatcggcaaggtgtgggtcgcggacgacggcgccgcggtggcggtctggaccacgccggagagcgtcgaagcgggggcggtgttcgccgagatcggcccgcgcatggccgagttgagcggttcccggctggccgcgcagcaacagatggaaggcctcctggcgccgcaccggcccaaggagcccgcgtggttcctggccaccgtcggcgtctcgcccgaccaccagggcaagggtctgggcagcgccgtcgtgctccccggagtggaggcggccgagcgcgccggggtgcccgccttcctggagacctccgcgccccgcaacctccccttctacgagcggctcggcttcaccgtcaccgccgacgtcgaggtgcccgaaggaccgcgcacctggtgcatgacccgcaagcccggtgcctga

SEQ ID NO: 1560 - DNA, 2172 bp, Artificial Sequence
  Synthetic Polynucleotides
atggccttaccagtgaccgccttgctcctgccgctggccttgctgctccacgccgccaggccggacatcctgctgacccagagccccgtgatcctgtccgtgtctcctggcgagagagtgtccttcagctgtcgggccagccagagcatcggcaccaacatccactggtatcagcagcggaccaacggcagccccagactgctgattaagtacgccagcgagtccatcagcggcatccccagcagattttccggcagcggctccggcaccgacttcaccctgagcatcaacagcgtggaaagcgaggacattgccgactactactgccagcagaacaacaactggcccaccaccttcggagccggcaccaagctggaactgaagggcggaggcggaagtggaggcggaggatctggcggcggaggctctcaggtgcagctgaagcagagcggacctggcctggtgcagcctagccagagcctgtccatcacctgtaccgtgtccggcttcagcctgaccaactacggcgtgcactgggtgcgccagagccctggaaaaggactggaatggctgggagtgatttggagcggcggcaacaccgactacaacacccccttcaccagcagactgtctatcaacaaggacaacagcaagagccaggtgttcttcaagatgaacagcctccagagcaacgacaccgccatctactactgtgctagagccctgacctactatgactacgagttcgcctactggggccagggcacactcgtgacagtgtctgctacgcgtgagcagaaactgatctcggaagaggatctggcgaagcccaccacgacgccagcgccgcgaccaccaacaccggcgcccaccatcgcgtcgcagcccctgtccctgcgcccagaggcgtgccggccagcggcggggggcgcagtgcacacgagggggctggacttcgcctgtgacatctacatctgggcgcccttggccgggacttgtggggtccttctcctgtcactggttatcaccctttactgcaaacggggcagaaagaaactcctgtatatattcaaacaaccatttatgagaccagtacaaactactcaagaggaagatggctgtagctgccgatttccagaagaagaagaaggaggatgtgaactgagagtgaagttcagcaggagcgcagacgcccccgcgtaccagcagggccagaaccagctctataacgagctgaatctaggacgaagagaggagtacgatgttttggacaagagacgtggccgggaccctgagatggggggaaagccgagaaggaagaaccctcaggaaggcctgtacaatgaactgcagaaagataagatggcggaggcctacagtgagattgggatgaaaggcgagcgccggaggggcaaggggcacgatggcctttaccagggtctcagtacagccaccaaggacacctacgacgcccttcacatgcaggccctgccccctcgctctagtggctccggcgagggcagaggaagtctactaacctgcggagatgtggaagaaaatcctggcccacatatgaccgagtacaagcccacggtgcgcctcgccacccgcgacgacgtccccagggccgtacgcaccctcgccgccgcgttcgccgactaccccgccacgcgccacaccgtcgatccggaccgccacatcgagcgggtcaccgagctgcaagaactcttcctcacgcgcgtcgggctcgacatcggcaaggtgtgggtcgcggacgacggcgccgcggtggcggtctggaccacgccggagagcgtcgaagcgggggcggtgttcgccgagatcggcccgcgcatggccgagttgagcggttcccggctggccgcgcagcaacagatggaaggcctcctggcgccgcaccggcccaaggagcccgcgtggttcctggccaccgtcggcgtctcgcccgaccaccagggcaagggtctgggcagcgccgtcgtgctccccggagtggaggcggccgagcgcgccggggtgcccgccttcctggagacctccgcgccccgcaacctccccttctacgagcggctcggcttcaccgtcaccgccgacgtcgaggtgcccgaaggaccgcgcacctggtgcatgacccgcaagcccggtgcctga

SEQ ID NO: 1561 - DNA, 2151 bp, Artificial Sequence
  Synthetic Polynucleotides
atggccttaccagtgaccgccttgctcctgccgctggccttgctgctccacgccgccaggccgatgacccagagccccaagttcctgctggtgtctgccggcgacagagtgaccctgacatgcaaggccagccagagcgtgaacaacgacgtgtactggtatcagcaggaacccggccagtcccccaagctgctgatctactgggccagcaccagagaaagcggcgtgcccgatagattcaccggcagcggctctggcaccgacttcaccctgacaatcagcagcgtgcaggccgaggacctggccgtgtactactgcaagcagagctacaacctgtacaccttcggcggaggcaccaagctggaaatcaagagaggcggcggaggatctggcggaggcggatctgggggcggaggctctgaatctggaagaggactggtgcagcctggcggcagcagaaagctgtcttgtgccgccagcggcttcaccttcagcaccagcggaatgcactgggtgcgccaggcccctgagaagggactggaatgggtggcctacatcagctccggcagcaccaccatctaccacgccgataccgtgaagggccggttcaccatcagccgggacaaccccaagaataccctgttcctccagatgaccagcctgcggagcgaggacaccgccatgtactattgctgcgccagaagcggccagttcggcaactacttcgactactggggccagggcaccaccctgaccgtgtcatctacgcgtgagcagaaactgatctcggaagaggatctggcgaagcccaccacgacgccagcgccgcgaccaccaacaccggcgcccaccatcgcgtcgcagcccctgtccctgcgcccagaggcgtgccggccagcggcggggggcgcagtgcacacgagggggctggacttcgcctgtgacatctacatctgggcgcccttggccgggacttgtggggtccttctcctgtcactggttatcaccctttactgcaaacggggcagaaagaaactcctgtatatattcaaacaaccatttatgagaccagtacaaactactcaagaggaagatggctgtagctgccgatttccagaagaagaagaaggaggatgtgaactgagagtgaagttcagcaggagcgcagacgcccccgcgtaccagcagggccagaaccagctctataacgagctgaatctaggacgaagagaggagtacgatgttttggacaagagacgtggccgggaccctgagatggggggaaagccgagaaggaagaaccctcaggaaggcctgtacaatgaactgcagaaagataagatggcggaggcctacagtgagattgggatgaaaggcgagcgccggaggggcaaggggcacgatggcctttaccagggtctcagtacagccaccaaggacacctacgacgcccttcacatgcaggccctgccccctcgctctagtggctccggcgagggcagaggaagtctactaacctgcggagatgtggaagaaaatcctggcccacatatgaccgagtacaagcccacggtgcgcctcgccacccgcgacgacgtccccagggccgtacgcaccctcgccgccgcgttcgccgactaccccgccacgcgccacaccgtcgatccggaccgccacatcgagcgggtcaccgagctgcaagaactcttcctcacgcgcgtcgggctcgacatcggcaaggtgtgggtcgcggacgacggcgccgcggtggcggtctggaccacgccggagagcgtcgaagcgggggcggtgttcgccgagatcggcccgcgcatggccgagttgagcggttcccggctggccgcgcagcaacagatggaaggcctcctggcgccgcaccggcccaaggagcccgcgtggttcctggccaccgtcggcgtctcgcccgaccaccagggcaagggtctgggcagcgccgtcgtgctccccggagtggaggcggccgagcgcgccggggtgcccgccttcctggagacctccgcgccccgcaacctccccttctacgagcggctcggcttcaccgtcaccgccgacgtcgaggtgcccgaaggaccgcgcacctggtgcatgacccgcaagcccggtgcctga

SEQ ID NO: 1562 - DNA, 2166 bp, Artificial Sequence
  Synthetic Polynucleotides
atggccttaccagtgaccgccttgctcctgccgctggccttgctgctccacgccgccaggccgcagagcccatctagcctggctgtgtctgccggcgagaaagtgaccatgagctgcaagagcagccagagcctgctgaacagccggacccggaagaactacctggcctggtatcagcagaagcccggccagagccccaagctgctgatctactgggccagcaccagagaaagcggcgtgcccgatagattcaccggctctggcagcggcaccgacttcaccctgacaatcagcagcgtgcaggccgaggacctggccgtgtactactgcaagcagagcaacctgtacaccttcggcggaggcaccaagctggaaatcaagggcggaggcggaagtggaggcggaggatctggcggcggaggctctcaggtgcagctggaagagtctggacccgagcttgtgaagcctggggccagcgtgaagctgtcctgtaaagccagcggctacaccttcaccgagtacatcatccactgggtcaagcagcggagcggccagggcctggaatggatcggctggttttaccctggctccggcagcatcaagtacaacgagaagttcaaggacaaggccaccctgaccgccgacaagtccagcagcaccgtgtacatggaactgagcggcctgaccagcgaggacagcgccgtgtatttctgcgccagacacgacggctacagctacttcgactattggggccagggcaccacactgaccgtgtcctctacgcgtgagcagaaactgatctcggaagaggatctggcgaagcccaccacgacgccagcgccgcgaccaccaacaccggcgcccaccatcgcgtcgcagcccctgtccctgcgcccagaggcgtgccggccagcggcggggggcgcagtgcacacgagggggctggacttcgcctgtgacatctacatctgggcgcccttggccgggacttgtggggtccttctcctgtcactggttatcaccctttactgcaaacggggcagaaagaaactcctgtatatattcaaacaaccatttatgagaccagtacaaactactcaagaggaagatggctgtagctgccgatttccagaagaagaagaaggaggatgtgaactgagagtgaagttcagcaggagcgcagacgcccccgcgtaccagcagggccagaaccagctctataacgagctgaatctaggacgaagagaggagtacgatgttttggacaagagacgtggccgggaccctgagatggggggaaagccgagaaggaagaaccctcaggaaggcctgtacaatgaactgcagaaagataagatggcggaggcctacagtgagattgggatgaaaggcgagcgccggaggggcaaggggcacgatggcctttaccagggtctcagtacagccaccaaggacacctacgacgcccttcacatgcaggccctgccccctcgctctagtggctccggcgagggcagaggaagtctactaacctgcggagatgtggaagaaaatcctggcccacatatgaccgagtacaagcccacggtgcgcctcgccacccgcgacgacgtccccagggccgtacgcaccctcgccgccgcgttcgccgactaccccgccacgcgccacaccgtcgatccggaccgccacatcgagcgggtcaccgagctgcaagaactcttcctcacgcgcgtcgggctcgacatcggcaaggtgtgggtcgcggacgacggcgccgcggtggcggtctggaccacgccggagagcgtcgaagcgggggcggtgttcgccgagatcggcccgcgcatggccgagttgagcggttcccggctggccgcgcagcaacagatggaaggcctcctggcgccgcaccggcccaaggagcccgcgtggttcctggccaccgtcggcgtctcgcccgaccaccagggcaagggtctgggcagcgccgtcgtgctccccggagtggaggcggccgagcgcgccggggtgcccgccttcctggagacctccgcgccccgcaacctccccttctacgagcggctcggcttcaccgtcaccgccgacgtcgaggtgcccgaaggaccgcgcacctggtgcatgacccgcaagcccggtgcctga

SEQ ID NO: 1563 - DNA, 2202 bp, Artificial Sequence
  Synthetic Polynucleotides
atggaaatgttccagggcctgctgctgctcctgctgctttctatgggaggcacatgggccagcagagagatgctgaggcccagatgcagacccatcaatgccacactggccgtggaaaaagagggctgccctgtctgcatcaccgtgaacaccacaatctgcgccggctactgccccaccatgacaagagttctgcaaggcgtgctgcccgctctgcctcaggtcgtgtgcaactatcgggacgtccgcttcgagagcatcagactgcctggatgtcccagaggcgtgaaccctgtggtgtcttatgccgtggctctgagctgtcagtgcgccctgtgtagaagaagcaccaccgattgcggcggacccaaggatcaccctctgacctgtgacgaccctagattccaggccagcagcagctctaaagcccctccaccttctctgccatctccaagcagactgcccggacctagcgacacacctattctgcctcaaggcggaggcggaagtggaggcggaggatctggcggcggaggctctgctcctgatgtgcaggattgccctgagtgcaccctgcaagagaaccccttcttctcccaacctggcgctcctatcctccagtgcatgggctgctgcttcagccgggcttatcccacacctctgcggagcaagaaaaccatgctggtccagaaaaacgtgaccagcgagagcacctgttgtgtggctaagagctacaacagagtgaccgtgatgggcggcttcaaggtggaaaatcacaccgcctgccactgctccacctgttactaccacaagagcacgcgtgagcagaaactgatctcggaagaggatctggcgaagcccaccacgacgccagcgccgcgaccaccaacaccggcgcccaccatcgcgtcgcagcccctgtccctgcgcccagaggcgtgccggccagcggcggggggcgcagtgcacacgagggggctggacttcgcctgtgacatctacatctgggcgcccttggccgggacttgtggggtccttctcctgtcactggttatcaccctttactgcaaacggggcagaaagaaactcctgtatatattcaaacaaccatttatgagaccagtacaaactactcaagaggaagatggctgtagctgccgatttccagaagaagaagaaggaggatgtgaactgagagtgaagttcagcaggagcgcagacgcccccgcgtaccagcagggccagaaccagctctataacgagctgaatctaggacgaagagaggagtacgatgttttggacaagagacgtggccgggaccctgagatggggggaaagccgagaaggaagaaccctcaggaaggcctgtacaatgaactgcagaaagataagatggcggaggcctacagtgagattgggatgaaaggcgagcgccggaggggcaaggggcacgatggcctttaccagggtctcagtacagccaccaaggacacctacgacgcccttcacatgcaggccctgccccctcgctctagtggctccggcgagggcagaggaagtctactaacctgcggagatgtggaagaaaatcctggcccacatatgaccgagtacaagcccacggtgcgcctcgccacccgcgacgacgtccccagggccgtacgcaccctcgccgccgcgttcgccgactaccccgccacgcgccacaccgtcgatccggaccgccacatcgagcgggtcaccgagctgcaagaactcttcctcacgcgcgtcgggctcgacatcggcaaggtgtgggtcgcggacgacggcgccgcggtggcggtctggaccacgccggagagcgtcgaagcgggggcggtgttcgccgagatcggcccgcgcatggccgagttgagcggttcccggctggccgcgcagcaacagatggaaggcctcctggcgccgcaccggcccaaggagcccgcgtggttcctggccaccgtcggcgtctcgcccgaccaccagggcaagggtctgggcagcgccgtcgtgctccccggagtggaggcggccgagcgcgccggggtgcccgccttcctggagacctccgcgccccgcaacctccccttctacgagcggctcggcttcaccgtcaccgccgacgtcgaggtgcccgaaggaccgcgcacctggtgcatgacccgcaagcccggtgcctga

SEQ ID NO: 1564 - DNA, 2175 bp, Artificial Sequence
  Synthetic Polynucleotides
atggccttaccagtgaccgccttgctcctgccgctggccttgctgctccacgccgccaggccggacatccagatgacccagagccccagcagcctgtctgcctctctgggcgagagagtgtccctgacctgtcgggccacacaggaactgagcggctacctgtcttggctgcagcagaagcccgacggcaccatcaagcggctgatctacgccgccagcaccctggatagcggcgtgcccaagagattcagcggcaacagaagcggcagcgactacagcctgaccatcagctccctggaaagcgaggacttcgccgactactactgcctgcagtacgccatctacccctacaccttcggcggaggcaccaagctggaaatcaagggcggaggcggaagtggaggcggaggatctggcggcggaggctctgaggtgcaactgcagcagtctggccccgagcttgtgaagcctggcgcctccgtgaagatgagctgcaaggccagcggctacacctttaccagctacttcatccactgggtcaagcagaaacccggccagggcctggaatggatcggcttcatcaacccttacaacgacggcagcaagtacaacgagaagttcaagggcaaggccaccctgaccagcgacaagagcagcagcaccgcctacatggaactgtccagcctgacatccgaggacagcgccgtgtactactgcaccagggacgacggctactacggctacgccatggactactggggccagggaacaagcgtcaccgtgtcctctacgcgtgagcagaaactgatctcggaagaggatctggcgaagcccaccacgacgccagcgccgcgaccaccaacaccggcgcccaccatcgcgtcgcagcccctgtccctgcgcccagaggcgtgccggccagcggcggggggcgcagtgcacacgagggggctggacttcgcctgtgacatctacatctgggcgcccttggccgggacttgtggggtccttctcctgtcactggttatcaccctttactgcaaacggggcagaaagaaactcctgtatatattcaaacaaccatttatgagaccagtacaaactactcaagaggaagatggctgtagctgccgatttccagaagaagaagaaggaggatgtgaactgagagtgaagttcagcaggagcgcagacgcccccgcgtaccagcagggccagaaccagctctataacgagctgaatctaggacgaagagaggagtacgatgttttggacaagagacgtggccgggaccctgagatggggggaaagccgagaaggaagaaccctcaggaaggcctgtacaatgaactgcagaaagataagatggcggaggcctacagtgagattgggatgaaaggcgagcgccggaggggcaaggggcacgatggcctttaccagggtctcagtacagccaccaaggacacctacgacgcccttcacatgcaggccctgccccctcgctctagtggctccggcgagggcagaggaagtctactaacctgcggagatgtggaagaaaatcctggcccacatatgaccgagtacaagcccacggtgcgcctcgccacccgcgacgacgtccccagggccgtacgcaccctcgccgccgcgttcgccgactaccccgccacgcgccacaccgtcgatccggaccgccacatcgagcgggtcaccgagctgcaagaactcttcctcacgcgcgtcgggctcgacatcggcaaggtgtgggtcgcggacgacggcgccgcggtggcggtctggaccacgccggagagcgtcgaagcgggggcggtgttcgccgagatcggcccgcgcatggccgagttgagcggttcccggctggccgcgcagcaacagatggaaggcctcctggcgccgcaccggcccaaggagcccgcgtggttcctggccaccgtcggcgtctcgcccgaccaccagggcaagggtctgggcagcgccgtcgtgctccccggagtggaggcggccgagcgcgccggggtgcccgccttcctggagacctccgcgccccgcaacctccccttctacgagcggctcggcttcaccgtcaccgccgacgtcgaggtgcccgaaggaccgcgcacctggtgcatgacccgcaagcccggtgcctga

SEQ ID NO: 1565 - DNA, 2190 bp, Artificial Sequence
  Synthetic Polynucleotides
atggccttaccagtgaccgccttgctcctgccgctggccttgctgctccacgccgccaggccggacaccatcgtgctgacacagagccctgcttccctggccgtgtccctgggacagagagccaccatctcttgcagagccagcgagagcgtggacagctacggcaacagcttcatgcactggtatcagcagaagcccggccagccccccaagctgctgatctacctggcctccaacctggaaagcggcgtgcccgccagattttctggcagcggcagcagaaccgacttcaccctgaccatcgaccccgtggaagccgatgatgccgccacctactactgccagcagaacaactacgacccctggaccttcggcggaggcaccaagctggaaatcaagggcggaggcggaagtggaggcggaggatctggcggcggaggctctgaagtgcaactccagcagagcggccctgagcttgtgaagcctggcgcttccgtgaagatgagctgcaaggccagcggctacaccttcaccagctacgtgatgcactgggtcaagcagaaacctggacagggcctggaatggatcggctacatcaacccctacaacgacggcaccaagtacaacgagaagttcaagggcaaggccaccctgacaagcgacaccagcagcagcaccgcctacatggaactgaacagcctgaccagcgaggacagcgccgtgtacttctgcgccagacccatctacttcgacaacgactacttcgattactggggccagggcaccaccctgaaggtgtcctctacgcgtgagcagaaactgatctcggaagaggatctggcgaagcccaccacgacgccagcgccgcgaccaccaacaccggcgcccaccatcgcgtcgcagcccctgtccctgcgcccagaggcgtgccggccagcggcggggggcgcagtgcacacgagggggctggacttcgcctgtgacatctacatctgggcgcccttggccgggacttgtggggtccttctcctgtcactggttatcaccctttactgcaaacggggcagaaagaaactcctgtatatattcaaacaaccatttatgagaccagtacaaactactcaagaggaagatggctgtagctgccgatttccagaagaagaagaaggaggatgtgaactgagagtgaagttcagcaggagcgcagacgcccccgcgtaccagcagggccagaaccagctctataacgagctgaatctaggacgaagagaggagtacgatgttttggacaagagacgtggccgggaccctgagatggggggaaagccgagaaggaagaaccctcaggaaggcctgtacaatgaactgcagaaagataagatggcggaggcctacagtgagattgggatgaaaggcgagcgccggaggggcaaggggcacgatggcctttaccagggtctcagtacagccaccaaggacacctacgacgcccttcacatgcaggccctgccccctcgctctagtggctccggcgagggcagaggaagtctactaacctgcggagatgtggaagaaaatcctggcccacatatgaccgagtacaagcccacggtgcgcctcgccacccgcgacgacgtccccagggccgtacgcaccctcgccgccgcgttcgccgactaccccgccacgcgccacaccgtcgatccggaccgccacatcgagcgggtcaccgagctgcaagaactcttcctcacgcgcgtcgggctcgacatcggcaaggtgtgggtcgcggacgacggcgccgcggtggcggtctggaccacgccggagagcgtcgaagcgggggcggtgttcgccgagatcggcccgcgcatggccgagttgagcggttcccggctggccgcgcagcaacagatggaaggcctcctggcgccgcaccggcccaaggagcccgcgtggttcctggccaccgtcggcgtctcgcccgaccaccagggcaagggtctgggcagcgccgtcgtgctccccggagtggaggcggccgagcgcgccggggtgcccgccttcctggagacctccgcgccccgcaacctccccttctacgagcggctcggcttcaccgtcaccgccgacgtcgaggtgcccgaaggaccgcgcacctggtgcatgacccgcaagcccggtgcctga

SEQ ID NO: 1566 - DNA, 2175 bp, Artificial Sequence
  Synthetic Polynucleotides
atggccttaccagtgaccgccttgctcctgccgctggccttgctgctccacgccgccaggccggacatccagatgacacagagccctagcagcctgtctgccagcgtgggagacagagtgaccatcacatgcaaggccagccaggatgtgtctacagccgtggcctggttccagcagaagcctggaaaagcccctaagctgctgatctacagccccagctacagatacaccggcgtgcccagcagattttctggcagcggctctggcaccgacttcaccctgacaatatccagcctccagcctgaggacttcacctactactgccagcagctctacagcaccccttacacattcggccagggcaccaaggtggaaatcaaaggcggaggcggaagtggaggcggaggatctggcggcggaggctctgaagtgcaactggttcagagcggagccgaagtgaagaaacctggggcctctgtgaaggtgtcctgcaaagccagcggctacacctttaccgactactacctggacgtggtcgtgcggcaagctcctggacaaggactggaatggatcggcagagtgaacccctacaacggcggcaccatctacaaccagaaattcaagggaagagtgaccctgaccagagacaccagcacctccacagcctacctggaactgagcagcctgagaagcgaagataccgccgtgtactactgcgccagggaccactacagatatgaccctctgctggactactggggccagggaaccctggttacagtgtctagtacgcgtgagcagaaactgatctcggaagaggatctggcgaagcccaccacgacgccagcgccgcgaccaccaacaccggcgcccaccatcgcgtcgcagcccctgtccctgcgcccagaggcgtgccggccagcggcggggggcgcagtgcacacgagggggctggacttcgcctgtgacatctacatctgggcgcccttggccgggacttgtggggtccttctcctgtcactggttatcaccctttactgcaaacggggcagaaagaaactcctgtatatattcaaacaaccatttatgagaccagtacaaactactcaagaggaagatggctgtagctgccgatttccagaagaagaagaaggaggatgtgaactgagagtgaagttcagcaggagcgcagacgcccccgcgtaccagcagggccagaaccagctctataacgagctgaatctaggacgaagagaggagtacgatgttttggacaagagacgtggccgggaccctgagatggggggaaagccgagaaggaagaaccctcaggaaggcctgtacaatgaactgcagaaagataagatggcggaggcctacagtgagattgggatgaaaggcgagcgccggaggggcaaggggcacgatggcctttaccagggtctcagtacagccaccaaggacacctacgacgcccttcacatgcaggccctgccccctcgctctagtggctccggcgagggcagaggaagtctactaacctgcggagatgtggaagaaaatcctggcccacatatgaccgagtacaagcccacggtgcgcctcgccacccgcgacgacgtccccagggccgtacgcaccctcgccgccgcgttcgccgactaccccgccacgcgccacaccgtcgatccggaccgccacatcgagcgggtcaccgagctgcaagaactcttcctcacgcgcgtcgggctcgacatcggcaaggtgtgggtcgcggacgacggcgccgcggtggcggtctggaccacgccggagagcgtcgaagcgggggcggtgttcgccgagatcggcccgcgcatggccgagttgagcggttcccggctggccgcgcagcaacagatggaaggcctcctggcgccgcaccggcccaaggagcccgcgtggttcctggccaccgtcggcgtctcgcccgaccaccagggcaagggtctgggcagcgccgtcgtgctccccggagtggaggcggccgagcgcgccggggtgcccgccttcctggagacctccgcgccccgcaacctccccttctacgagcggctcggcttcaccgtcaccgccgacgtcgaggtgcccgaaggaccgcgcacctggtgcatgacccgcaagcccggtgcctga

SEQ ID NO: 1567 - DNA, 2193 bp, Artificial Sequence
  Synthetic Polynucleotides
atggccttaccagtgaccgccttgctcctgccgctggccttgctgctccacgccgccaggccggacatccagatgacacagagccctagcagcctgtctgccagcgtgggagacagagtgaccatcacctgtagagccagccagagcgtgtccaccagcagctacaactacatgcactggtatcagcagaagcccggcaagcctcctaagctgctgattaagtacgccagcaacctggaaagcggcgtgcccagcagattttctggcagcggctctggcaccgacttcaccctgacaatatccagcctccagcctgaggacttcgccacctactactgtcagcactcctgggagatccctctgacattcggccagggcaccaaggtggaaatcaaaggcggaggcggaagtggaggcggaggatctggcggcggaggctctgaagtgcaactggttcagagcggagccgaagtgaagaaacctggggcctctgtgaaggtgtcctgcaaggccagcggctacagcttcaccgactattatatgcactgggtccgacaggctccaggccagggacttgagtggatcggcagaatcaacccctacaacggcgctgccttctacagccagaacttcaaggatagagtgaccctgaccgtggacaccagcaccagcacagcctacctggaactgagcagcctgagaagcgaggacaccgccgtgtactactgcgccattgagagaggcgctgacctggaaggctacgctatggattattggggccagggaaccctggtcaccgtgtcatctacgcgtgagcagaaactgatctcggaagaggatctggcgaagcccaccacgacgccagcgccgcgaccaccaacaccggcgcccaccatcgcgtcgcagcccctgtccctgcgcccagaggcgtgccggccagcggcggggggcgcagtgcacacgagggggctggacttcgcctgtgacatctacatctgggcgcccttggccgggacttgtggggtccttctcctgtcactggttatcaccctttactgcaaacggggcagaaagaaactcctgtatatattcaaacaaccatttatgagaccagtacaaactactcaagaggaagatggctgtagctgccgatttccagaagaagaagaaggaggatgtgaactgagagtgaagttcagcaggagcgcagacgcccccgcgtaccagcagggccagaaccagctctataacgagctgaatctaggacgaagagaggagtacgatgttttggacaagagacgtggccgggaccctgagatggggggaaagccgagaaggaagaaccctcaggaaggcctgtacaatgaactgcagaaagataagatggcggaggcctacagtgagattgggatgaaaggcgagcgccggaggggcaaggggcacgatggcctttaccagggtctcagtacagccaccaaggacacctacgacgcccttcacatgcaggccctgccccctcgctctagtggctccggcgagggcagaggaagtctactaacctgcggagatgtggaagaaaatcctggcccacatatgaccgagtacaagcccacggtgcgcctcgccacccgcgacgacgtccccagggccgtacgcaccctcgccgccgcgttcgccgactaccccgccacgcgccacaccgtcgatccggaccgccacatcgagcgggtcaccgagctgcaagaactcttcctcacgcgcgtcgggctcgacatcggcaaggtgtgggtcgcggacgacggcgccgcggtggcggtctggaccacgccggagagcgtcgaagcgggggcggtgttcgccgagatcggcccgcgcatggccgagttgagcggttcccggctggccgcgcagcaacagatggaaggcctcctggcgccgcaccggcccaaggagcccgcgtggttcctggccaccgtcggcgtctcgcccgaccaccagggcaagggtctgggcagcgccgtcgtgctccccggagtggaggcggccgagcgcgccggggtgcccgccttcctggagacctccgcgccccgcaacctccccttctacgagcggctcggcttcaccgtcaccgccgacgtcgaggtgcccgaaggaccgcgcacctggtgcatgacccgcaagcccggtgcctga

SEQ ID NO: 1568 - DNA, 2187 bp, Artificial Sequence
  Synthetic Polynucleotides
atggccttaccagtgaccgccttgctcctgccgctggccttgctgctccacgccgccaggccggagatcgtgctgacacagtctccagccacactgagcgcttctccaggcgagagagtgaccctgacctgtagagccagcagcaacgtgatctccagctacgtgcactggtatcagcagaagcctggcagcagccccagactgtttctgtacagcaccagcaatctggcctccggcgtgccaagcagattttctggctctggcagcggcaccgacttcacctttaccatctctagcctggaagccgaggacgccgccacctactactgtcagcagtacagcggctaccctctgaccttcggccagggcacaagactggaaatcaaaggcggaggcggaagtggaggcggaggatctggcggcggaggctctcaagttcagctgcaagagtctggccctggcctggtcaagcctagcgaaacactgagcctgacctgcgccgtgtctggctactctatcaccagcgcctactattggaactggatcagacagcctcctggcaaaggactggaatggatcggctacatcagctacgacggcagaaacaactacaaccccagcctgaagaaccggatcaccatcaatcccgacaccagcaagaaccagttcagcctccagctgaacagcgtgacccctgaggataccgccgtgtactactgtgccagagaaggcgactacgacgtgggcaactactacgctatggactactggggccagggaaccctggtcacagtctcttctacgcgtgagcagaaactgatctcggaagaggatctggcgaagcccaccacgacgccagcgccgcgaccaccaacaccggcgcccaccatcgcgtcgcagcccctgtccctgcgcccagaggcgtgccggccagcggcggggggcgcagtgcacacgagggggctggacttcgcctgtgacatctacatctgggcgcccttggccgggacttgtggggtccttctcctgtcactggttatcaccctttactgcaaacggggcagaaagaaactcctgtatatattcaaacaaccatttatgagaccagtacaaactactcaagaggaagatggctgtagctgccgatttccagaagaagaagaaggaggatgtgaactgagagtgaagttcagcaggagcgcagacgcccccgcgtaccagcagggccagaaccagctctataacgagctgaatctaggacgaagagaggagtacgatgttttggacaagagacgtggccgggaccctgagatggggggaaagccgagaaggaagaaccctcaggaaggcctgtacaatgaactgcagaaagataagatggcggaggcctacagtgagattgggatgaaaggcgagcgccggaggggcaaggggcacgatggcctttaccagggtctcagtacagccaccaaggacacctacgacgcccttcacatgcaggccctgccccctcgctctagtggctccggcgagggcagaggaagtctactaacctgcggagatgtggaagaaaatcctggcccacatatgaccgagtacaagcccacggtgcgcctcgccacccgcgacgacgtccccagggccgtacgcaccctcgccgccgcgttcgccgactaccccgccacgcgccacaccgtcgatccggaccgccacatcgagcgggtcaccgagctgcaagaactcttcctcacgcgcgtcgggctcgacatcggcaaggtgtgggtcgcggacgacggcgccgcggtggcggtctggaccacgccggagagcgtcgaagcgggggcggtgttcgccgagatcggcccgcgcatggccgagttgagcggttcccggctggccgcgcagcaacagatggaaggcctcctggcgccgcaccggcccaaggagcccgcgtggttcctggccaccgtcggcgtctcgcccgaccaccagggcaagggtctgggcagcgccgtcgtgctccccggagtggaggcggccgagcgcgccggggtgcccgccttcctggagacctccgcgccccgcaacctccccttctacgagcggctcggcttcaccgtcaccgccgacgtcgaggtgcccgaaggaccgcgcacctggtgcatgacccgcaagcccggtgcctga

SEQ ID NO: 1569 - DNA, 2187 bp, Artificial Sequence
  Synthetic Polynucleotides
atggccttaccagtgaccgccttgctcctgccgctggccttgctgctccacgccgccaggccggagatcgtgctgacacagtctcccgccacactgtcactgtctccaggcgaaagagccacactgagctgtagagccagcagcaacgtgatctccagctacgtgcactggtatcagcagaagcctggacaggcccctcggctgctgatctacagcacaagcaatctggcctctggcatccccgccagattttctggctctggaagcggcaccgacttcaccctgaccataagcagcctggaacctgaggacttcgccgtgtactactgccagcagtatagcggctaccctctgaccttcggccagggcacaagactggaaatcaaaggcggaggcggaagtggaggcggaggatctggcggcggaggctctgaagtgcaactggtggaaagtggcggcggactggtgcaacctggaagaagcctgagactgtcctgtgccgccagcggctactctatcacaagcgcctactactggaactgggtccgacaggctcctggcaaaggactggaatgggtgtcctacatcagctacgacggcagaaacaactacaaccccagcctgaagaaccgcttcaccatcagccgggacaacgccaagaagtccctgtacctccagatgaacagcctgagagccgaggacacagccctgtactattgcgccaaagagggcgactacgacgtcggcaactactacgctatggactactggggccagggaaccaccgtgactgtctcttctacgcgtgagcagaaactgatctcggaagaggatctggcgaagcccaccacgacgccagcgccgcgaccaccaacaccggcgcccaccatcgcgtcgcagcccctgtccctgcgcccagaggcgtgccggccagcggcggggggcgcagtgcacacgagggggctggacttcgcctgtgacatctacatctgggcgcccttggccgggacttgtggggtccttctcctgtcactggttatcaccctttactgcaaacggggcagaaagaaactcctgtatatattcaaacaaccatttatgagaccagtacaaactactcaagaggaagatggctgtagctgccgatttccagaagaagaagaaggaggatgtgaactgagagtgaagttcagcaggagcgcagacgcccccgcgtaccagcagggccagaaccagctctataacgagctgaatctaggacgaagagaggagtacgatgttttggacaagagacgtggccgggaccctgagatggggggaaagccgagaaggaagaaccctcaggaaggcctgtacaatgaactgcagaaagataagatggcggaggcctacagtgagattgggatgaaaggcgagcgccggaggggcaaggggcacgatggcctttaccagggtctcagtacagccaccaaggacacctacgacgcccttcacatgcaggccctgccccctcgctctagtggctccggcgagggcagaggaagtctactaacctgcggagatgtggaagaaaatcctggcccacatatgaccgagtacaagcccacggtgcgcctcgccacccgcgacgacgtccccagggccgtacgcaccctcgccgccgcgttcgccgactaccccgccacgcgccacaccgtcgatccggaccgccacatcgagcgggtcaccgagctgcaagaactcttcctcacgcgcgtcgggctcgacatcggcaaggtgtgggtcgcggacgacggcgccgcggtggcggtctggaccacgccggagagcgtcgaagcgggggcggtgttcgccgagatcggcccgcgcatggccgagttgagcggttcccggctggccgcgcagcaacagatggaaggcctcctggcgccgcaccggcccaaggagcccgcgtggttcctggccaccgtcggcgtctcgcccgaccaccagggcaagggtctgggcagcgccgtcgtgctccccggagtggaggcggccgagcgcgccggggtgcccgccttcctggagacctccgcgccccgcaacctccccttctacgagcggctcggcttcaccgtcaccgccgacgtcgaggtgcccgaaggaccgcgcacctggtgcatgacccgcaagcccggtgcctga

SEQ ID NO: 1570 - DNA, 2223 bp, Artificial Sequence
  Synthetic Polynucleotides
atggccttaccagtgaccgccttgctcctgccgctggccttgctgctccacgccgccaggccggacctgaacttcatgctgacccagccccacagcgtgtccggcagccctggaaagaccgtgaccatctcctgcaccagaagcaccggcagcatcaccagcaactacgtgcactggtatcagcagaggcccggcagcagccctaccaccgtgatctgcgaggacaacgagaggccaagcggcgtgcccgatagattcagcggctccatcgacatcagcagcaacagcgccagcctgaccatcagcggcctgaaaaccgaggacgaggccgactactactgccagagctacgacgacagcaaccacatctccgtgttcggcaccgggaccaaagtgaccgtgctgggacagcccaaggccaatcctggcggaggcggaagtggaggcggaggatctggcggcggaggctctcaggtgcaactgcaggaatctggccctggcctcgtgaagcccagcgagacactgagcctgacctgcacagtgtccggcggcagcattagcagcagcaattactactggggctggattcggcagccccctggcaagggactggaatggatcggagccatctactacagcggcagcacctactacaaccccagcctgaagtccagagtggctatcagcgtggacaccagcaagaaccagttctccctgaagctgagcagcgtgacagccgccgataccgccgtgtactactgcgccagacggatcggagtggccggacagtggtacttcgacctgtggggcagaggaaccctcgtgaccgtgtctagcacgcgtgagcagaaactgatctcggaagaggatctggcgaagcccaccacgacgccagcgccgcgaccaccaacaccggcgcccaccatcgcgtcgcagcccctgtccctgcgcccagaggcgtgccggccagcggcggggggcgcagtgcacacgagggggctggacttcgcctgtgacatctacatctgggcgcccttggccgggacttgtggggtccttctcctgtcactggttatcaccctttactgcaaacggggcagaaagaaactcctgtatatattcaaacaaccatttatgagaccagtacaaactactcaagaggaagatggctgtagctgccgatttccagaagaagaagaaggaggatgtgaactgagagtgaagttcagcaggagcgcagacgcccccgcgtaccagcagggccagaaccagctctataacgagctgaatctaggacgaagagaggagtacgatgttttggacaagagacgtggccgggaccctgagatggggggaaagccgagaaggaagaaccctcaggaaggcctgtacaatgaactgcagaaagataagatggcggaggcctacagtgagattgggatgaaaggcgagcgccggaggggcaaggggcacgatggcctttaccagggtctcagtacagccaccaaggacacctacgacgcccttcacatgcaggccctgccccctcgctctagtggctccggcgagggcagaggaagtctactaacctgcggagatgtggaagaaaatcctggcccacatatgaccgagtacaagcccacggtgcgcctcgccacccgcgacgacgtccccagggccgtacgcaccctcgccgccgcgttcgccgactaccccgccacgcgccacaccgtcgatccggaccgccacatcgagcgggtcaccgagctgcaagaactcttcctcacgcgcgtcgggctcgacatcggcaaggtgtgggtcgcggacgacggcgccgcggtggcggtctggaccacgccggagagcgtcgaagcgggggcggtgttcgccgagatcggcccgcgcatggccgagttgagcggttcccggctggccgcgcagcaacagatggaaggcctcctggcgccgcaccggcccaaggagcccgcgtggttcctggccaccgtcggcgtctcgcccgaccaccagggcaagggtctgggcagcgccgtcgtgctccccggagtggaggcggccgagcgcgccggggtgcccgccttcctggagacctccgcgccccgcaacctccccttctacgagcggctcggcttcaccgtcaccgccgacgtcgaggtgcccgaaggaccgcgcacctggtgcatgacccgcaagcccggtgcctga

SEQ ID NO: 1571 - DNA, 2181 bp, Artificial Sequence
  Synthetic Polynucleotides
atggccttaccagtgaccgccttgctcctgccgctggccttgctgctccacgccgccaggccggacatccagatgacccagagccccagcagcctgagcgccagcgtgggcgacagagtgaccatcacctgcaaggccagccaggacgtgggcatcgccgtggcctggtaccagcagaagcccggcaaggtgcccaagctgctgatctactgggccagcaccagacacaccggcgtgcccgacagattcagcggcagcggcagcggcaccgacttcaccctgaccatcagcagcctgcagcccgaggacgtggccacctactactgccagcagtacagcagctacccctacaccttcggccagggcaccaaggtggagatcaagggcggaggcggaagtggaggcggaggatctggcggcggaggctctcagatccagttggtgcagtctggacctgacctgaagaagcctggagagacagtcaagatcagttgcaaggcttctgggtataccttcacaaacactggaatgaactgggtgaagcaggctccaggaaagggtttaaagtggatgggctggataaatacctacactggagagccaacatacgctgatgacttcaagggacggtttaccttctctttggaaacctctgccagcactgcctatttgcagatcaacaacctcaaaaatgaggacacggctacatatttctgtacaagatggggctacggtagtagcctttattatgctatggactactggggtcaaggaacctcagtcaccgtctcctcaacgcgtgagcagaaactgatctcggaagaggatctggcgaagcccaccacgacgccagcgccgcgaccaccaacaccggcgcccaccatcgcgtcgcagcccctgtccctgcgcccagaggcgtgccggccagcggcggggggcgcagtgcacacgagggggctggacttcgcctgtgacatctacatctgggcgcccttggccgggacttgtggggtccttctcctgtcactggttatcaccctttactgcaaacggggcagaaagaaactcctgtatatattcaaacaaccatttatgagaccagtacaaactactcaagaggaagatggctgtagctgccgatttccagaagaagaagaaggaggatgtgaactgagagtgaagttcagcaggagcgcagacgcccccgcgtaccagcagggccagaaccagctctataacgagctgaatctaggacgaagagaggagtacgatgttttggacaagagacgtggccgggaccctgagatggggggaaagccgagaaggaagaaccctcaggaaggcctgtacaatgaactgcagaaagataagatggcggaggcctacagtgagattgggatgaaaggcgagcgccggaggggcaaggggcacgatggcctttaccagggtctcagtacagccaccaaggacacctacgacgcccttcacatgcaggccctgccccctcgctctagtggctccggcgagggcagaggaagtctactaacctgcggagatgtggaagaaaatcctggcccacatatgaccgagtacaagcccacggtgcgcctcgccacccgcgacgacgtccccagggccgtacgcaccctcgccgccgcgttcgccgactaccccgccacgcgccacaccgtcgatccggaccgccacatcgagcgggtcaccgagctgcaagaactcttcctcacgcgcgtcgggctcgacatcggcaaggtgtgggtcgcggacgacggcgccgcggtggcggtctggaccacgccggagagcgtcgaagcgggggcggtgttcgccgagatcggcccgcgcatggccgagttgagcggttcccggctggccgcgcagcaacagatggaaggcctcctggcgccgcaccggcccaaggagcccgcgtggttcctggccaccgtcggcgtctcgcccgaccaccagggcaagggtctgggcagcgccgtcgtgctccccggagtggaggcggccgagcgcgccggggtgcccgccttcctggagacctccgcgccccgcaacctccccttctacgagcggctcggcttcaccgtcaccgccgacgtcgaggtgcccgaaggaccgcgcacctggtgcatgacccgcaagcccggtgcctga

SEQ ID NO: 1572 - DNA, 2172 bp, Artificial Sequence
  Synthetic Polynucleotides
atggccttaccagtgaccgccttgctcctgccgctggccttgctgctccacgccgccaggccggacatccagatgacccagagccccagcagcctgtctgccagcgtgggcgacagagtgaccatcacatgcaaggccagccaggacgtgggaatcgccgtggcctggtatcagcagaaacccggcaaggtgcccaagctgctgatctactgggccagcaccagacacaccggcgtgcccgatagattttccggcagcggctccggcaccgacttcaccctgacaatcagctccctccagcccgaggacgtggcaacctactactgccagcagtacagcagctacccctacaccttcggccagggcaccaaggtggaaatcaagggcggaggcggaagtggaggcggaggatctggcggcggaggctctgaagtgcaactggtggaatcaggcggcggactggtgcagcctggcggatctctgagactgagctgtgccgccagcggcttcgacttcagccggtactggatgagctgggtgcgccaggcccctggcaaaggactggaatggatcggcgagatcaaccccgacagcagcaccatcaactacgcccccagcctgaaggacaagttcatcatcagccgggacaacgccaagaacagcctgtacctccagatgaactccctgcgggccgaggacaccgccgtgtactattgcgccagacccgacggcaactactggtacttcgacgtgtggggccagggaaccctcgtgaccgtgtcatctacgcgtgagcagaaactgatctcggaagaggatctggcgaagcccaccacgacgccagcgccgcgaccaccaacaccggcgcccaccatcgcgtcgcagcccctgtccctgcgcccagaggcgtgccggccagcggcggggggcgcagtgcacacgagggggctggacttcgcctgtgacatctacatctgggcgcccttggccgggacttgtggggtccttctcctgtcactggttatcaccctttactgcaaacggggcagaaagaaactcctgtatatattcaaacaaccatttatgagaccagtacaaactactcaagaggaagatggctgtagctgccgatttccagaagaagaagaaggaggatgtgaactgagagtgaagttcagcaggagcgcagacgcccccgcgtaccagcagggccagaaccagctctataacgagctgaatctaggacgaagagaggagtacgatgttttggacaagagacgtggccgggaccctgagatggggggaaagccgagaaggaagaaccctcaggaaggcctgtacaatgaactgcagaaagataagatggcggaggcctacagtgagattgggatgaaaggcgagcgccggaggggcaaggggcacgatggcctttaccagggtctcagtacagccaccaaggacacctacgacgcccttcacatgcaggccctgccccctcgctctagtggctccggcgagggcagaggaagtctactaacctgcggagatgtggaagaaaatcctggcccacatatgaccgagtacaagcccacggtgcgcctcgccacccgcgacgacgtccccagggccgtacgcaccctcgccgccgcgttcgccgactaccccgccacgcgccacaccgtcgatccggaccgccacatcgagcgggtcaccgagctgcaagaactcttcctcacgcgcgtcgggctcgacatcggcaaggtgtgggtcgcggacgacggcgccgcggtggcggtctggaccacgccggagagcgtcgaagcgggggcggtgttcgccgagatcggcccgcgcatggccgagttgagcggttcccggctggccgcgcagcaacagatggaaggcctcctggcgccgcaccggcccaaggagcccgcgtggttcctggccaccgtcggcgtctcgcccgaccaccagggcaagggtctgggcagcgccgtcgtgctccccggagtggaggcggccgagcgcgccggggtgcccgccttcctggagacctccgcgccccgcaacctccccttctacgagcggctcggcttcaccgtcaccgccgacgtcgaggtgcccgaaggaccgcgcacctggtgcatgacccgcaagcccggtgcctga

SEQ ID NO: 1573 - DNA, 2175 bp, Artificial Sequence
  Synthetic Polynucleotides
atggccttaccagtgaccgccttgctcctgccgctggccttgctgctccacgccgccaggccggacatcgtgatgacccagagccagaagagcatgagcaccagcgtgggcgacagagtgagcatcacctgcaaggccagccaggacgtgatcaccggcgtggcctggtaccagcagaagcccggccagagccccaagctgctgatctacagcgccagctacagatacaccggcgtgcccgacagattcaccggcagcggcagcggcaccgacttcaccttcaccatcagcaacgtgcaggccgaggacctggccgtgtactactgccagcagcactacagcacccccctgaccttcggcgccggcaccaagctggagctgaagggcggaggcggaagtggaggcggaggatctggcggcggaggctctcaggtgcagctgcagcagcccggcgccgagctggtgagacccggcgccagcgtgaagctgagctgcaaggccagcggctacagcttcaccacctactggatgaactgggtgaagcagagacccggccagggcctggagtggatcggcatgatccaccccagcgacagcgagaccagactgaaccagaagttcaaggacaaggccaccctgaccgtggacaagagcagcagcaccgcctacatgcagctgagcagccccaccagcgaggacagcgccgtgtactactgcgccagaagcaccatgatcgccaccagagccatggactactggggccagggcaccagcgtgaccgtgagcagcacgcgtgagcagaaactgatctcggaagaggatctggcgaagcccaccacgacgccagcgccgcgaccaccaacaccggcgcccaccatcgcgtcgcagcccctgtccctgcgcccagaggcgtgccggccagcggcggggggcgcagtgcacacgagggggctggacttcgcctgtgacatctacatctgggcgcccttggccgggacttgtggggtccttctcctgtcactggttatcaccctttactgcaaacggggcagaaagaaactcctgtatatattcaaacaaccatttatgagaccagtacaaactactcaagaggaagatggctgtagctgccgatttccagaagaagaagaaggaggatgtgaactgagagtgaagttcagcaggagcgcagacgcccccgcgtaccagcagggccagaaccagctctataacgagctgaatctaggacgaagagaggagtacgatgttttggacaagagacgtggccgggaccctgagatggggggaaagccgagaaggaagaaccctcaggaaggcctgtacaatgaactgcagaaagataagatggcggaggcctacagtgagattgggatgaaaggcgagcgccggaggggcaaggggcacgatggcctttaccagggtctcagtacagccaccaaggacacctacgacgcccttcacatgcaggccctgccccctcgctctagtggctccggcgagggcagaggaagtctactaacctgcggagatgtggaagaaaatcctggcccacatatgaccgagtacaagcccacggtgcgcctcgccacccgcgacgacgtccccagggccgtacgcaccctcgccgccgcgttcgccgactaccccgccacgcgccacaccgtcgatccggaccgccacatcgagcgggtcaccgagctgcaagaactcttcctcacgcgcgtcgggctcgacatcggcaaggtgtgggtcgcggacgacggcgccgcggtggcggtctggaccacgccggagagcgtcgaagcgggggcggtgttcgccgagatcggcccgcgcatggccgagttgagcggttcccggctggccgcgcagcaacagatggaaggcctcctggcgccgcaccggcccaaggagcccgcgtggttcctggccaccgtcggcgtctcgcccgaccaccagggcaagggtctgggcagcgccgtcgtgctccccggagtggaggcggccgagcgcgccggggtgcccgccttcctggagacctccgcgccccgcaacctccccttctacgagcggctcggcttcaccgtcaccgccgacgtcgaggtgcccgaaggaccgcgcacctggtgcatgacccgcaagcccggtgcctga

SEQ ID NO: 1574 - DNA, 2181 bp, Artificial Sequence
  Synthetic Polynucleotides
atggccttaccagtgaccgccttgctcctgccgctggccttgctgctccacgccgccaggccggacatccagatgacacagagccctagcagcctgtctgccagcgtgggagacagagtgaccatcacatgcaaggccagccaggatgtgtctacagccgtggcctggtatcagcagaagcctggaaaggcccctaagctgctgatctacagcgccagctacagatacaccggcgtgcccgatagattcacaggctctggcagcggcaccgacttcaccctgacaatatctagcctccagcctgaggacttcgccacctactactgccagcagcactacagcacccctccatacacatttggcggaggcaccaaggtggaaatcaagagaggcggaggcggaagtggaggcggaggatctggcggcggaggctctcaagttcaactggttcagagcggagccgaagtgaagaaacctggggcctctgtgaaggtgtcctgcaaagccagcggctacgcctttagcagctcctggatgaactgggtccgacaggctcctggacagggcctcgaatggatcggcagaatctatcctggcgacggcgacaccaagtacaacggcaagttcaagggcaaagccacactgaccgccgacaagagcacaagcaccgcctacatggaactgagcagcctgagaagcgaggacaccgccgtgtactactgtgccagatccaccatgatcgccaccggcgctatggattattggggccagggaaccctggtcaccgtgtcatctacgcgtgagcagaaactgatctcggaagaggatctggcgaagcccaccacgacgccagcgccgcgaccaccaacaccggcgcccaccatcgcgtcgcagcccctgtccctgcgcccagaggcgtgccggccagcggcggggggcgcagtgcacacgagggggctggacttcgcctgtgacatctacatctgggcgcccttggccgggacttgtggggtccttctcctgtcactggttatcaccctttactgcaaacggggcagaaagaaactcctgtatatattcaaacaaccatttatgagaccagtacaaactactcaagaggaagatggctgtagctgccgatttccagaagaagaagaaggaggatgtgaactgagagtgaagttcagcaggagcgcagacgcccccgcgtaccagcagggccagaaccagctctataacgagctgaatctaggacgaagagaggagtacgatgttttggacaagagacgtggccgggaccctgagatggggggaaagccgagaaggaagaaccctcaggaaggcctgtacaatgaactgcagaaagataagatggcggaggcctacagtgagattgggatgaaaggcgagcgccggaggggcaaggggcacgatggcctttaccagggtctcagtacagccaccaaggacacctacgacgcccttcacatgcaggccctgccccctcgctctagtggctccggcgagggcagaggaagtctactaacctgcggagatgtggaagaaaatcctggcccacatatgaccgagtacaagcccacggtgcgcctcgccacccgcgacgacgtccccagggccgtacgcaccctcgccgccgcgttcgccgactaccccgccacgcgccacaccgtcgatccggaccgccacatcgagcgggtcaccgagctgcaagaactcttcctcacgcgcgtcgggctcgacatcggcaaggtgtgggtcgcggacgacggcgccgcggtggcggtctggaccacgccggagagcgtcgaagcgggggcggtgttcgccgagatcggcccgcgcatggccgagttgagcggttcccggctggccgcgcagcaacagatggaaggcctcctggcgccgcaccggcccaaggagcccgcgtggttcctggccaccgtcggcgtctcgcccgaccaccagggcaagggtctgggcagcgccgtcgtgctccccggagtggaggcggccgagcgcgccggggtgcccgccttcctggagacctccgcgccccgcaacctccccttctacgagcggctcggcttcaccgtcaccgccgacgtcgaggtgcccgaaggaccgcgcacctggtgcatgacccgcaagcccggtgcctga

SEQ ID NO: 1575 - DNA, 2184 bp, Artificial Sequence
  Synthetic Polynucleotides
atggccttaccagtgaccgccttgctcctgccgctggccttgctgctccacgccgccaggccggacgtggtcatgacacagacacctctgagcctgagcgtgacacctggacagcctgccagcatcagctgtagaagcagccagagcctggtgcacaacaacggcaacacctacctgcactggtatctccagaagcctggacagagccctcagctgctgatctacaaggtgtccaacagattcagcggcgtgcccgacagattttctggcagcggctctggcaccgacttcaccctgaagattagcagagtggaagccgaggacgtgggcgtgtacttctgtagccagagcacacacgtgccaccttacacctttggcggaggcaccaaggtggaaatcaaaggcggaggcggaagtggaggcggaggatctggcggcggaggctctgaagtgcagctggttgagtctggtggcggactggttcaacctggcggaagcctgagactgtcttgtgccgccagcggcttcaccttcagcgactactatatggcctgggtccgacaggcccctggcaaaggacttgaatgggtcgccgagatcaactacgacggcagcagcacctactacgtggacagcgtgaagggcagattcaccatcagccgggacaacgccaagaacagcctgtacctccagatgaactccctgagagccgaggataccgccgtgtactactgcgccagagacagaggcttctacttcgactattggggccagggcaccaccgtgacagtctcttctacgcgtgagcagaaactgatctcggaagaggatctggcgaagcccaccacgacgccagcgccgcgaccaccaacaccggcgcccaccatcgcgtcgcagcccctgtccctgcgcccagaggcgtgccggccagcggcggggggcgcagtgcacacgagggggctggacttcgcctgtgacatctacatctgggcgcccttggccgggacttgtggggtccttctcctgtcactggttatcaccctttactgcaaacggggcagaaagaaactcctgtatatattcaaacaaccatttatgagaccagtacaaactactcaagaggaagatggctgtagctgccgatttccagaagaagaagaaggaggatgtgaactgagagtgaagttcagcaggagcgcagacgcccccgcgtaccagcagggccagaaccagctctataacgagctgaatctaggacgaagagaggagtacgatgttttggacaagagacgtggccgggaccctgagatggggggaaagccgagaaggaagaaccctcaggaaggcctgtacaatgaactgcagaaagataagatggcggaggcctacagtgagattgggatgaaaggcgagcgccggaggggcaaggggcacgatggcctttaccagggtctcagtacagccaccaaggacacctacgacgcccttcacatgcaggccctgccccctcgctctagtggctccggcgagggcagaggaagtctactaacctgcggagatgtggaagaaaatcctggcccacatatgaccgagtacaagcccacggtgcgcctcgccacccgcgacgacgtccccagggccgtacgcaccctcgccgccgcgttcgccgactaccccgccacgcgccacaccgtcgatccggaccgccacatcgagcgggtcaccgagctgcaagaactcttcctcacgcgcgtcgggctcgacatcggcaaggtgtgggtcgcggacgacggcgccgcggtggcggtctggaccacgccggagagcgtcgaagcgggggcggtgttcgccgagatcggcccgcgcatggccgagttgagcggttcccggctggccgcgcagcaacagatggaaggcctcctggcgccgcaccggcccaaggagcccgcgtggttcctggccaccgtcggcgtctcgcccgaccaccagggcaagggtctgggcagcgccgtcgtgctccccggagtggaggcggccgagcgcgccggggtgcccgccttcctggagacctccgcgccccgcaacctccccttctacgagcggctcggcttcaccgtcaccgccgacgtcgaggtgcccgaaggaccgcgcacctggtgcatgacccgcaagcccggtgcctga

SEQ ID NO: 1576 - DNA, 2184 bp, Artificial Sequence
  Synthetic Polynucleotides
atggccttaccagtgaccgccttgctcctgccgctggccttgctgctccacgccgccaggccggacgtggtcatgacacagacacctctgagcctgagcgtgacacctggacagcctgccagcatctcctgtagaagcagccagagcctggtgcacagcaacggcctgacatacctgcactggtatctccagaagcctggacagagccctcagctcctgatctacaaggtgtccaacagattcagcggcgtgcccgacagattttctggcagcggctctggcaccgacttcaccctgaagatcagcagagtggaagccgaggacgtgggcgtgtacttctgtagccagagcacacacgtgccacctttcacctttggcggaggcaccaaggtggaaatcaaaggcggaggcggaagtggaggcggaggatctggcggcggaggctctgaagtgcagctcgttgagtctggtggcggactggttcaacctggcggaagcctgagactgtcttgtgccgccagcggcttcaccttcagcgactactatatggcctgggtccgacaggcccctggcaaaggacttgaatgggtcgccagcatcaactacgacggcgagagcacctactacgtggacagcgtgaagggcagattcaccatcagccgggacaacgccaagaacagcctgtacctccagatgaactccctgagagccgaggataccgccgtgtactactgcgccagagacagaggctactacttcgactattggggccagggcaccaccgtgacagtctcttctacgcgtgagcagaaactgatctcggaagaggatctggcgaagcccaccacgacgccagcgccgcgaccaccaacaccggcgcccaccatcgcgtcgcagcccctgtccctgcgcccagaggcgtgccggccagcggcggggggcgcagtgcacacgagggggctggacttcgcctgtgacatctacatctgggcgcccttggccgggacttgtggggtccttctcctgtcactggttatcaccctttactgcaaacggggcagaaagaaactcctgtatatattcaaacaaccatttatgagaccagtacaaactactcaagaggaagatggctgtagctgccgatttccagaagaagaagaaggaggatgtgaactgagagtgaagttcagcaggagcgcagacgcccccgcgtaccagcagggccagaaccagctctataacgagctgaatctaggacgaagagaggagtacgatgttttggacaagagacgtggccgggaccctgagatggggggaaagccgagaaggaagaaccctcaggaaggcctgtacaatgaactgcagaaagataagatggcggaggcctacagtgagattgggatgaaaggcgagcgccggaggggcaaggggcacgatggcctttaccagggtctcagtacagccaccaaggacacctacgacgcccttcacatgcaggccctgccccctcgctctagtggctccggcgagggcagaggaagtctactaacctgcggagatgtggaagaaaatcctggcccacatatgaccgagtacaagcccacggtgcgcctcgccacccgcgacgacgtccccagggccgtacgcaccctcgccgccgcgttcgccgactaccccgccacgcgccacaccgtcgatccggaccgccacatcgagcgggtcaccgagctgcaagaactcttcctcacgcgcgtcgggctcgacatcggcaaggtgtgggtcgcggacgacggcgccgcggtggcggtctggaccacgccggagagcgtcgaagcgggggcggtgttcgccgagatcggcccgcgcatggccgagttgagcggttcccggctggccgcgcagcaacagatggaaggcctcctggcgccgcaccggcccaaggagcccgcgtggttcctggccaccgtcggcgtctcgcccgaccaccagggcaagggtctgggcagcgccgtcgtgctccccggagtggaggcggccgagcgcgccggggtgcccgccttcctggagacctccgcgccccgcaacctccccttctacgagcggctcggcttcaccgtcaccgccgacgtcgaggtgcccgaaggaccgcgcacctggtgcatgacccgcaagcccggtgcctga

SEQ ID NO: 1577 - DNA, 2184 bp, Artificial Sequence
  Synthetic Polynucleotides
atggccttaccagtgaccgccttgctcctgccgctggccttgctgctccacgccgccaggccggacgtggtcatgacacagagccctctgagcctgcctgtgacacctggcgaacctgccagcatctcctgtagaagcagccagagcctggtgcacagcaacggcaatacctacctgcactggtatctccagaagcctggacagagcccacagctcctgatctacaaggtgtccaaccggttcagcggcgtgcccgatagattttctggcagcggctctggcaccgacttcaccctgaagatcagcagagtggaagccgaggacgtgggcgtgtacttctgtagccagagcacacacgtgccacctttcacctttggcggaggcaccaaggtggaaatcaaaggcggaggcggaagtggaggcggaggatctggcggcggaggctctgaagtgcagctcgttgagtctggtggcggactggttcaacctggcggaagcctgagactgtcttgtgccgccagcggcttcaccttcagcgactactatatggcctgggtccgacaggcccctggcaaaggacttgaatgggtcgccgacatcaactacgatggcggcagcacctactacctggacagcctgaagtcccggttcaccatctccagagacaacgccaagaacagcctgtacctccagatgaactccctgagagccgaggataccgccgtgtactactgcgccagagacagaggctactacttcgactattggggccagggcaccctggtcacagtctcttctacgcgtgagcagaaactgatctcggaagaggatctggcgaagcccaccacgacgccagcgccgcgaccaccaacaccggcgcccaccatcgcgtcgcagcccctgtccctgcgcccagaggcgtgccggccagcggcggggggcgcagtgcacacgagggggctggacttcgcctgtgacatctacatctgggcgcccttggccgggacttgtggggtccttctcctgtcactggttatcaccctttactgcaaacggggcagaaagaaactcctgtatatattcaaacaaccatttatgagaccagtacaaactactcaagaggaagatggctgtagctgccgatttccagaagaagaagaaggaggatgtgaactgagagtgaagttcagcaggagcgcagacgcccccgcgtaccagcagggccagaaccagctctataacgagctgaatctaggacgaagagaggagtacgatgttttggacaagagacgtggccgggaccctgagatggggggaaagccgagaaggaagaaccctcaggaaggcctgtacaatgaactgcagaaagataagatggcggaggcctacagtgagattgggatgaaaggcgagcgccggaggggcaaggggcacgatggcctttaccagggtctcagtacagccaccaaggacacctacgacgcccttcacatgcaggccctgccccctcgctctagtggctccggcgagggcagaggaagtctactaacctgcggagatgtggaagaaaatcctggcccacatatgaccgagtacaagcccacggtgcgcctcgccacccgcgacgacgtccccagggccgtacgcaccctcgccgccgcgttcgccgactaccccgccacgcgccacaccgtcgatccggaccgccacatcgagcgggtcaccgagctgcaagaactcttcctcacgcgcgtcgggctcgacatcggcaaggtgtgggtcgcggacgacggcgccgcggtggcggtctggaccacgccggagagcgtcgaagcgggggcggtgttcgccgagatcggcccgcgcatggccgagttgagcggttcccggctggccgcgcagcaacagatggaaggcctcctggcgccgcaccggcccaaggagcccgcgtggttcctggccaccgtcggcgtctcgcccgaccaccagggcaagggtctgggcagcgccgtcgtgctccccggagtggaggcggccgagcgcgccggggtgcccgccttcctggagacctccgcgccccgcaacctccccttctacgagcggctcggcttcaccgtcaccgccgacgtcgaggtgcccgaaggaccgcgcacctggtgcatgacccgcaagcccggtgcctga

SEQ ID NO: 1578 - DNA, 2178 bp, Artificial Sequence
  Synthetic Polynucleotides
atggccttaccagtgaccgccttgctcctgccgctggccttgctgctccacgccgccaggccggacatccagatgacccagagcagcagctacctgagcgtgtcccttggcggcagagtgaccatcacctgtaaagccagcgaccacatcaacaactggctggcctggtatcagcagaagcctggcaacgcccctagactgctgattagcggagccacctctctggaaacaggcgtgccaagcagattttccggcagcggctctggcaaggactacaccctgagcatcaccagcctccagaccgaggatgtggctacctactactgccagcagtattggagcaccccttggacctttggcggaggcaccaagctggaaatcaaaggcggaggcggaagtggaggcggaggatctggcggcggaggctctcaggttcagctccagcagtctggcgctgagcttgctagacctggcgcttctgtgaagctgagctgcaaggccagcggctacaccttcaccagctactggatgcagtgggtcaagcagaggccaggccaaggactggaatggatcggagccatctatcccggcgacggcgataccagatacacccagaagttcaagggcaaagccacactgaccgccgacaagagcagctccacagcctacatgcaactgagcagcctggcttccgaggacagcgccgtgtactattgtgccagaggcaaggtgtactacggcagcaaccctttcgcctattggggccagggaaccctggttacagtgtctgctacgcgtgagcagaaactgatctcggaagaggatctggcgaagcccaccacgacgccagcgccgcgaccaccaacaccggcgcccaccatcgcgtcgcagcccctgtccctgcgcccagaggcgtgccggccagcggcggggggcgcagtgcacacgagggggctggacttcgcctgtgacatctacatctgggcgcccttggccgggacttgtggggtccttctcctgtcactggttatcaccctttactgcaaacggggcagaaagaaactcctgtatatattcaaacaaccatttatgagaccagtacaaactactcaagaggaagatggctgtagctgccgatttccagaagaagaagaaggaggatgtgaactgagagtgaagttcagcaggagcgcagacgcccccgcgtaccagcagggccagaaccagctctataacgagctgaatctaggacgaagagaggagtacgatgttttggacaagagacgtggccgggaccctgagatggggggaaagccgagaaggaagaaccctcaggaaggcctgtacaatgaactgcagaaagataagatggcggaggcctacagtgagattgggatgaaaggcgagcgccggaggggcaaggggcacgatggcctttaccagggtctcagtacagccaccaaggacacctacgacgcccttcacatgcaggccctgccccctcgctctagtggctccggcgagggcagaggaagtctactaacctgcggagatgtggaagaaaatcctggcccacatatgaccgagtacaagcccacggtgcgcctcgccacccgcgacgacgtccccagggccgtacgcaccctcgccgccgcgttcgccgactaccccgccacgcgccacaccgtcgatccggaccgccacatcgagcgggtcaccgagctgcaagaactcttcctcacgcgcgtcgggctcgacatcggcaaggtgtgggtcgcggacgacggcgccgcggtggcggtctggaccacgccggagagcgtcgaagcgggggcggtgttcgccgagatcggcccgcgcatggccgagttgagcggttcccggctggccgcgcagcaacagatggaaggcctcctggcgccgcaccggcccaaggagcccgcgtggttcctggccaccgtcggcgtctcgcccgaccaccagggcaagggtctgggcagcgccgtcgtgctccccggagtggaggcggccgagcgcgccggggtgcccgccttcctggagacctccgcgccccgcaacctccccttctacgagcggctcggcttcaccgtcaccgccgacgtcgaggtgcccgaaggaccgcgcacctggtgcatgacccgcaagcccggtgcctga

SEQ ID NO: 1579 - DNA, 2178 bp, Artificial Sequence
  Synthetic Polynucleotides
atggccttaccagtgaccgccttgctcctgccgctggccttgctgctccacgccgccaggccggacatcgtgatgacccagagccacaagttcatgagcaccagcgtgggcgacagagtgtccatcacctgtaaagccagccaggacgtgtcaacagccgtggcctggtatcagcagaagcctggacagagccccaagctgctgatctacagcgccagctacagatacaccggcgtgcccgatagattcacaggctctggcagcggcaccgacttcacctttacaatcagcagcgtgcaggccgaggacctggccgtgtattattgccagcagcactacagcacccctccatacacatttggcggaggcaccaagctggaaatcaaaggcggaggcggaagtggaggcggaggatctggcggcggaggctctcaggttcagctccagcagtctggccctgagcttgtgaaacctggcgcttccgtgaagattagctgcaaggccagcggctacgccttcagcagctcctggatgaactgggtcaagcagaggccaggccagggcctcgaatggatcggcagaatctatcctggcgacggcgacaccaagtacaacggcaagttcaagggcaaagccacactgaccgccgacaagtctagcagcaccgcctatatgcagctcagcagcctgacctctgtggacagcgccgtgtacttctgtgcccggtctaccatgattgccaccggcgctatggattactggggccagggaacaagcgtgaccgtgtcatctacgcgtgagcagaaactgatctcggaagaggatctggcgaagcccaccacgacgccagcgccgcgaccaccaacaccggcgcccaccatcgcgtcgcagcccctgtccctgcgcccagaggcgtgccggccagcggcggggggcgcagtgcacacgagggggctggacttcgcctgtgacatctacatctgggcgcccttggccgggacttgtggggtccttctcctgtcactggttatcaccctttactgcaaacggggcagaaagaaactcctgtatatattcaaacaaccatttatgagaccagtacaaactactcaagaggaagatggctgtagctgccgatttccagaagaagaagaaggaggatgtgaactgagagtgaagttcagcaggagcgcagacgcccccgcgtaccagcagggccagaaccagctctataacgagctgaatctaggacgaagagaggagtacgatgttttggacaagagacgtggccgggaccctgagatggggggaaagccgagaaggaagaaccctcaggaaggcctgtacaatgaactgcagaaagataagatggcggaggcctacagtgagattgggatgaaaggcgagcgccggaggggcaaggggcacgatggcctttaccagggtctcagtacagccaccaaggacacctacgacgcccttcacatgcaggccctgccccctcgctctagtggctccggcgagggcagaggaagtctactaacctgcggagatgtggaagaaaatcctggcccacatatgaccgagtacaagcccacggtgcgcctcgccacccgcgacgacgtccccagggccgtacgcaccctcgccgccgcgttcgccgactaccccgccacgcgccacaccgtcgatccggaccgccacatcgagcgggtcaccgagctgcaagaactcttcctcacgcgcgtcgggctcgacatcggcaaggtgtgggtcgcggacgacggcgccgcggtggcggtctggaccacgccggagagcgtcgaagcgggggcggtgttcgccgagatcggcccgcgcatggccgagttgagcggttcccggctggccgcgcagcaacagatggaaggcctcctggcgccgcaccggcccaaggagcccgcgtggttcctggccaccgtcggcgtctcgcccgaccaccagggcaagggtctgggcagcgccgtcgtgctccccggagtggaggcggccgagcgcgccggggtgcccgccttcctggagacctccgcgccccgcaacctccccttctacgagcggctcggcttcaccgtcaccgccgacgtcgaggtgcccgaaggaccgcgcacctggtgcatgacccgcaagcccggtgcctga

SEQ ID NO: 1580 - DNA, 2193 bp, Artificial Sequence
  Synthetic Polynucleotides
atggccttaccagtgaccgccttgctcctgccgctggccttgctgctccacgccgccaggccgcagagcgtgctgacacagcctccatccgtgtctggcgctccaggccagagagtgaccatctcctgtaccggcagcggcagcaacatcggagccccctacgacgtgtcctggtatcagcaactgcctggcaccgcccccaagctgctgatctaccacaacaacaagcggcccagcggcgtgcccgatagattcagcggctctaagagcggcaccagcgccagcctggctatcactggactccaggccgaggacgaggccgactactactgtgccacagtggaagccggcctgagcggctctgtgtttggcggcggaacaaagctgaccgtgctgggagctggcggaggcggaagtggaggcggaggatctggcggcggaggctctcaggtgcaactggtgcagagcggagccgaagtgaagaaacctggggccagcgtgaaggtgtcctgcaaggtgtccggctacaccctgaccgagctgagcattcactgggtgcgccaggcccctggcaagggactggaatggatgggcggcttcgaccccgaagagaacgagatcgtgtacgcccagcggttccagggcagagtgacaatgaccgaggacaccagcaccgacaccgcctacatggaactgagcagcctgcggagcgaggataccgccgtgtactactgcgccatcgtgggcagcttcagccctctgacactgggcctgtggggccagggaactatggtcaccgtgtccagcacgcgtgagcagaaactgatctcggaagaggatctggcgaagcccaccacgacgccagcgccgcgaccaccaacaccggcgcccaccatcgcgtcgcagcccctgtccctgcgcccagaggcgtgccggccagcggcggggggcgcagtgcacacgagggggctggacttcgcctgtgacatctacatctgggcgcccttggccgggacttgtggggtccttctcctgtcactggttatcaccctttactgcaaacggggcagaaagaaactcctgtatatattcaaacaaccatttatgagaccagtacaaactactcaagaggaagatggctgtagctgccgatttccagaagaagaagaaggaggatgtgaactgagagtgaagttcagcaggagcgcagacgcccccgcgtaccagcagggccagaaccagctctataacgagctgaatctaggacgaagagaggagtacgatgttttggacaagagacgtggccgggaccctgagatggggggaaagccgagaaggaagaaccctcaggaaggcctgtacaatgaactgcagaaagataagatggcggaggcctacagtgagattgggatgaaaggcgagcgccggaggggcaaggggcacgatggcctttaccagggtctcagtacagccaccaaggacacctacgacgcccttcacatgcaggccctgccccctcgctctagtggctccggcgagggcagaggaagtctactaacctgcggagatgtggaagaaaatcctggcccacatatgaccgagtacaagcccacggtgcgcctcgccacccgcgacgacgtccccagggccgtacgcaccctcgccgccgcgttcgccgactaccccgccacgcgccacaccgtcgatccggaccgccacatcgagcgggtcaccgagctgcaagaactcttcctcacgcgcgtcgggctcgacatcggcaaggtgtgggtcgcggacgacggcgccgcggtggcggtctggaccacgccggagagcgtcgaagcgggggcggtgttcgccgagatcggcccgcgcatggccgagttgagcggttcccggctggccgcgcagcaacagatggaaggcctcctggcgccgcaccggcccaaggagcccgcgtggttcctggccaccgtcggcgtctcgcccgaccaccagggcaagggtctgggcagcgccgtcgtgctccccggagtggaggcggccgagcgcgccggggtgcccgccttcctggagacctccgcgccccgcaacctccccttctacgagcggctcggcttcaccgtcaccgccgacgtcgaggtgcccgaaggaccgcgcacctggtgcatgacccgcaagcccggtgcctga

SEQ ID NO: 1581 - DNA, 2193 bp, Artificial Sequence
  Synthetic Polynucleotides
atggccttaccagtgaccgccttgctcctgccgctggccttgctgctccacgccgccaggccgcagagcgtgctgacacagcctccatccgtgtctggcgctccaggccagagagtgaccatctcctgtaccggcagcggcagcaacatcggagccccctacgacgtgtcctggtatcagcaactgcctggcaccgcccccaagctgctgatctaccacaacaacaagcggcccagcggcgtgcccgatagattcagcggctctaagagcggcaccagcgccagcctggctatcactggactccaggccgaggacgaggccgactactactgccagagctacgacagcagcagcatcagcaccatcttcggcggaggcaccaagctgacagtgctgggagctggcggaggcggaagtggaggcggaggatctggcggcggaggctctcaggtgcaactggtgcagagcggagccgaagtgaagaaacctggggccagcgtgaaggtgtcctgcaaggtgtccggctacaccctgaccgagctgagcattcactgggtgcgccaggcccctggcaagggactggaatggatgggcggcttcgaccccgaagagaacgagatcgtgtacgcccagcggttccagggcagagtgacaatgaccgaggacaccagcaccgacaccgcctacatggaactgagcagcctgcggagcgaggataccgccgtgtactactgtgccatcgtgggcagcttcagcggaatcgcctacagaccttggggccagggcacaatggtcaccgtgtctagcacgcgtgagcagaaactgatctcggaagaggatctggcgaagcccaccacgacgccagcgccgcgaccaccaacaccggcgcccaccatcgcgtcgcagcccctgtccctgcgcccagaggcgtgccggccagcggcggggggcgcagtgcacacgagggggctggacttcgcctgtgacatctacatctgggcgcccttggccgggacttgtggggtccttctcctgtcactggttatcaccctttactgcaaacggggcagaaagaaactcctgtatatattcaaacaaccatttatgagaccagtacaaactactcaagaggaagatggctgtagctgccgatttccagaagaagaagaaggaggatgtgaactgagagtgaagttcagcaggagcgcagacgcccccgcgtaccagcagggccagaaccagctctataacgagctgaatctaggacgaagagaggagtacgatgttttggacaagagacgtggccgggaccctgagatggggggaaagccgagaaggaagaaccctcaggaaggcctgtacaatgaactgcagaaagataagatggcggaggcctacagtgagattgggatgaaaggcgagcgccggaggggcaaggggcacgatggcctttaccagggtctcagtacagccaccaaggacacctacgacgcccttcacatgcaggccctgccccctcgctctagtggctccggcgagggcagaggaagtctactaacctgcggagatgtggaagaaaatcctggcccacatatgaccgagtacaagcccacggtgcgcctcgccacccgcgacgacgtccccagggccgtacgcaccctcgccgccgcgttcgccgactaccccgccacgcgccacaccgtcgatccggaccgccacatcgagcgggtcaccgagctgcaagaactcttcctcacgcgcgtcgggctcgacatcggcaaggtgtgggtcgcggacgacggcgccgcggtggcggtctggaccacgccggagagcgtcgaagcgggggcggtgttcgccgagatcggcccgcgcatggccgagttgagcggttcccggctggccgcgcagcaacagatggaaggcctcctggcgccgcaccggcccaaggagcccgcgtggttcctggccaccgtcggcgtctcgcccgaccaccagggcaagggtctgggcagcgccgtcgtgctccccggagtggaggcggccgagcgcgccggggtgcccgccttcctggagacctccgcgccccgcaacctccccttctacgagcggctcggcttcaccgtcaccgccgacgtcgaggtgcccgaaggaccgcgcacctggtgcatgacccgcaagcccggtgcctga

SEQ ID NO: 1582 - DNA, 2226 bp, Artificial Sequence
  Synthetic Polynucleotides
atggccttaccagtgaccgccttgctcctgccgctggccttgctgctccacgccgccaggccggacgaattcgaggtgcagctggtagaatccggcgggggacttgtacaggctggtggtagtctgagactgagctgtgtggcctccggcatcagcagcagcaagcggaacatgggatggtataggcaagcccctggtaagcagagggaatccgtggctacaatcagcagcggcggcaacaaggactacaccgacgccgtgaaggacaggttcaccatctccagggacaccaccaagaacaccgtgtacctgcagatgaactccctcaagcccgaggacaccgccgtgtactactgcaagatcgaggccggcacaggctgggccaccagaagaggctacacatactgggggcagggaacactggtgaccgtgagctccctcgagggcggaggcggaagtggaggcggaggatctggcggcggaggctctttcgaagttcaactggtggaatccggtggaggactggtgcaagcgggcggctcactgcgccttagctgtgctgccagcggcagtatcttcagcggcaatgtaatgggttggtacaggcgacaagccccaggcaaggagcgagagtgggtagccgcgattgcaagtgggggcagcatctactacagagattctgtgaaaggccgcttcactattagtcgggacaacgcaaaaaacacggtgtatctccaaatgaacagcttgaagccagaggacactgctgtctactattgtaacagtcatcccccaactctcccctattgggggctgggcactcaggtcaccgtgagttccacgcgtgagcagaaactgatctcggaagaggatctggcgaagcccaccacgacgccagcgccgcgaccaccaacaccggcgcccaccatcgcgtcgcagcccctgtccctgcgcccagaggcgtgccggccagcggcggggggcgcagtgcacacgagggggctggacttcgcctgtgacatctacatctgggcgcccttggccgggacttgtggggtccttctcctgtcactggttatcaccctttactgcaaacggggcagaaagaaactcctgtatatattcaaacaaccatttatgagaccagtacaaactactcaagaggaagatggctgtagctgccgatttccagaagaagaagaaggaggatgtgaactgagagtgaagttcagcaggagcgcagacgcccccgcgtaccagcagggccagaaccagctctataacgagctgaatctaggacgaagagaggagtacgatgttttggacaagagacgtggccgggaccctgagatggggggaaagccgagaaggaagaaccctcaggaaggcctgtacaatgaactgcagaaagataagatggcggaggcctacagtgagattgggatgaaaggcgagcgccggaggggcaaggggcacgatggcctttaccagggtctcagtacagccaccaaggacacctacgacgcccttcacatgcaggccctgccccctcgctctagtggctccggcgagggcagaggaagtctactaacctgcggagatgtggaagaaaatcctggcccacatatgaccgagtacaagcccacggtgcgcctcgccacccgcgacgacgtccccagggccgtacgcaccctcgccgccgcgttcgccgactaccccgccacgcgccacaccgtcgatccggaccgccacatcgagcgggtcaccgagctgcaagaactcttcctcacgcgcgtcgggctcgacatcggcaaggtgtgggtcgcggacgacggcgccgcggtggcggtctggaccacgccggagagcgtcgaagcgggggcggtgttcgccgagatcggcccgcgcatggccgagttgagcggttcccggctggccgcgcagcaacagatggaaggcctcctggcgccgcaccggcccaaggagcccgcgtggttcctggccaccgtcggcgtctcgcccgaccaccagggcaagggtctgggcagcgccgtcgtgctccccggagtggaggcggccgagcgcgccggggtgcccgccttcctggagacctccgcgccccgcaacctccccttctacgagcggctcggcttcaccgtcaccgccgacgtcgaggtgcccgaaggaccgcgcacctggtgcatgacccgcaagcccggtgcctga

SEQ ID NO: 1583 - DNA, 2328 bp, Artificial Sequence
  Synthetic Polynucleotides
atggccttaccagtgaccgccttgctcctgccgctggccttgctgctccacgccgccaggccggacgaattcgaggtgcaactggtggaaagcggcggaggactggtgcaggctggcgatagcctgagactgagctgtgccgcctccggcagagccttcagcagatatgccatgggctggttcagacaggcccctggcaaagaacgcgagttcgtggccgccatcggctggggacctagcaagaccaactacgccgacagcgtgaagggccggttcaccatcagccgggacaacgccaagaacaccgtgtacctgcagatgaacaccctgaagcccgaggacaccgccgtgtactcttgcgccgccaagttcgtgaacaccgacagcacctggtcccgcagcgagatgtacacctattggggccagggcaccctcgtgaccgtgtctagtctcgagggaggaggcggctccgggggaggcggaagtggaggcggaggatctgggtctggaggaagcggatctggaggctcagggtcagggggctcaggcagtggaggctctttcgaagtgcaactggtggaatctggagggggaagcgtgcaggcaggcggatctctgagactgtcctgcaccacatctggcagagccctgaatatgtacgtgatgggatggtttcggcaggctcccggcaacgagcgggaatttgtggccgctacaagcagcagcggcggcagcacaagctaccccgattctgtgaagggcagattcacaatctcccgcgataatgccaagaatactgtgtacctgcagatgaatagtctgaagcctgaagatacagccgcctacagatgtgccgccagcccctacgtgtccacccccaccatgaacatcctggaagagtacagatactggggcctgggaacacaagtgacagtgtccagcacgcgtgagcagaaactgatctcggaagaggatctggcgaagcccaccacgacgccagcgccgcgaccaccaacaccggcgcccaccatcgcgtcgcagcccctgtccctgcgcccagaggcgtgccggccagcggcggggggcgcagtgcacacgagggggctggacttcgcctgtgacatctacatctgggcgcccttggccgggacttgtggggtccttctcctgtcactggttatcaccctttactgcaaacggggcagaaagaaactcctgtatatattcaaacaaccatttatgagaccagtacaaactactcaagaggaagatggctgtagctgccgatttccagaagaagaagaaggaggatgtgaactgagagtgaagttcagcaggagcgcagacgcccccgcgtaccagcagggccagaaccagctctataacgagctgaatctaggacgaagagaggagtacgatgttttggacaagagacgtggccgggaccctgagatggggggaaagccgagaaggaagaaccctcaggaaggcctgtacaatgaactgcagaaagataagatggcggaggcctacagtgagattgggatgaaaggcgagcgccggaggggcaaggggcacgatggcctttaccagggtctcagtacagccaccaaggacacctacgacgcccttcacatgcaggccctgccccctcgctctagtggctccggcgagggcagaggaagtctactaacctgcggagatgtggaagaaaatcctggcccacatatgaccgagtacaagcccacggtgcgcctcgccacccgcgacgacgtccccagggccgtacgcaccctcgccgccgcgttcgccgactaccccgccacgcgccacaccgtcgatccggaccgccacatcgagcgggtcaccgagctgcaagaactcttcctcacgcgcgtcgggctcgacatcggcaaggtgtgggtcgcggacgacggcgccgcggtggcggtctggaccacgccggagagcgtcgaagcgggggcggtgttcgccgagatcggcccgcgcatggccgagttgagcggttcccggctggccgcgcagcaacagatggaaggcctcctggcgccgcaccggcccaaggagcccgcgtggttcctggccaccgtcggcgtctcgcccgaccaccagggcaagggtctgggcagcgccgtcgtgctccccggagtggaggcggccgagcgcgccggggtgcccgccttcctggagacctccgcgccccgcaacctccccttctacgagcggctcggcttcaccgtcaccgccgacgtcgaggtgcccgaaggaccgcgcacctggtgcatgacccgcaagcccggtgcctga

SEQ ID NO: 1584 - DNA, 2187 bp, Artificial Sequence
  Synthetic Polynucleotides
atggccttaccagtgaccgccttgctcctgccgctggccttgctgctccacgccgccaggccggacatccagatgacccagagccccagcagcctgtctgccagcgtgggcgacagagtgaccatcacctgtagcgccagcagcagcgtgtcctacatgtactggtatcagcagaagcccggcaaggcccccaagctgctgatctacctgaccagcaatctggcctccggcgtgcccagcagattttctggcagcggctccggcaccgacttcaccctgacaatcagctccctccagcccgaggacttcgccacctactactgtcagcagtggcggagcaaccccttcaccttcggccagggcaccaagctggaaatcaagagaggcggaggcggaagtggaggcggaggatctggcggcggaggctctcagatcaccctgaaagagtccggccccaccctcgtgaagcctacccagaccctgacactgacctgcaccttcagcggcttcagcctgagcacaagcggcatgggcgtgggctggatcagacagcctcctggaaaggccctggaatggctggcccacatttggtgggacgacgtgaagcggtacagccccagcctgaagtcccggctgaccattaccaaggacaccagcaagaaccaggtggtgctgaccatgacaaacatggaccccgtggacaccgccacatattactgcgcccggatcgtgtccttcgacaacgacgtggtgtccgctatggactactggggccagggaaccctcgtgaccgtgtctagtacgcgtgagcagaaactgatctcggaagaggatctggcgaagcccaccacgacgccagcgccgcgaccaccaacaccggcgcccaccatcgcgtcgcagcccctgtccctgcgcccagaggcgtgccggccagcggcggggggcgcagtgcacacgagggggctggacttcgcctgtgacatctacatctgggcgcccttggccgggacttgtggggtccttctcctgtcactggttatcaccctttactgcaaacggggcagaaagaaactcctgtatatattcaaacaaccatttatgagaccagtacaaactactcaagaggaagatggctgtagctgccgatttccagaagaagaagaaggaggatgtgaactgagagtgaagttcagcaggagcgcagacgcccccgcgtaccagcagggccagaaccagctctataacgagctgaatctaggacgaagagaggagtacgatgttttggacaagagacgtggccgggaccctgagatggggggaaagccgagaaggaagaaccctcaggaaggcctgtacaatgaactgcagaaagataagatggcggaggcctacagtgagattgggatgaaaggcgagcgccggaggggcaaggggcacgatggcctttaccagggtctcagtacagccaccaaggacacctacgacgcccttcacatgcaggccctgccccctcgctctagtggctccggcgagggcagaggaagtctactaacctgcggagatgtggaagaaaatcctggcccacatatgaccgagtacaagcccacggtgcgcctcgccacccgcgacgacgtccccagggccgtacgcaccctcgccgccgcgttcgccgactaccccgccacgcgccacaccgtcgatccggaccgccacatcgagcgggtcaccgagctgcaagaactcttcctcacgcgcgtcgggctcgacatcggcaaggtgtgggtcgcggacgacggcgccgcggtggcggtctggaccacgccggagagcgtcgaagcgggggcggtgttcgccgagatcggcccgcgcatggccgagttgagcggttcccggctggccgcgcagcaacagatggaaggcctcctggcgccgcaccggcccaaggagcccgcgtggttcctggccaccgtcggcgtctcgcccgaccaccagggcaagggtctgggcagcgccgtcgtgctccccggagtggaggcggccgagcgcgccggggtgcccgccttcctggagacctccgcgccccgcaacctccccttctacgagcggctcggcttcaccgtcaccgccgacgtcgaggtgcccgaaggaccgcgcacctggtgcatgacccgcaagcccggtgcctga

SEQ ID NO: 1585 - DNA, 2172 bp, Artificial Sequence
  Synthetic Polynucleotides
atggccttaccagtgaccgccttgctcctgccgctggccttgctgctccacgccgccaggccggagatcgtgatgacccagagccctgccaccctgtccgtgtctccaggcgaaagagccaccctgagctgcaaggcttcccagagcgtgtccaacgacgtcgtgtggtatcagcagaagcccggccaggcccccagactgctgatctactacgccagcaacagatacaccggcatccccgccagattcagcggctctggcagcggcaccgagttcaccctgacaatcagcagcctccagagcgaggacttcgccgtgtactactgtcagcaggactacaccagcccctggaccttcggccagggcaccaagctggaaatcaagagaggcggaggcggaagtggaggcggaggatctggcggcggaggctctcaggtgcaactggtgcagagcggagccgaagtgaagaaacctggggccagcgtgaaggtgtcctgcaaggccagcggctacacctttaccaactacggcatgaactgggtgcgccaggctcctggacagggcctggaatggatgggctggatcaacacctacaccggcgagcccacctacgccgacgacttcaagggcagagtgaccatgaccaccgacaccagcacctccaccgcctacatggaactgcggagcctgagaagcgacgacaccgccgtgtattattgcgcccggatcggcgacagcagccccagcgattattggggccagggaaccctcgtgaccgtgtcctctacgcgtgagcagaaactgatctcggaagaggatctggcgaagcccaccacgacgccagcgccgcgaccaccaacaccggcgcccaccatcgcgtcgcagcccctgtccctgcgcccagaggcgtgccggccagcggcggggggcgcagtgcacacgagggggctggacttcgcctgtgacatctacatctgggcgcccttggccgggacttgtggggtccttctcctgtcactggttatcaccctttactgcaaacggggcagaaagaaactcctgtatatattcaaacaaccatttatgagaccagtacaaactactcaagaggaagatggctgtagctgccgatttccagaagaagaagaaggaggatgtgaactgagagtgaagttcagcaggagcgcagacgcccccgcgtaccagcagggccagaaccagctctataacgagctgaatctaggacgaagagaggagtacgatgttttggacaagagacgtggccgggaccctgagatggggggaaagccgagaaggaagaaccctcaggaaggcctgtacaatgaactgcagaaagataagatggcggaggcctacagtgagattgggatgaaaggcgagcgccggaggggcaaggggcacgatggcctttaccagggtctcagtacagccaccaaggacacctacgacgcccttcacatgcaggccctgccccctcgctctagtggctccggcgagggcagaggaagtctactaacctgcggagatgtggaagaaaatcctggcccacatatgaccgagtacaagcccacggtgcgcctcgccacccgcgacgacgtccccagggccgtacgcaccctcgccgccgcgttcgccgactaccccgccacgcgccacaccgtcgatccggaccgccacatcgagcgggtcaccgagctgcaagaactcttcctcacgcgcgtcgggctcgacatcggcaaggtgtgggtcgcggacgacggcgccgcggtggcggtctggaccacgccggagagcgtcgaagcgggggcggtgttcgccgagatcggcccgcgcatggccgagttgagcggttcccggctggccgcgcagcaacagatggaaggcctcctggcgccgcaccggcccaaggagcccgcgtggttcctggccaccgtcggcgtctcgcccgaccaccagggcaagggtctgggcagcgccgtcgtgctccccggagtggaggcggccgagcgcgccggggtgcccgccttcctggagacctccgcgccccgcaacctccccttctacgagcggctcggcttcaccgtcaccgccgacgtcgaggtgcccgaaggaccgcgcacctggtgcatgacccgcaagcccggtgcctga

SEQ ID NO: 1586 - DNA, 2175 bp, Artificial Sequence
  Synthetic Polynucleotides
atggccttaccagtgaccgccttgctcctgccgctggccttgctgctccacgccgccaggccggacagcaccgacatccagatgacccagagccccagcagcctgtctgccagcgtgggcgacagagtgaccatcacctgtagagccagccagagcatcagcagctacctgaactggtatcagcagaagcccggcaaggcccccaaactgctgatctacctggccagcaacctgcagagcggcgtgcccagcagattttctggcagcggctccggcaccgacttcaccctgacaatcagctccctgcagcccgaggacttcgccacctactactgtcagcaggccgagtacatgcccctgaccttcggccagggaacaaaggtggaaatcaagagagccggcggaggcggaagtggaggcggaggatctggcggcggaggctctgaagtgcaactgctggaatctggcggcggactggtgcagcctggcggatctctgagactgagctgtgccgccagcggcttcacctttagcggctacgccatgagctgggtgcgccaggctcctggcaaaggcctggaatgggtgtccgagatcgcccctcccggcctgaataccagatacgccgatagcgtgaagggccggttcaccatcagccgggacaacagcaagaacaccctgtacctgcagatgaacagcctgcgggccgaggataccgccgtgtactactgcgccaagagcgacaccgccttcgactactggggacagggaacccttgtgaccgtgtccacgcgtgagcagaaactgatctcggaagaggatctggcgaagcccaccacgacgccagcgccgcgaccaccaacaccggcgcccaccatcgcgtcgcagcccctgtccctgcgcccagaggcgtgccggccagcggcggggggcgcagtgcacacgagggggctggacttcgcctgtgacatctacatctgggcgcccttggccgggacttgtggggtccttctcctgtcactggttatcaccctttactgcaaacggggcagaaagaaactcctgtatatattcaaacaaccatttatgagaccagtacaaactactcaagaggaagatggctgtagctgccgatttccagaagaagaagaaggaggatgtgaactgagagtgaagttcagcaggagcgcagacgcccccgcgtaccagcagggccagaaccagctctataacgagctgaatctaggacgaagagaggagtacgatgttttggacaagagacgtggccgggaccctgagatggggggaaagccgagaaggaagaaccctcaggaaggcctgtacaatgaactgcagaaagataagatggcggaggcctacagtgagattgggatgaaaggcgagcgccggaggggcaaggggcacgatggcctttaccagggtctcagtacagccaccaaggacacctacgacgcccttcacatgcaggccctgccccctcgctctagtggctccggcgagggcagaggaagtctactaacctgcggagatgtggaagaaaatcctggcccacatatgaccgagtacaagcccacggtgcgcctcgccacccgcgacgacgtccccagggccgtacgcaccctcgccgccgcgttcgccgactaccccgccacgcgccacaccgtcgatccggaccgccacatcgagcgggtcaccgagctgcaagaactcttcctcacgcgcgtcgggctcgacatcggcaaggtgtgggtcgcggacgacggcgccgcggtggcggtctggaccacgccggagagcgtcgaagcgggggcggtgttcgccgagatcggcccgcgcatggccgagttgagcggttcccggctggccgcgcagcaacagatggaaggcctcctggcgccgcaccggcccaaggagcccgcgtggttcctggccaccgtcggcgtctcgcccgaccaccagggcaagggtctgggcagcgccgtcgtgctccccggagtggaggcggccgagcgcgccggggtgcccgccttcctggagacctccgcgccccgcaacctccccttctacgagcggctcggcttcaccgtcaccgccgacgtcgaggtgcccgaaggaccgcgcacctggtgcatgacccgcaagcccggtgcctga

SEQ ID NO: 1587 - DNA, 2184 bp, Artificial Sequence
  Synthetic Polynucleotides
atggccttaccagtgaccgccttgctcctgccgctggccttgctgctccacgccgccaggccggaccaggccgtgctgacccaggagagcgccctgaccaccagccccggcgagaccgtgaccctgacctgcagaagcagcaccggcgccgtgaccaccagcaactacgccaactgggtgcaggagaagcccgaccacctgttcaccggcctgatcggcggcaccaacaacagagtgcccggcgtgcccgccagattcagcggcagcctgatcggcgacaaggccgccctgaccatcaccggcgcccagaccgaggacgaggccatctacttctgcgtgctgtggcacagcaaccactgggtgttcggcggcggcaccaagctgaccgtgctgggcggaggcggaagtggaggcggaggatctggcggcggaggctctgacgtgcagctggtggagagcggcggcggcctggtgcagcccggcggcagcagaaagctgagctgcgccgccagcggcttcaccttcagcagcttcgggatgcactgggtgagacaggcccccgagaagggcctggagtgggtggcctacatcagcagcggcagcagcaccctgcactacgccgacaccgtgaagggcagattcaccatcagcagagacaaccccaagaacaccctgttcctgcagatgaccagcctgagaagcgaggacaccgccatgtactactgcgccagatggggcaactacccccactacgctatggactactggggccagggcaccagcgtgaccgtgagcagcacgcgtgagcagaaactgatctcggaagaggatctggcgaagcccaccacgacgccagcgccgcgaccaccaacaccggcgcccaccatcgcgtcgcagcccctgtccctgcgcccagaggcgtgccggccagcggcggggggcgcagtgcacacgagggggctggacttcgcctgtgacatctacatctgggcgcccttggccgggacttgtggggtccttctcctgtcactggttatcaccctttactgcaaacggggcagaaagaaactcctgtatatattcaaacaaccatttatgagaccagtacaaactactcaagaggaagatggctgtagctgccgatttccagaagaagaagaaggaggatgtgaactgagagtgaagttcagcaggagcgcagacgcccccgcgtaccagcagggccagaaccagctctataacgagctgaatctaggacgaagagaggagtacgatgttttggacaagagacgtggccgggaccctgagatggggggaaagccgagaaggaagaaccctcaggaaggcctgtacaatgaactgcagaaagataagatggcggaggcctacagtgagattgggatgaaaggcgagcgccggaggggcaaggggcacgatggcctttaccagggtctcagtacagccaccaaggacacctacgacgcccttcacatgcaggccctgccccctcgctctagtggctccggcgagggcagaggaagtctactaacctgcggagatgtggaagaaaatcctggcccacatatgaccgagtacaagcccacggtgcgcctcgccacccgcgacgacgtccccagggccgtacgcaccctcgccgccgcgttcgccgactaccccgccacgcgccacaccgtcgatccggaccgccacatcgagcgggtcaccgagctgcaagaactcttcctcacgcgcgtcgggctcgacatcggcaaggtgtgggtcgcggacgacggcgccgcggtggcggtctggaccacgccggagagcgtcgaagcgggggcggtgttcgccgagatcggcccgcgcatggccgagttgagcggttcccggctggccgcgcagcaacagatggaaggcctcctggcgccgcaccggcccaaggagcccgcgtggttcctggccaccgtcggcgtctcgcccgaccaccagggcaagggtctgggcagcgccgtcgtgctccccggagtggaggcggccgagcgcgccggggtgcccgccttcctggagacctccgcgccccgcaacctccccttctacgagcggctcggcttcaccgtcaccgccgacgtcgaggtgcccgaaggaccgcgcacctggtgcatgacccgcaagcccggtgcctga

SEQ ID NO: 1588 - DNA, 1830 bp, Artificial Sequence
  Synthetic Polynucleotides
atggccctgcccgtgacagccctgctgctgcctctggctctgctgctgcacgccgccagacccgatgaattcgaggtgcaactggtggaaagcggcggaggctctgtgcagacaggcggctctctgagactgacctgtgccgccagcggcagaaccagcagatcctatggcatgggctggttcagacaggcccctggcaaagaacgcgagttcgtgtccggcatctcttggagaggcgacagcaccggctacgccgatagcgtgaagggccggttcaccatcagccgggacaacgccaagaacaccgtggacctgcagatgaacagcctgaagcccgaggacaccgccatctactactgtgccgctgccgccggatctgcttggtacggcacactgtacgagtacgactactggggccagggcacccttgtgaccgtgtcatctacgcgtgagcagaaactgatctcggaagaggatctggcgaagcccaccacgacgccagcgccgcgaccaccaacaccggcgcccaccatcgcgtcgcagcccctgtccctgcgcccagaggcgtgccggccagcggcggggggcgcagtgcacacgagggggctggacttcgcctgtgacatctacatctgggcgcccttggccgggacttgtggggtccttctcctgtcactggttatcaccctttactgcaaacggggcagaaagaaactcctgtatatattcaaacaaccatttatgagaccagtacaaactactcaagaggaagatggctgtagctgccgatttccagaagaagaagaaggaggatgtgaactgagagtgaagttcagcaggagcgcagacgcccccgcgtaccagcagggccagaaccagctctataacgagctgaatctaggacgaagagaggagtacgatgttttggacaagagacgtggccgggaccctgagatggggggaaagccgagaaggaagaaccctcaggaaggcctgtacaatgaactgcagaaagataagatggcggaggcctacagtgagattgggatgaaaggcgagcgccggaggggcaaggggcacgatggcctttaccagggtctcagtacagccaccaaggacacctacgacgcccttcacatgcaggccctgccccctcgctctagtggctccggcgagggcagaggaagtctactaacctgcggagatgtggaagaaaatcctggcccacatatgaccgagtacaagcccacggtgcgcctcgccacccgcgacgacgtccccagggccgtacgcaccctcgccgccgcgttcgccgactaccccgccacgcgccacaccgtcgatccggaccgccacatcgagcgggtcaccgagctgcaagaactcttcctcacgcgcgtcgggctcgacatcggcaaggtgtgggtcgcggacgacggcgccgcggtggcggtctggaccacgccggagagcgtcgaagcgggggcggtgttcgccgagatcggcccgcgcatggccgagttgagcggttcccggctggccgcgcagcaacagatggaaggcctcctggcgccgcaccggcccaaggagcccgcgtggttcctggccaccgtcggcgtctcgcccgaccaccagggcaagggtctgggcagcgccgtcgtgctccccggagtggaggcggccgagcgcgccggggtgcccgccttcctggagacctccgcgccccgcaacctccccttctacgagcggctcggcttcaccgtcaccgccgacgtcgaggtgcccgaaggaccgcgcacctggtgcatgacccgcaagcccggtgcctga

SEQ ID NO: 1589 - DNA, 2256 bp, Artificial Sequence
  Synthetic Polynucleotides
atggccctgcccgtgacagccctgctgctgcctctggctctgctgctgcacgccgccagacccgatgaattcgaggtgcaactggtggaaagcggcggaggctctgtgcagacaggcggctctctgagactgacctgtgccgccagcggcagaaccagcagatcctatggcatgggctggttcagacaggcccctggcaaagaacgcgagttcgtgtccggcatctcttggagaggcgacagcaccggctacgccgatagcgtgaagggccggttcaccatcagccgggacaacgccaagaacaccgtggacctgcagatgaacagcctgaagcccgaggacaccgccatctactactgtgccgctgccgccggatctgcttggtacggcacactgtacgagtacgactactggggccagggcacccttgtgaccgtgtcatctctcgagggcggaggcggaagtggaggcggaggatctggcggcggaggctctttcgaagaggtgcaactggtggaatccgggggaggcagcgtgcaggctgggggatcactgagactgtcttgtgctgcctccggcgacacctacggcagctattggatgggatggtttcggcaggctcccggaaaagaacgggaaggcgtggccgccatcaacagaggcggcggatacaccgtgtacgccgactctgtgaagggcagattcacaatctccagagacacagccaagaatactgtgtacctgcagatgaactccctgcgccccgacgataccgccgactattattgcgccgcttccggcgtgctgggcggcctgcatgaggactggttcaattattggggacagggaacacttgtgacagtgtccagcacgcgtgagcagaaactgatctcggaagaggatctggcgaagcccaccacgacgccagcgccgcgaccaccaacaccggcgcccaccatcgcgtcgcagcccctgtccctgcgcccagaggcgtgccggccagcggcggggggcgcagtgcacacgagggggctggacttcgcctgtgacatctacatctgggcgcccttggccgggacttgtggggtccttctcctgtcactggttatcaccctttactgcaaacggggcagaaagaaactcctgtatatattcaaacaaccatttatgagaccagtacaaactactcaagaggaagatggctgtagctgccgatttccagaagaagaagaaggaggatgtgaactgagagtgaagttcagcaggagcgcagacgcccccgcgtaccagcagggccagaaccagctctataacgagctgaatctaggacgaagagaggagtacgatgttttggacaagagacgtggccgggaccctgagatggggggaaagccgagaaggaagaaccctcaggaaggcctgtacaatgaactgcagaaagataagatggcggaggcctacagtgagattgggatgaaaggcgagcgccggaggggcaaggggcacgatggcctttaccagggtctcagtacagccaccaaggacacctacgacgcccttcacatgcaggccctgccccctcgctctagtggctccggcgagggcagaggaagtctactaacctgcggagatgtggaagaaaatcctggcccacatatgaccgagtacaagcccacggtgcgcctcgccacccgcgacgacgtccccagggccgtacgcaccctcgccgccgcgttcgccgactaccccgccacgcgccacaccgtcgatccggaccgccacatcgagcgggtcaccgagctgcaagaactcttcctcacgcgcgtcgggctcgacatcggcaaggtgtgggtcgcggacgacggcgccgcggtggcggtctggaccacgccggagagcgtcgaagcgggggcggtgttcgccgagatcggcccgcgcatggccgagttgagcggttcccggctggccgcgcagcaacagatggaaggcctcctggcgccgcaccggcccaaggagcccgcgtggttcctggccaccgtcggcgtctcgcccgaccaccagggcaagggtctgggcagcgccgtcgtgctccccggagtggaggcggccgagcgcgccggggtgcccgccttcctggagacctccgcgccccgcaacctccccttctacgagcggctcggcttcaccgtcaccgccgacgtcgaggtgcccgaaggaccgcgcacctggtgcatgacccgcaagcccggtgcctga

SEQ ID NO: 1590 - DNA, 2313 bp, Artificial Sequence
  Synthetic Polynucleotides
atggccctgcccgtgacagccctgctgctgcctctggctctgctgctgcacgccgccagacccgatgaattcgaggtgcagctcgtagaatctggaggtggttccgtgcaagccggaggatcattgcgactgacctgcgcagcgagcggatctacttctcgctcttacggtatgggatggttcagacaggctcctgggaaagagcgcgagttcgtttcaggcatctcctggaggggggacagcaccggctacgcagatagcgtgaagggcaggttcacgatcagccgagacaacgccaaaaacaccgtcgatctgcaaatgaatagtctgaagcccgaagatactgcgatctactactgtgccgccgcagcagggtccacctggtacggcacactctacgagtacgactactgggggcagggaaccctggtaaccgtgtcctctctcgagggaggaggcggctccgggggaggcggaagtggaggcggaggatctgggtctggaggaagcggatctggaggctcagggtcagggggctcaggcagtggaggctctttcgaagttcagctcgtggaaagcggtggcggaagtgtgcaggccggaggcagtttgcgcctgagctgcgctgcttccggcgatacatacgggtcttactggatgggctggtttaggcaggcacctggacaagaaagagaagctgtggccgctattaacaggggaggtggctataccgtttatgctgattccgtgaagggccgattcacaatctcccgggataacgccaaaaacactctgtacctgcagatgaactcccttaggcccgatgacacagccgattactattgtgcggcctccggcgtgctgggtggtctgcatgaggattggttcaactactgggggcaaggcaccctcgtaaccgtgagtagcacgcgtgagcagaaactgatctcggaagaggatctggcgaagcccaccacgacgccagcgccgcgaccaccaacaccggcgcccaccatcgcgtcgcagcccctgtccctgcgcccagaggcgtgccggccagcggcggggggcgcagtgcacacgagggggctggacttcgcctgtgacatctacatctgggcgcccttggccgggacttgtggggtccttctcctgtcactggttatcaccctttactgcaaacggggcagaaagaaactcctgtatatattcaaacaaccatttatgagaccagtacaaactactcaagaggaagatggctgtagctgccgatttccagaagaagaagaaggaggatgtgaactgagagtgaagttcagcaggagcgcagacgcccccgcgtaccagcagggccagaaccagctctataacgagctgaatctaggacgaagagaggagtacgatgttttggacaagagacgtggccgggaccctgagatggggggaaagccgagaaggaagaaccctcaggaaggcctgtacaatgaactgcagaaagataagatggcggaggcctacagtgagattgggatgaaaggcgagcgccggaggggcaaggggcacgatggcctttaccagggtctcagtacagccaccaaggacacctacgacgcccttcacatgcaggccctgccccctcgctctagtggctccggcgagggcagaggaagtctactaacctgcggagatgtggaagaaaatcctggcccacatatgaccgagtacaagcccacggtgcgcctcgccacccgcgacgacgtccccagggccgtacgcaccctcgccgccgcgttcgccgactaccccgccacgcgccacaccgtcgatccggaccgccacatcgagcgggtcaccgagctgcaagaactcttcctcacgcgcgtcgggctcgacatcggcaaggtgtgggtcgcggacgacggcgccgcggtggcggtctggaccacgccggagagcgtcgaagcgggggcggtgttcgccgagatcggcccgcgcatggccgagttgagcggttcccggctggccgcgcagcaacagatggaaggcctcctggcgccgcaccggcccaaggagcccgcgtggttcctggccaccgtcggcgtctcgcccgaccaccagggcaagggtctgggcagcgccgtcgtgctccccggagtggaggcggccgagcgcgccggggtgcccgccttcctggagacctccgcgccccgcaacctccccttctacgagcggctcggcttcaccgtcaccgccgacgtcgaggtgcccgaaggaccgcgcacctggtgcatgacccgcaagcccggtgcctga

SEQ ID NO: 1591 - DNA, 2157 bp, Artificial Sequence
  Synthetic Polynucleotides
atggccttaccagtgaccgccttgctcctgccgctggccttgctgctccacgccgccaggccggacatccagatgacccagagccccagcagcctgtctgccagcgtgggcgacagagtgaccatcacctgtagagccagccagggcatcagaaacaacctggcctggtatcagcagaagcccggcaaggcccccaagcggctgatctacgccgccagcaatctccagagcggcgtgcccagcagattcacaggctctggcagcggcaccgagttcaccctgatcgtgtctagcctccagcccgaggacttcgccacctactactgcctccagcaccacagctaccccctgacatctggcggaggcaccaaggtggaaggcggaggcggaagtggaggcggaggatctggcggcggaggctctgaggtgcaggtgctggaaagtggcggaggactggtgcagcctggcggctctctgagactgtcttgtgccgccagcggcttcaccttcagcagctacgccatgagctgggtgcgccaggcccctggaaaaggactggaatgggtgtccgccatcagcggctctggcgggtctaccaactacgccgatagcgtgaagggccggttcaccatcagccgggacaacagcaagaacaccctgtacctccagatgaacagcctgcgggccgaggacaccgccgtgtattattgtgccggcagcagcgggtggagcgagtattggggacagggcaccctcgtgaccgtgtcctctacgcgtgagcagaaactgatctcggaagaggatctggcgaagcccaccacgacgccagcgccgcgaccaccaacaccggcgcccaccatcgcgtcgcagcccctgtccctgcgcccagaggcgtgccggccagcggcggggggcgcagtgcacacgagggggctggacttcgcctgtgacatctacatctgggcgcccttggccgggacttgtggggtccttctcctgtcactggttatcaccctttactgcaaacggggcagaaagaaactcctgtatatattcaaacaaccatttatgagaccagtacaaactactcaagaggaagatggctgtagctgccgatttccagaagaagaagaaggaggatgtgaactgagagtgaagttcagcaggagcgcagacgcccccgcgtaccagcagggccagaaccagctctataacgagctgaatctaggacgaagagaggagtacgatgttttggacaagagacgtggccgggaccctgagatggggggaaagccgagaaggaagaaccctcaggaaggcctgtacaatgaactgcagaaagataagatggcggaggcctacagtgagattgggatgaaaggcgagcgccggaggggcaaggggcacgatggcctttaccagggtctcagtacagccaccaaggacacctacgacgcccttcacatgcaggccctgccccctcgctctagtggctccggcgagggcagaggaagtctactaacctgcggagatgtggaagaaaatcctggcccacatatgaccgagtacaagcccacggtgcgcctcgccacccgcgacgacgtccccagggccgtacgcaccctcgccgccgcgttcgccgactaccccgccacgcgccacaccgtcgatccggaccgccacatcgagcgggtcaccgagctgcaagaactcttcctcacgcgcgtcgggctcgacatcggcaaggtgtgggtcgcggacgacggcgccgcggtggcggtctggaccacgccggagagcgtcgaagcgggggcggtgttcgccgagatcggcccgcgcatggccgagttgagcggttcccggctggccgcgcagcaacagatggaaggcctcctggcgccgcaccggcccaaggagcccgcgtggttcctggccaccgtcggcgtctcgcccgaccaccagggcaagggtctgggcagcgccgtcgtgctccccggagtggaggcggccgagcgcgccggggtgcccgccttcctggagacctccgcgccccgcaacctccccttctacgagcggctcggcttcaccgtcaccgccgacgtcgaggtgcccgaaggaccgcgcacctggtgcatgacccgcaagcccggtgcctga

SEQ ID NO: 1592 - DNA, 2175 bp, Artificial Sequence
  Synthetic Polynucleotides
atggccttaccagtgaccgccttgctcctgccgctggccttgctgctccacgccgccaggccggacgagatccagctggtgcagagcggagccgaagtgaagaagcctggcgagagcctgcggatcagctgcaagggcagcggcttcaacatcgaggactactacatccactgggtgcgccagatgcccggcaagggcctggaatggatgggcagaatcgaccccgagaacgacgagactaagtacggccccatcttccagggccacgtgaccatcagcgccgacaccagcatcaacaccgtgtacctccagtggtccagcctgaaggccagcgacaccgccatgtactactgcgcctttagaggcggcgtgtactggggccagggcaccacagtgacagtgtctagcggcggaggcggaagtggaggcggaggatctggcggcggaggctctgatgtcgtgatgacccagagccccgacagcctggctgtgtctctgggagagagagccaccatcaactgcaagtccagccagtccctgctggacagcgacggcaagacctacctgaactggctccagcagaagcccggccagccccccaagagactgatctccctggtgtccaagctggactccggcgtgcccgatagattttccggctctggcagcggcaccgacttcaccctgacaatcagctcccttcaggccgaggacgtggccgtgtactattgctggcagggcacacacttccccggcacctttggcggaggcaccaaggtggaaatcaagacgcgtgagcagaaactgatctcggaagaggatctggcgaagcccaccacgacgccagcgccgcgaccaccaacaccggcgcccaccatcgcgtcgcagcccctgtccctgcgcccagaggcgtgccggccagcggcggggggcgcagtgcacacgagggggctggacttcgcctgtgacatctacatctgggcgcccttggccgggacttgtggggtccttctcctgtcactggttatcaccctttactgcaaacggggcagaaagaaactcctgtatatattcaaacaaccatttatgagaccagtacaaactactcaagaggaagatggctgtagctgccgatttccagaagaagaagaaggaggatgtgaactgagagtgaagttcagcaggagcgcagacgcccccgcgtaccagcagggccagaaccagctctataacgagctgaatctaggacgaagagaggagtacgatgttttggacaagagacgtggccgggaccctgagatggggggaaagccgagaaggaagaaccctcaggaaggcctgtacaatgaactgcagaaagataagatggcggaggcctacagtgagattgggatgaaaggcgagcgccggaggggcaaggggcacgatggcctttaccagggtctcagtacagccaccaaggacacctacgacgcccttcacatgcaggccctgccccctcgctctagtggctccggcgagggcagaggaagtctactaacctgcggagatgtggaagaaaatcctggcccacatatgaccgagtacaagcccacggtgcgcctcgccacccgcgacgacgtccccagggccgtacgcaccctcgccgccgcgttcgccgactaccccgccacgcgccacaccgtcgatccggaccgccacatcgagcgggtcaccgagctgcaagaactcttcctcacgcgcgtcgggctcgacatcggcaaggtgtgggtcgcggacgacggcgccgcggtggcggtctggaccacgccggagagcgtcgaagcgggggcggtgttcgccgagatcggcccgcgcatggccgagttgagcggttcccggctggccgcgcagcaacagatggaaggcctcctggcgccgcaccggcccaaggagcccgcgtggttcctggccaccgtcggcgtctcgcccgaccaccagggcaagggtctgggcagcgccgtcgtgctccccggagtggaggcggccgagcgcgccggggtgcccgccttcctggagacctccgcgccccgcaacctccccttctacgagcggctcggcttcaccgtcaccgccgacgtcgaggtgcccgaaggaccgcgcacctggtgcatgacccgcaagcccggtgcctga

SEQ ID NO: 1593 - DNA, 2196 bp, Artificial Sequence
  Synthetic Polynucleotides
atggccttaccagtgaccgccttgctcctgccgctggccttgctgctccacgccgccaggccggacgagcttgtgatgacccagagccccagcagcctgacagtgacagccggcgagaaagtgaccatgagctgcaagagcagccagagcctgctgaacagcggcaaccagaagaactacctgacctggtatcagcagaagcccggccagccccccaagctgctgatctactgggccagcaccagagaaagcggcgtgcccgatagattcaccggctctggcagcggcaccgacttcaccctgacaatcagcagcgtgcaggccgaggacctggccgtgtactactgccagaacgactacagctaccccctgaccttcggagccggcaccaagctggaaatcaagggcggaggcggaagtggaggcggaggatctggcggcggaggctctgaagtgcagctgctggaacagtctggcgccgaacttgtgcggcctggcaccagcgtgaagatcagctgtaaagccagcggctacgccttcaccaactactggctgggctgggtcaagcagaggcctggacacggcctggaatggatcggcgacatctttcccggctccggcaacatccactacaacgagaagttcaagggcaaggccaccctgaccgccgacaagtctagcagcaccgcctacatgcagctgtccagcctgacctttgaggacagcgccgtgtatttctgtgcccggctgcggaactgggacgagcccatggattattggggccagggcaccaccgtgaccgtgtctagtacgcgtgagcagaaactgatctcggaagaggatctggcgaagcccaccacgacgccagcgccgcgaccaccaacaccggcgcccaccatcgcgtcgcagcccctgtccctgcgcccagaggcgtgccggccagcggcggggggcgcagtgcacacgagggggctggacttcgcctgtgacatctacatctgggcgcccttggccgggacttgtggggtccttctcctgtcactggttatcaccctttactgcaaacggggcagaaagaaactcctgtatatattcaaacaaccatttatgagaccagtacaaactactcaagaggaagatggctgtagctgccgatttccagaagaagaagaaggaggatgtgaactgagagtgaagttcagcaggagcgcagacgcccccgcgtaccagcagggccagaaccagctctataacgagctgaatctaggacgaagagaggagtacgatgttttggacaagagacgtggccgggaccctgagatggggggaaagccgagaaggaagaaccctcaggaaggcctgtacaatgaactgcagaaagataagatggcggaggcctacagtgagattgggatgaaaggcgagcgccggaggggcaaggggcacgatggcctttaccagggtctcagtacagccaccaaggacacctacgacgcccttcacatgcaggccctgccccctcgctctagtggctccggcgagggcagaggaagtctactaacctgcggagatgtggaagaaaatcctggcccacatatgaccgagtacaagcccacggtgcgcctcgccacccgcgacgacgtccccagggccgtacgcaccctcgccgccgcgttcgccgactaccccgccacgcgccacaccgtcgatccggaccgccacatcgagcgggtcaccgagctgcaagaactcttcctcacgcgcgtcgggctcgacatcggcaaggtgtgggtcgcggacgacggcgccgcggtggcggtctggaccacgccggagagcgtcgaagcgggggcggtgttcgccgagatcggcccgcgcatggccgagttgagcggttcccggctggccgcgcagcaacagatggaaggcctcctggcgccgcaccggcccaaggagcccgcgtggttcctggccaccgtcggcgtctcgcccgaccaccagggcaagggtctgggcagcgccgtcgtgctccccggagtggaggcggccgagcgcgccggggtgcccgccttcctggagacctccgcgccccgcaacctccccttctacgagcggctcggcttcaccgtcaccgccgacgtcgaggtgcccgaaggaccgcgcacctggtgcatgacccgcaagcccggtgcctga

SEQ ID NO: 1594 - DNA, 2199 bp, Artificial Sequence
  Synthetic Polynucleotides
atggccttaccagtgaccgccttgctcctgccgctggccttgctgctccacgccgccaggccggacgagctgcagatgacccagagccctagcagcctgtctgccagcgtgggcgacagagtgaccatcacctgtagagccagccagagcatcagcagctacctgaactggtatcagcagaagcccggccagccccccaaactgctgatctactgggccagcaccagagaaagcggcgtgcccgatagattcagcggcagcgagagcggcaccaactacaccctgaccatcagctccctgcagcccgaggacttcgccacctacttttgccagcagagcgacagcctgcccatcacctttggacagggcacccggctggacattcagggcggaggcggaagtggaggcggaggatctggcggcggaggctctgaggtgcaactgctggaatctgggggcggagtggtgcagcctggcagaagcctgagactgagctgtgccgccagcggcttcaccttcagctcctacggaatgcactgggtgcgccaggcccctggcaaaggactggaatgggtggccgtgatctcctacgacggcagcaacaagtactacgccgacagcgtgaagggccggttcaccatcagccgggacaacagcaagaacaccctgtacctgcagatgaacagcctgcgggccgaggacaccgccgtgtactactgcgccaaggatatgggctggggcagcggctggcggccttactactactacggcatggacgtgtggggccagggcaccaccgtgacagtgtcatctacgcgtgagcagaaactgatctcggaagaggatctggcgaagcccaccacgacgccagcgccgcgaccaccaacaccggcgcccaccatcgcgtcgcagcccctgtccctgcgcccagaggcgtgccggccagcggcggggggcgcagtgcacacgagggggctggacttcgcctgtgacatctacatctgggcgcccttggccgggacttgtggggtccttctcctgtcactggttatcaccctttactgcaaacggggcagaaagaaactcctgtatatattcaaacaaccatttatgagaccagtacaaactactcaagaggaagatggctgtagctgccgatttccagaagaagaagaaggaggatgtgaactgagagtgaagttcagcaggagcgcagacgcccccgcgtaccagcagggccagaaccagctctataacgagctgaatctaggacgaagagaggagtacgatgttttggacaagagacgtggccgggaccctgagatggggggaaagccgagaaggaagaaccctcaggaaggcctgtacaatgaactgcagaaagataagatggcggaggcctacagtgagattgggatgaaaggcgagcgccggaggggcaaggggcacgatggcctttaccagggtctcagtacagccaccaaggacacctacgacgcccttcacatgcaggccctgccccctcgctctagtggctccggcgagggcagaggaagtctactaacctgcggagatgtggaagaaaatcctggcccacatatgaccgagtacaagcccacggtgcgcctcgccacccgcgacgacgtccccagggccgtacgcaccctcgccgccgcgttcgccgactaccccgccacgcgccacaccgtcgatccggaccgccacatcgagcgggtcaccgagctgcaagaactcttcctcacgcgcgtcgggctcgacatcggcaaggtgtgggtcgcggacgacggcgccgcggtggcggtctggaccacgccggagagcgtcgaagcgggggcggtgttcgccgagatcggcccgcgcatggccgagttgagcggttcccggctggccgcgcagcaacagatggaaggcctcctggcgccgcaccggcccaaggagcccgcgtggttcctggccaccgtcggcgtctcgcccgaccaccagggcaagggtctgggcagcgccgtcgtgctccccggagtggaggcggccgagcgcgccggggtgcccgccttcctggagacctccgcgccccgcaacctccccttctacgagcggctcggcttcaccgtcaccgccgacgtcgaggtgcccgaaggaccgcgcacctggtgcatgacccgcaagcccggtgcctga

SEQ ID NO: 1595 - DNA, 2190 bp, Artificial Sequence
  Synthetic Polynucleotides
atggccttaccagtgaccgccttgctcctgccgctggccttgctgctccacgccgccaggccggacgacatccaaatgacacagagtccttctagtttgagtgcgagcgtgggggacagggtgaccattacctgcagggccagccagagcataagctcataccttaattggtaccagcaaaaaccaggtaaggcccctaagctcctgatctacgcggcctcttcacttcaatctggggtcccttcccgcttcagtggctccggcagcggcaccgacttcacgctcactatatcaagtctgcagcctgaggatctcgccacctattactgtcaacaaagttattccacccctttcacctttggaccgggcacgaaagtggatattaagggcggaggcggaagtggaggcggaggatctggcggcggaggctctgtgcacgaggtccagcttgtgcagtccggggcagaggtcaagaagcctggttctagcgtaaaagtgagttgcaaagcctcaggtgggacattttcatcctacgcgatcagttgggttagacaggctcctggtcaagggctggaatggatgggcggaattattccaatcttcggaacagcgaattacgcgcagaagttccagggtagagtaaccatcactgctgacaagtccacctccaccgcatacatggaattgtctagtctccggagcgaggatacggcggtgtattattgtgctacgttcgccctgtttggcttccgcgaacaggctttcgacatctgggggcagggcacgacagtcacggttagtagtacgcgtgagcagaaactgatctcggaagaggatctggcgaagcccaccacgacgccagcgccgcgaccaccaacaccggcgcccaccatcgcgtcgcagcccctgtccctgcgcccagaggcgtgccggccagcggcggggggcgcagtgcacacgagggggctggacttcgcctgtgacatctacatctgggcgcccttggccgggacttgtggggtccttctcctgtcactggttatcaccctttactgcaaacggggcagaaagaaactcctgtatatattcaaacaaccatttatgagaccagtacaaactactcaagaggaagatggctgtagctgccgatttccagaagaagaagaaggaggatgtgaactgagagtgaagttcagcaggagcgcagacgcccccgcgtaccagcagggccagaaccagctctataacgagctgaatctaggacgaagagaggagtacgatgttttggacaagagacgtggccgggaccctgagatggggggaaagccgagaaggaagaaccctcaggaaggcctgtacaatgaactgcagaaagataagatggcggaggcctacagtgagattgggatgaaaggcgagcgccggaggggcaaggggcacgatggcctttaccagggtctcagtacagccaccaaggacacctacgacgcccttcacatgcaggccctgccccctcgctctagtggctccggcgagggcagaggaagtctactaacctgcggagatgtggaagaaaatcctggcccacatatgaccgagtacaagcccacggtgcgcctcgccacccgcgacgacgtccccagggccgtacgcaccctcgccgccgcgttcgccgactaccccgccacgcgccacaccgtcgatccggaccgccacatcgagcgggtcaccgagctgcaagaactcttcctcacgcgcgtcgggctcgacatcggcaaggtgtgggtcgcggacgacggcgccgcggtggcggtctggaccacgccggagagcgtcgaagcgggggcggtgttcgccgagatcggcccgcgcatggccgagttgagcggttcccggctggccgcgcagcaacagatggaaggcctcctggcgccgcaccggcccaaggagcccgcgtggttcctggccaccgtcggcgtctcgcccgaccaccagggcaagggtctgggcagcgccgtcgtgctccccggagtggaggcggccgagcgcgccggggtgcccgccttcctggagacctccgcgccccgcaacctccccttctacgagcggctcggcttcaccgtcaccgccgacgtcgaggtgcccgaaggaccgcgcacctggtgcatgacccgcaagcccggtgcctga

SEQ ID NO: 1596 - DNA, 2181 bp, Artificial Sequence
  Synthetic Polynucleotides
atggccttaccagtgaccgccttgctcctgccgctggccttgctgctccacgccgccaggccggacgtcgtgatgacccagacccctctgagcctgcctgtgtccctgggcgatcaggccagcatctcctgtagaagcagccagagcctggtgcacagcaacggcaacacctacctgcggtggtatctccagaagcccggccagagccccaaggtgctgatctacaaggtgtccaacagattcagcggcgtgcccgacagattctccggcagcggctctggcaccgacttcaccctgaagatcagccgggtggaagccgaggacctgggcgtgtacttctgtagccagagcacccacgtgccctggacctttggcggcggaacaaagctggaaatcaagggcggaggcggaagtggaggcggaggatctggcggcggaggctctgaagtgaagctggacgagacaggcggagggctggtgcagcctggcagacctatgaagctgagctgtgtggcctccggcttcaccttcagcgactactggatgaactgggtgcgccagtcccccgagaagggcctggaatgggtggcccagatcagaaacaagccctacaactacgaaacctactacagcgacagcgtgaagggccggttcaccatcagcagggacgacagcaagagcagcgtgtacctccagatgaacaacctgagggtggaagatatgggcatctactactgcaccggcagctactacggcatggactactggggccagggcaccagcgtgaccgtgtctacgcgtgagcagaaactgatctcggaagaggatctggcgaagcccaccacgacgccagcgccgcgaccaccaacaccggcgcccaccatcgcgtcgcagcccctgtccctgcgcccagaggcgtgccggccagcggcggggggcgcagtgcacacgagggggctggacttcgcctgtgacatctacatctgggcgcccttggccgggacttgtggggtccttctcctgtcactggttatcaccctttactgcaaacggggcagaaagaaactcctgtatatattcaaacaaccatttatgagaccagtacaaactactcaagaggaagatggctgtagctgccgatttccagaagaagaagaaggaggatgtgaactgagagtgaagttcagcaggagcgcagacgcccccgcgtaccagcagggccagaaccagctctataacgagctgaatctaggacgaagagaggagtacgatgttttggacaagagacgtggccgggaccctgagatggggggaaagccgagaaggaagaaccctcaggaaggcctgtacaatgaactgcagaaagataagatggcggaggcctacagtgagattgggatgaaaggcgagcgccggaggggcaaggggcacgatggcctttaccagggtctcagtacagccaccaaggacacctacgacgcccttcacatgcaggccctgccccctcgctctagtggctccggcgagggcagaggaagtctactaacctgcggagatgtggaagaaaatcctggcccacatatgaccgagtacaagcccacggtgcgcctcgccacccgcgacgacgtccccagggccgtacgcaccctcgccgccgcgttcgccgactaccccgccacgcgccacaccgtcgatccggaccgccacatcgagcgggtcaccgagctgcaagaactcttcctcacgcgcgtcgggctcgacatcggcaaggtgtgggtcgcggacgacggcgccgcggtggcggtctggaccacgccggagagcgtcgaagcgggggcggtgttcgccgagatcggcccgcgcatggccgagttgagcggttcccggctggccgcgcagcaacagatggaaggcctcctggcgccgcaccggcccaaggagcccgcgtggttcctggccaccgtcggcgtctcgcccgaccaccagggcaagggtctgggcagcgccgtcgtgctccccggagtggaggcggccgagcgcgccggggtgcccgccttcctggagacctccgcgccccgcaacctccccttctacgagcggctcggcttcaccgtcaccgccgacgtcgaggtgcccgaaggaccgcgcacctggtgcatgacccgcaagcccggtgcctga

SEQ ID NO: 1597 - DNA, 2214 bp, Artificial Sequence
  Synthetic Polynucleotides
atggccttaccagtgaccgccttgctcctgccgctggccttgctgctccacgccgccaggccggacgtggtcatgacacagaccccactgagcctgcctgtgtctctgggagatcaggccagcatctcctgtagaagcagccagagcctggtgcacagcaacggcaacacctacctgcggtggtatctccagaagcctggacagagccccaaggtgctgatctacaaggtgtccaacagagtgtccggcgtgcccgatagattttctggcagcggctctggcaccgacttcaccctgaagatcaatagagtggaagccgaggacctgggcgtgtacttctgtagccagagcacccatgtgccttggacctttggcggaggcaccaagctggaaatcaagagcagcgccgacgacgccaagaaggacgccgccaaaaaggatgatgccaagaaagacgatgctaaaaaagacggcggcgtgaagctggacgagacaggcggaggacttgttcaacctggcggagccatgaagctgagctgtgtgaccagcggctttaccttcggccactactggatgaactgggtccgacagtcccctgagaaaggactggaatgggtcgcccagttcagaaacaagccctacaactacgaaacctactacagcgacagcgtgaagggcagattcaccatcagccgggacgacagcaagtccagcgtgtacctccagatgaacaacctgcgcgtggaagataccggcatctactactgtaccggggccagctacggcatggaatatctcggccagggcaccagcgtgaccgtgtctacaacgcgtgagcagaaactgatctcggaagaggatctggcgaagcccaccacgacgccagcgccgcgaccaccaacaccggcgcccaccatcgcgtcgcagcccctgtccctgcgcccagaggcgtgccggccagcggcggggggcgcagtgcacacgagggggctggacttcgcctgtgacatctacatctgggcgcccttggccgggacttgtggggtccttctcctgtcactggttatcaccctttactgcaaacggggcagaaagaaactcctgtatatattcaaacaaccatttatgagaccagtacaaactactcaagaggaagatggctgtagctgccgatttccagaagaagaagaaggaggatgtgaactgagagtgaagttcagcaggagcgcagacgcccccgcgtaccagcagggccagaaccagctctataacgagctgaatctaggacgaagagaggagtacgatgttttggacaagagacgtggccgggaccctgagatggggggaaagccgagaaggaagaaccctcaggaaggcctgtacaatgaactgcagaaagataagatggcggaggcctacagtgagattgggatgaaaggcgagcgccggaggggcaaggggcacgatggcctttaccagggtctcagtacagccaccaaggacacctacgacgcccttcacatgcaggccctgccccctcgctctagtggctccggcgagggcagaggaagtctactaacctgcggagatgtggaagaaaatcctggcccacatatgaccgagtacaagcccacggtgcgcctcgccacccgcgacgacgtccccagggccgtacgcaccctcgccgccgcgttcgccgactaccccgccacgcgccacaccgtcgatccggaccgccacatcgagcgggtcaccgagctgcaagaactcttcctcacgcgcgtcgggctcgacatcggcaaggtgtgggtcgcggacgacggcgccgcggtggcggtctggaccacgccggagagcgtcgaagcgggggcggtgttcgccgagatcggcccgcgcatggccgagttgagcggttcccggctggccgcgcagcaacagatggaaggcctcctggcgccgcaccggcccaaggagcccgcgtggttcctggccaccgtcggcgtctcgcccgaccaccagggcaagggtctgggcagcgccgtcgtgctccccggagtggaggcggccgagcgcgccggggtgcccgccttcctggagacctccgcgccccgcaacctccccttctacgagcggctcggcttcaccgtcaccgccgacgtcgaggtgcccgaaggaccgcgcacctggtgcatgacccgcaagcccggtgcctga

SEQ ID NO: 1598 - DNA, 2202 bp, Artificial Sequence
  Synthetic Polynucleotides
atggccttaccagtgaccgccttgctcctgccgctggccttgctgctccacgccgccaggccgcaggtgcaactggtggaatctggcggcaatctggttcagcctggcggctctctgagactgtcttgtgccgccagcggcttcaccttcggcagcttttctatgagctgggtccgacaagctcctggcggaggacttgaatgggtggcaggactgtctgccagaagcagcctgacacactacgccgactctgtgaagggcagattcaccatcagccgggacaacgccaagaacagcgtgtacctccagatgaacagcctgagagtggaagataccgccgtgtactactgcgccagaagaagctacgacagcagcggctactggggccacttctacagctacatggatgtgtggggccagggcaccctggttacagtttctggcggaggcggaagtggaggcggaggatctggcggcggaggctcttctgtgctgacccagcctagctccgtgtctgctgctcctggacagaaagtgaccatctcctgtagcggcagcaccagcaacatcggcaacaactacgtgtcctggtatcagcagcaccccggcaaggcccctaagctgatgatctacgacgtgtccaagaggcccagcggcgtgccagatagattttccggcagcaagagcggcaacagcgccagcctggatattagcggactccagtctgaggacgaggccgactactattgcgccgcctgggatgatagcctgagcgagtttctgtttggcaccggcaccaagctgacagtgcttggaacgcgtgagcagaaactgatctcggaagaggatctggcgaagcccaccacgacgccagcgccgcgaccaccaacaccggcgcccaccatcgcgtcgcagcccctgtccctgcgcccagaggcgtgccggccagcggcggggggcgcagtgcacacgagggggctggacttcgcctgtgacatctacatctgggcgcccttggccgggacttgtggggtccttctcctgtcactggttatcaccctttactgcaaacggggcagaaagaaactcctgtatatattcaaacaaccatttatgagaccagtacaaactactcaagaggaagatggctgtagctgccgatttccagaagaagaagaaggaggatgtgaactgagagtgaagttcagcaggagcgcagacgcccccgcgtaccagcagggccagaaccagctctataacgagctgaatctaggacgaagagaggagtacgatgttttggacaagagacgtggccgggaccctgagatggggggaaagccgagaaggaagaaccctcaggaaggcctgtacaatgaactgcagaaagataagatggcggaggcctacagtgagattgggatgaaaggcgagcgccggaggggcaaggggcacgatggcctttaccagggtctcagtacagccaccaaggacacctacgacgcccttcacatgcaggccctgccccctcgctctagtggctccggcgagggcagaggaagtctactaacctgcggagatgtggaagaaaatcctggcccacatatgaccgagtacaagcccacggtgcgcctcgccacccgcgacgacgtccccagggccgtacgcaccctcgccgccgcgttcgccgactaccccgccacgcgccacaccgtcgatccggaccgccacatcgagcgggtcaccgagctgcaagaactcttcctcacgcgcgtcgggctcgacatcggcaaggtgtgggtcgcggacgacggcgccgcggtggcggtctggaccacgccggagagcgtcgaagcgggggcggtgttcgccgagatcggcccgcgcatggccgagttgagcggttcccggctggccgcgcagcaacagatggaaggcctcctggcgccgcaccggcccaaggagcccgcgtggttcctggccaccgtcggcgtctcgcccgaccaccagggcaagggtctgggcagcgccgtcgtgctccccggagtggaggcggccgagcgcgccggggtgcccgccttcctggagacctccgcgccccgcaacctccccttctacgagcggctcggcttcaccgtcaccgccgacgtcgaggtgcccgaaggaccgcgcacctggtgcatgacccgcaagcccggtgcctga

SEQ ID NO: 1599 - DNA, 2187 bp, Artificial Sequence
  Synthetic Polynucleotides
atggccttaccagtgaccgccttgctcctgccgctggccttgctgctccacgccgccaggccggacatccagatgacacagagccctagcagcctgtctgccagcgtgggagacagagtgaccatcacctgtagaaccagccagagcctgagcagctacacccactggtatcagcagaagcctggcaaggcccctaagctgctgatctatgccgcttccagcagaggcagcggagtgcctagcagattttctggcagcggctccggcaccgatttcaccctgacaatatccagcctccagcctgaggacttcgccacctactactgccagcagagcagaacattcggccagggcaccaaggtggaaatcaaaggcggaggcggaagtggaggcggaggatctggcggcggaggctctcaagttcagctccagcagtctggccctggcctggttaagcctagccagacactgagcctgacctgtgccatcagcggcgatagcgtgtccagctacaacgccgtgtggaactggatcagacagagcccatccagaggactggaatggctgggcagaacctactacagaagcggctggtacaacgactacgccgagagcgtgaagtcccggatcaccatcaatcccgacaccagcaagaaccagttcagcctgcaactgaacagcgtgacccctgaggataccgccgtgtactactgtgctagaagcggccacatcaccgtgttcggcgtgaacgtggacgccttcgatatgtggggccagggaacaatggtcaccgtgtctagtacgcgtgagcagaaactgatctcggaagaggatctggcgaagcccaccacgacgccagcgccgcgaccaccaacaccggcgcccaccatcgcgtcgcagcccctgtccctgcgcccagaggcgtgccggccagcggcggggggcgcagtgcacacgagggggctggacttcgcctgtgacatctacatctgggcgcccttggccgggacttgtggggtccttctcctgtcactggttatcaccctttactgcaaacggggcagaaagaaactcctgtatatattcaaacaaccatttatgagaccagtacaaactactcaagaggaagatggctgtagctgccgatttccagaagaagaagaaggaggatgtgaactgagagtgaagttcagcaggagcgcagacgcccccgcgtaccagcagggccagaaccagctctataacgagctgaatctaggacgaagagaggagtacgatgttttggacaagagacgtggccgggaccctgagatggggggaaagccgagaaggaagaaccctcaggaaggcctgtacaatgaactgcagaaagataagatggcggaggcctacagtgagattgggatgaaaggcgagcgccggaggggcaaggggcacgatggcctttaccagggtctcagtacagccaccaaggacacctacgacgcccttcacatgcaggccctgccccctcgctctagtggctccggcgagggcagaggaagtctactaacctgcggagatgtggaagaaaatcctggcccacatatgaccgagtacaagcccacggtgcgcctcgccacccgcgacgacgtccccagggccgtacgcaccctcgccgccgcgttcgccgactaccccgccacgcgccacaccgtcgatccggaccgccacatcgagcgggtcaccgagctgcaagaactcttcctcacgcgcgtcgggctcgacatcggcaaggtgtgggtcgcggacgacggcgccgcggtggcggtctggaccacgccggagagcgtcgaagcgggggcggtgttcgccgagatcggcccgcgcatggccgagttgagcggttcccggctggccgcgcagcaacagatggaaggcctcctggcgccgcaccggcccaaggagcccgcgtggttcctggccaccgtcggcgtctcgcccgaccaccagggcaagggtctgggcagcgccgtcgtgctccccggagtggaggcggccgagcgcgccggggtgcccgccttcctggagacctccgcgccccgcaacctccccttctacgagcggctcggcttcaccgtcaccgccgacgtcgaggtgcccgaaggaccgcgcacctggtgcatgacccgcaagcccggtgcctga

SEQ ID NO: 1600 - DNA, 2184 bp, Artificial Sequence
  Synthetic Polynucleotides
atggccttaccagtgaccgccttgctcctgccgctggccttgctgctccacgccgccaggccggacatcgtgctgacccagagccctctgagcctggccgtgtctctgggacagcctgccatcatcagctgcaaggccagccagagcgtgtcctttgccggcacctctctgatgcactggtatcaccagaagcccggccagcagcccagactgctgatctacagagccagcaacctggaagccggcgtgcccgatagattttccggcagcggcagcaagaccgacttcaccctgaccatcagccccgtggaagccgaagatgccgccacctactactgccagcagagcagagagtacccctacaccttcggcggaggcaccaagctggaaatcaagaggggcggaggcggaagtggaggcggaggatctggcggcggaggctctcaggtccaactggtgcagagcggagccgaggtcgtgaagcctggcgcttccgtgaagattagctgcaaagccagcggctacacctttaccggctactttatgaactgggtcaagcagagccctggccagagcctggaatggatcggcagaatccacccctacgacggcgacaccttctacaaccagaagttccagggcaaggccaccctgacagtggacaagagcagcaacaccgcccacatggaactgctgagcctgaccagcgaggacttcgccgtgtactactgcaccagatacgacggcagccgggctatggactattggggccagggcaccaccgtgaccgtgtctagtacgcgtgagcagaaactgatctcggaagaggatctggcgaagcccaccacgacgccagcgccgcgaccaccaacaccggcgcccaccatcgcgtcgcagcccctgtccctgcgcccagaggcgtgccggccagcggcggggggcgcagtgcacacgagggggctggacttcgcctgtgacatctacatctgggcgcccttggccgggacttgtggggtccttctcctgtcactggttatcaccctttactgcaaacggggcagaaagaaactcctgtatatattcaaacaaccatttatgagaccagtacaaactactcaagaggaagatggctgtagctgccgatttccagaagaagaagaaggaggatgtgaactgagagtgaagttcagcaggagcgcagacgcccccgcgtaccagcagggccagaaccagctctataacgagctgaatctaggacgaagagaggagtacgatgttttggacaagagacgtggccgggaccctgagatggggggaaagccgagaaggaagaaccctcaggaaggcctgtacaatgaactgcagaaagataagatggcggaggcctacagtgagattgggatgaaaggcgagcgccggaggggcaaggggcacgatggcctttaccagggtctcagtacagccaccaaggacacctacgacgcccttcacatgcaggccctgccccctcgctctagtggctccggcgagggcagaggaagtctactaacctgcggagatgtggaagaaaatcctggcccacatatgaccgagtacaagcccacggtgcgcctcgccacccgcgacgacgtccccagggccgtacgcaccctcgccgccgcgttcgccgactaccccgccacgcgccacaccgtcgatccggaccgccacatcgagcgggtcaccgagctgcaagaactcttcctcacgcgcgtcgggctcgacatcggcaaggtgtgggtcgcggacgacggcgccgcggtggcggtctggaccacgccggagagcgtcgaagcgggggcggtgttcgccgagatcggcccgcgcatggccgagttgagcggttcccggctggccgcgcagcaacagatggaaggcctcctggcgccgcaccggcccaaggagcccgcgtggttcctggccaccgtcggcgtctcgcccgaccaccagggcaagggtctgggcagcgccgtcgtgctccccggagtggaggcggccgagcgcgccggggtgcccgccttcctggagacctccgcgccccgcaacctccccttctacgagcggctcggcttcaccgtcaccgccgacgtcgaggtgcccgaaggaccgcgcacctggtgcatgacccgcaagcccggtgcctga

SEQ ID NO: 1601 - DNA, 2103 bp, Artificial Sequence
  Synthetic Polynucleotides
atggccttaccagtgaccgccttgctcctgccgctggccttgctgctccacgccgccaggccgaacagctgcgagctgaccaacatcacaatcgccatcgagaaagaggaatgccggttctgcatcagcatcaacaccacttggtgcgccggctactgctacacccgcgatctggtgtataaggaccccgccagacctaagatccagaaaacctgcaccttcaaagagctggtctacgagacagtcagagtgcctggatgtgcccaccacgccgatagcctgtacacataccctgtggctacccagtgccactgcggcaagtgtgatagcgacagcaccgattgcaccgtcagaggactgggacccagctactgtagcttcggcgagatgaaggaaggcggaggcggaagtggaggcggaggatctggcggcggaggctctgctcctgatgtgcaggattgccctgagtgcaccctgcaagagaaccccttcttctcccaacctggcgctcctatcctccagtgcatgggctgctgcttcagccgggcttatcccacacctctgcggagcaagaaaaccatgctggtccagaaaaacgtgaccagcgagagcacctgttgtgtggctaagagctacaacagagtgaccgtgatgggcggcttcaaggtggaaaatcacaccgcctgccactgctccacctgttactaccacaagagcacgcgtgagcagaaactgatctcggaagaggatctggcgaagcccaccacgacgccagcgccgcgaccaccaacaccggcgcccaccatcgcgtcgcagcccctgtccctgcgcccagaggcgtgccggccagcggcggggggcgcagtgcacacgagggggctggacttcgcctgtgacatctacatctgggcgcccttggccgggacttgtggggtccttctcctgtcactggttatcaccctttactgcaaacggggcagaaagaaactcctgtatatattcaaacaaccatttatgagaccagtacaaactactcaagaggaagatggctgtagctgccgatttccagaagaagaagaaggaggatgtgaactgagagtgaagttcagcaggagcgcagacgcccccgcgtaccagcagggccagaaccagctctataacgagctgaatctaggacgaagagaggagtacgatgttttggacaagagacgtggccgggaccctgagatggggggaaagccgagaaggaagaaccctcaggaaggcctgtacaatgaactgcagaaagataagatggcggaggcctacagtgagattgggatgaaaggcgagcgccggaggggcaaggggcacgatggcctttaccagggtctcagtacagccaccaaggacacctacgacgcccttcacatgcaggccctgccccctcgctctagtggctccggcgagggcagaggaagtctactaacctgcggagatgtggaagaaaatcctggcccacatatgaccgagtacaagcccacggtgcgcctcgccacccgcgacgacgtccccagggccgtacgcaccctcgccgccgcgttcgccgactaccccgccacgcgccacaccgtcgatccggaccgccacatcgagcgggtcaccgagctgcaagaactcttcctcacgcgcgtcgggctcgacatcggcaaggtgtgggtcgcggacgacggcgccgcggtggcggtctggaccacgccggagagcgtcgaagcgggggcggtgttcgccgagatcggcccgcgcatggccgagttgagcggttcccggctggccgcgcagcaacagatggaaggcctcctggcgccgcaccggcccaaggagcccgcgtggttcctggccaccgtcggcgtctcgcccgaccaccagggcaagggtctgggcagcgccgtcgtgctccccggagtggaggcggccgagcgcgccggggtgcccgccttcctggagacctccgcgccccgcaacctccccttctacgagcggctcggcttcaccgtcaccgccgacgtcgaggtgcccgaaggaccgcgcacctggtgcatgacccgcaagcccggtgcctga

SEQ ID NO: 1602 - DNA, 2196 bp, Artificial Sequence
  Synthetic Polynucleotides
atggccttaccagtgaccgccttgctcctgccgctggccttgctgctccacgccgccaggccggacctggaaaccaccctgacacagagccctgccaccctgagtgtgtccccaggcgagagagtgaccctgagctgtagagccagccagagcgtgggcagcaacctggcctggtatcagcagaagttcggccaggcccccagactgctgatctacgacgccagcacaagagccaccggcatccccgccagattttctggcagcggctccggcaccgagttcaccctgaccatcagcagactggaacccgaggacttcgccgtgtactactgccaccagtacggcagcagccccagaacctttggacagggcaccaaggtggacatcaagcggggcggaggcggaagtggaggcggaggatctggcggcggaggctctcaggtgcaactggtgcagagcggagccgaagtgaagaaacctggggccagcgtgaaggtgtcctgcaaggccagcggctacacctttaccacctacggcatctcttgggtgcgccaggctcctggacagggactggaatggatgggctggatcagcgcctacaacggccacaccaactacgcccagatgctccagggcagagtgaccatgaccaccgacaccagcacctccaccgcctacatggaactgcggggcctgagaagcgacgacaccgccgtgtattattgcgccagagaagcctacgcctcctacggcagcggcagctactggaccgattattggggccagggcaccctcgtgaccgtgtctagtacgcgtgagcagaaactgatctcggaagaggatctggcgaagcccaccacgacgccagcgccgcgaccaccaacaccggcgcccaccatcgcgtcgcagcccctgtccctgcgcccagaggcgtgccggccagcggcggggggcgcagtgcacacgagggggctggacttcgcctgtgacatctacatctgggcgcccttggccgggacttgtggggtccttctcctgtcactggttatcaccctttactgcaaacggggcagaaagaaactcctgtatatattcaaacaaccatttatgagaccagtacaaactactcaagaggaagatggctgtagctgccgatttccagaagaagaagaaggaggatgtgaactgagagtgaagttcagcaggagcgcagacgcccccgcgtaccagcagggccagaaccagctctataacgagctgaatctaggacgaagagaggagtacgatgttttggacaagagacgtggccgggaccctgagatggggggaaagccgagaaggaagaaccctcaggaaggcctgtacaatgaactgcagaaagataagatggcggaggcctacagtgagattgggatgaaaggcgagcgccggaggggcaaggggcacgatggcctttaccagggtctcagtacagccaccaaggacacctacgacgcccttcacatgcaggccctgccccctcgctctagtggctccggcgagggcagaggaagtctactaacctgcggagatgtggaagaaaatcctggcccacatatgaccgagtacaagcccacggtgcgcctcgccacccgcgacgacgtccccagggccgtacgcaccctcgccgccgcgttcgccgactaccccgccacgcgccacaccgtcgatccggaccgccacatcgagcgggtcaccgagctgcaagaactcttcctcacgcgcgtcgggctcgacatcggcaaggtgtgggtcgcggacgacggcgccgcggtggcggtctggaccacgccggagagcgtcgaagcgggggcggtgttcgccgagatcggcccgcgcatggccgagttgagcggttcccggctggccgcgcagcaacagatggaaggcctcctggcgccgcaccggcccaaggagcccgcgtggttcctggccaccgtcggcgtctcgcccgaccaccagggcaagggtctgggcagcgccgtcgtgctccccggagtggaggcggccgagcgcgccggggtgcccgccttcctggagacctccgcgccccgcaacctccccttctacgagcggctcggcttcaccgtcaccgccgacgtcgaggtgcccgaaggaccgcgcacctggtgcatgacccgcaagcccggtgcctga

SEQ ID NO: 1603 - DNA, 2175 bp, Artificial Sequence
  Synthetic Polynucleotides
atggccttaccagtgaccgccttgctcctgccgctggccttgctgctccacgccgccaggccggacgacgttgtgatgacccagacccccctgagcctgcctgtgacacctggcgaacctgccagcatcagctgtcggagcagccagagcctggtgcacagaaacggcaacacctacctgcactggtatctccagaagcccggccagagccccaagctgctgatccacaaggtgtccaacagattcagcggcgtgcccgacagattctccggcagcggctctggcaccgacttcaccctgaagatcagccgggtggaagccgaggacctgggcgtgtacttctgtagccagagcacccatgtgccccccctgacatttggagccggcaccaagctggaactgaagggcggaggcggaagtggaggcggaggatctggcggcggaggctctgaagtgcagctggtgcagtctggcgctgaggtggaaaagcctggggccagcgtgaagattagctgcaaggccagcggcagcagcttcaccggctacaacatgaactgggtgcgccagaacatcggcaagagcctggaatggatcggagccatcgacccctactacggcggcaccagctacaaccagaagttcaagggcagagccaccctgaccgtggacaagagcaccagcaccgcctacatgcacctgaagtccctgcggagcgaggacaccgccgtgtactactgtgtgtccggcatggaatattggggccagggcaccagcgtgaccgtgtctagtacgcgtgagcagaaactgatctcggaagaggatctggcgaagcccaccacgacgccagcgccgcgaccaccaacaccggcgcccaccatcgcgtcgcagcccctgtccctgcgcccagaggcgtgccggccagcggcggggggcgcagtgcacacgagggggctggacttcgcctgtgacatctacatctgggcgcccttggccgggacttgtggggtccttctcctgtcactggttatcaccctttactgcaaacggggcagaaagaaactcctgtatatattcaaacaaccatttatgagaccagtacaaactactcaagaggaagatggctgtagctgccgatttccagaagaagaagaaggaggatgtgaactgagagtgaagttcagcaggagcgcagacgcccccgcgtaccagcagggccagaaccagctctataacgagctgaatctaggacgaagagaggagtacgatgttttggacaagagacgtggccgggaccctgagatggggggaaagccgagaaggaagaaccctcaggaaggcctgtacaatgaactgcagaaagataagatggcggaggcctacagtgagattgggatgaaaggcgagcgccggaggggcaaggggcacgatggcctttaccagggtctcagtacagccaccaaggacacctacgacgcccttcacatgcaggccctgccccctcgctctagtggctccggcgagggcagaggaagtctactaacctgcggagatgtggaagaaaatcctggcccacatatgaccgagtacaagcccacggtgcgcctcgccacccgcgacgacgtccccagggccgtacgcaccctcgccgccgcgttcgccgactaccccgccacgcgccacaccgtcgatccggaccgccacatcgagcgggtcaccgagctgcaagaactcttcctcacgcgcgtcgggctcgacatcggcaaggtgtgggtcgcggacgacggcgccgcggtggcggtctggaccacgccggagagcgtcgaagcgggggcggtgttcgccgagatcggcccgcgcatggccgagttgagcggttcccggctggccgcgcagcaacagatggaaggcctcctggcgccgcaccggcccaaggagcccgcgtggttcctggccaccgtcggcgtctcgcccgaccaccagggcaagggtctgggcagcgccgtcgtgctccccggagtggaggcggccgagcgcgccggggtgcccgccttcctggagacctccgcgccccgcaacctccccttctacgagcggctcggcttcaccgtcaccgccgacgtcgaggtgcccgaaggaccgcgcacctggtgcatgacccgcaagcccggtgcctga

SEQ ID NO: 1604 - DNA, 2169 bp, Artificial Sequence
  Synthetic Polynucleotides
atggccttaccagtgaccgccttgctcctgccgctggccttgctgctccacgccgccaggccggacgagatcgtgatgacccagacccctgccaccctgtctgtgtctgccggcgagagagtgaccattacctgcaaggccagccagagcgtgtccaacgacgtgacctggtatcagcagaagcccggccaggcccccagactgctgatctacagcgccagcaacagatacagcggcgtgcccgccagattttccggcagcggctacggcaccgagttcaccttcaccatcagcagcgtgcagagcgaggacttcgccgtgtacttctgtcagcaagactacagcagcttcggccagggcaccaagctggaaatcaagaggggcggaggcggaagtggaggcggaggatctggcggcggaggctctcaggtgcagctggtggaatctggacctggcgtggtgcagcctggcagaagcctgagaatcagctgtgccgtgtccggcttcagcgtgaccaactacggcgtgcactgggtgcgccagccacctggaaaaggactggaatggctgggcgtgatctgggctggcggcatcaccaactacaacagcgccttcatgtcccggctgaccatctccaaggacaacagcaagaacaccgtgtacctccagatgaacagcctgcgggccgaggacaccgccatgtactactgtgcttccagaggcggccactacggctacgccctggattattggggccagggaaccctcgtgaccgtgtcctctacgcgtgagcagaaactgatctcggaagaggatctggcgaagcccaccacgacgccagcgccgcgaccaccaacaccggcgcccaccatcgcgtcgcagcccctgtccctgcgcccagaggcgtgccggccagcggcggggggcgcagtgcacacgagggggctggacttcgcctgtgacatctacatctgggcgcccttggccgggacttgtggggtccttctcctgtcactggttatcaccctttactgcaaacggggcagaaagaaactcctgtatatattcaaacaaccatttatgagaccagtacaaactactcaagaggaagatggctgtagctgccgatttccagaagaagaagaaggaggatgtgaactgagagtgaagttcagcaggagcgcagacgcccccgcgtaccagcagggccagaaccagctctataacgagctgaatctaggacgaagagaggagtacgatgttttggacaagagacgtggccgggaccctgagatggggggaaagccgagaaggaagaaccctcaggaaggcctgtacaatgaactgcagaaagataagatggcggaggcctacagtgagattgggatgaaaggcgagcgccggaggggcaaggggcacgatggcctttaccagggtctcagtacagccaccaaggacacctacgacgcccttcacatgcaggccctgccccctcgctctagtggctccggcgagggcagaggaagtctactaacctgcggagatgtggaagaaaatcctggcccacatatgaccgagtacaagcccacggtgcgcctcgccacccgcgacgacgtccccagggccgtacgcaccctcgccgccgcgttcgccgactaccccgccacgcgccacaccgtcgatccggaccgccacatcgagcgggtcaccgagctgcaagaactcttcctcacgcgcgtcgggctcgacatcggcaaggtgtgggtcgcggacgacggcgccgcggtggcggtctggaccacgccggagagcgtcgaagcgggggcggtgttcgccgagatcggcccgcgcatggccgagttgagcggttcccggctggccgcgcagcaacagatggaaggcctcctggcgccgcaccggcccaaggagcccgcgtggttcctggccaccgtcggcgtctcgcccgaccaccagggcaagggtctgggcagcgccgtcgtgctccccggagtggaggcggccgagcgcgccggggtgcccgccttcctggagacctccgcgccccgcaacctccccttctacgagcggctcggcttcaccgtcaccgccgacgtcgaggtgcccgaaggaccgcgcacctggtgcatgacccgcaagcccggtgcctga

SEQ ID NO: 1605 - DNA, 2175 bp, Artificial Sequence
  Synthetic Polynucleotides
atggccttaccagtgaccgccttgctcctgccgctggccttgctgctccacgccgccaggccggacatccagatgacccagaccgccagcagcctgcctgcctctctgggcgacagagtgaccatctcctgtagcgccagccaggacatcagcaactacctgaactggtatcagcagaaacccgacggcaccgtgaagctgctgatcttctacagcagcaacctgcacagcggcgtgcccagcagattttctggcggcggaagcggcaccgactacagcctgaccatcagcaatctggaacccgaggacattgccacctacttttgccaccagtacagcaagctgccctggacctttggcggaggcaccaagctggaaatcaagagaggcggaggcggaagtggaggcggaggatctggcggcggaggctctgaagtgaccctggtggaaagcggcggagacttcgtgaagcctggcggctctctgaaggtgtcctgtgccgccagcggcttcgcctttagccactacgccatgagctgggtgcgccagacccctgccaagagactggaatgggtggcctacatcagcagcggcggctccggcacctactactccgatagcgtgaagggccggttcaccatcagccgggacaacgccaagaacaccctgtacctccagatgcggagcctgcggagcgaggacagcgccatgtatttctgcaccagagtgaagctgggcacctattacttcgactcttggggccagggcaccaccctgaccgtgtcatctacgcgtgagcagaaactgatctcggaagaggatctggcgaagcccaccacgacgccagcgccgcgaccaccaacaccggcgcccaccatcgcgtcgcagcccctgtccctgcgcccagaggcgtgccggccagcggcggggggcgcagtgcacacgagggggctggacttcgcctgtgacatctacatctgggcgcccttggccgggacttgtggggtccttctcctgtcactggttatcaccctttactgcaaacggggcagaaagaaactcctgtatatattcaaacaaccatttatgagaccagtacaaactactcaagaggaagatggctgtagctgccgatttccagaagaagaagaaggaggatgtgaactgagagtgaagttcagcaggagcgcagacgcccccgcgtaccagcagggccagaaccagctctataacgagctgaatctaggacgaagagaggagtacgatgttttggacaagagacgtggccgggaccctgagatggggggaaagccgagaaggaagaaccctcaggaaggcctgtacaatgaactgcagaaagataagatggcggaggcctacagtgagattgggatgaaaggcgagcgccggaggggcaaggggcacgatggcctttaccagggtctcagtacagccaccaaggacacctacgacgcccttcacatgcaggccctgccccctcgctctagtggctccggcgagggcagaggaagtctactaacctgcggagatgtggaagaaaatcctggcccacatatgaccgagtacaagcccacggtgcgcctcgccacccgcgacgacgtccccagggccgtacgcaccctcgccgccgcgttcgccgactaccccgccacgcgccacaccgtcgatccggaccgccacatcgagcgggtcaccgagctgcaagaactcttcctcacgcgcgtcgggctcgacatcggcaaggtgtgggtcgcggacgacggcgccgcggtggcggtctggaccacgccggagagcgtcgaagcgggggcggtgttcgccgagatcggcccgcgcatggccgagttgagcggttcccggctggccgcgcagcaacagatggaaggcctcctggcgccgcaccggcccaaggagcccgcgtggttcctggccaccgtcggcgtctcgcccgaccaccagggcaagggtctgggcagcgccgtcgtgctccccggagtggaggcggccgagcgcgccggggtgcccgccttcctggagacctccgcgccccgcaacctccccttctacgagcggctcggcttcaccgtcaccgccgacgtcgaggtgcccgaaggaccgcgcacctggtgcatgacccgcaagcccggtgcctga

SEQ ID NO: 1606 - DNA, 2181 bp, Artificial Sequence
  Synthetic Polynucleotides
atggccttaccagtgaccgccttgctcctgccgctggccttgctgctccacgccgccaggccgcagttcgtgctgacccagagcccttctgcctctgctgccctgggagcctctgccaagctgacctgtacactgagcagcgcccacaagacctacaccatcgactggtatcagcagcagaagggaaaggcccccagatacctgatccaagtgaagtccgacggcacctacacaaaggccaccggcgtgcccgatagattcagcggcagtagcagcggagccgatagatacctgattatccccagcgtgcaggccgacgacgaggccgattactactgcggcaccgattacaccggcggctacgtgttcggcggaggcacacaactgaccgtgacaggcggaggcggaagtggaggcggaggatctggcggcggaggctctgagcaactgaaagagtctggcggcggactgttcaagcccaccgataccctgaccctgacctgcaccgtgtccggcttcagcctgagctactacggcgtgaactgggtgcgccaggcccctggcaatggcctggaatggatcggcacaatcggcggcagcggcgacacctactatgcctcttgggccaagtccagaagcaccatcatcagaaacaccaacgagaacaccgtgaccctgaagatgaccagcctgacagccgccgacaccgccacctacttttgcgtcagatacgccaacatcggctacgagtatttcaacgtgtggggacccggcaccctcgtgaccgtgtcatctacgcgtgagcagaaactgatctcggaagaggatctggcgaagcccaccacgacgccagcgccgcgaccaccaacaccggcgcccaccatcgcgtcgcagcccctgtccctgcgcccagaggcgtgccggccagcggcggggggcgcagtgcacacgagggggctggacttcgcctgtgacatctacatctgggcgcccttggccgggacttgtggggtccttctcctgtcactggttatcaccctttactgcaaacggggcagaaagaaactcctgtatatattcaaacaaccatttatgagaccagtacaaactactcaagaggaagatggctgtagctgccgatttccagaagaagaagaaggaggatgtgaactgagagtgaagttcagcaggagcgcagacgcccccgcgtaccagcagggccagaaccagctctataacgagctgaatctaggacgaagagaggagtacgatgttttggacaagagacgtggccgggaccctgagatggggggaaagccgagaaggaagaaccctcaggaaggcctgtacaatgaactgcagaaagataagatggcggaggcctacagtgagattgggatgaaaggcgagcgccggaggggcaaggggcacgatggcctttaccagggtctcagtacagccaccaaggacacctacgacgcccttcacatgcaggccctgccccctcgctctagtggctccggcgagggcagaggaagtctactaacctgcggagatgtggaagaaaatcctggcccacatatgaccgagtacaagcccacggtgcgcctcgccacccgcgacgacgtccccagggccgtacgcaccctcgccgccgcgttcgccgactaccccgccacgcgccacaccgtcgatccggaccgccacatcgagcgggtcaccgagctgcaagaactcttcctcacgcgcgtcgggctcgacatcggcaaggtgtgggtcgcggacgacggcgccgcggtggcggtctggaccacgccggagagcgtcgaagcgggggcggtgttcgccgagatcggcccgcgcatggccgagttgagcggttcccggctggccgcgcagcaacagatggaaggcctcctggcgccgcaccggcccaaggagcccgcgtggttcctggccaccgtcggcgtctcgcccgaccaccagggcaagggtctgggcagcgccgtcgtgctccccggagtggaggcggccgagcgcgccggggtgcccgccttcctggagacctccgcgccccgcaacctccccttctacgagcggctcggcttcaccgtcaccgccgacgtcgaggtgcccgaaggaccgcgcacctggtgcatgacccgcaagcccggtgcctga

SEQ ID NO: 1607 - DNA, 2196 bp, Artificial Sequence
  Synthetic Polynucleotides
atggccttaccagtgaccgccttgctcctgccgctggccttgctgctccacgccgccaggccgcagttcgtgctgacccagagcccttctgtgtctgccgccctgggagcctctgccaagctgacctgtacactgagcagcgcccacaagacctacaccatcgactggtatcagcagcagcagggcgaggcccccagatacctgatgcaagtgaagtccgacggcagctacaccaagggcaccggcgtgcccgatagattcagcggcagtagcagcggagccgatagatacctgattatccccagcgtgcaggccgacgacgaggccggatatgtgtgcggcgctgacgacaatggcggctacgtgttcggcggaggcacccaactgacagtgacaggcggaggcggaagtggaggcggaggatctggcggcggaggctctcagagcgtgaaagagtctgagggcggcctgttcaagcccaccgataccctgaccctgacctgcaccgtgtccggcttcagcctgagcagacacgccctgacatgggtgcgccaggcccctggaaatggcctggaatggatcggagccatcgacaacgccggcaccacctactatgcctcttgggccaagtccagaagcaccatcacccggaacaccgacctgcacaccgtgaccctgaagatgaccagcctgaccgccagcgacaccgccacctacttttgcgccagagtgttctacgacatcaacagcggctactacctggacggcatggacctgtggggacctggcacacttgtgaccgtgtccagcacgcgtgagcagaaactgatctcggaagaggatctggcgaagcccaccacgacgccagcgccgcgaccaccaacaccggcgcccaccatcgcgtcgcagcccctgtccctgcgcccagaggcgtgccggccagcggcggggggcgcagtgcacacgagggggctggacttcgcctgtgacatctacatctgggcgcccttggccgggacttgtggggtccttctcctgtcactggttatcaccctttactgcaaacggggcagaaagaaactcctgtatatattcaaacaaccatttatgagaccagtacaaactactcaagaggaagatggctgtagctgccgatttccagaagaagaagaaggaggatgtgaactgagagtgaagttcagcaggagcgcagacgcccccgcgtaccagcagggccagaaccagctctataacgagctgaatctaggacgaagagaggagtacgatgttttggacaagagacgtggccgggaccctgagatggggggaaagccgagaaggaagaaccctcaggaaggcctgtacaatgaactgcagaaagataagatggcggaggcctacagtgagattgggatgaaaggcgagcgccggaggggcaaggggcacgatggcctttaccagggtctcagtacagccaccaaggacacctacgacgcccttcacatgcaggccctgccccctcgctctagtggctccggcgagggcagaggaagtctactaacctgcggagatgtggaagaaaatcctggcccacatatgaccgagtacaagcccacggtgcgcctcgccacccgcgacgacgtccccagggccgtacgcaccctcgccgccgcgttcgccgactaccccgccacgcgccacaccgtcgatccggaccgccacatcgagcgggtcaccgagctgcaagaactcttcctcacgcgcgtcgggctcgacatcggcaaggtgtgggtcgcggacgacggcgccgcggtggcggtctggaccacgccggagagcgtcgaagcgggggcggtgttcgccgagatcggcccgcgcatggccgagttgagcggttcccggctggccgcgcagcaacagatggaaggcctcctggcgccgcaccggcccaaggagcccgcgtggttcctggccaccgtcggcgtctcgcccgaccaccagggcaagggtctgggcagcgccgtcgtgctccccggagtggaggcggccgagcgcgccggggtgcccgccttcctggagacctccgcgccccgcaacctccccttctacgagcggctcggcttcaccgtcaccgccgacgtcgaggtgcccgaaggaccgcgcacctggtgcatgacccgcaagcccggtgcctga

SEQ ID NO: 1608 - DNA, 2178 bp, Artificial Sequence
  Synthetic Polynucleotides
atggccttaccagtgaccgccttgctcctgccgctggccttgctgctccacgccgccaggccggacatccagatgacccagagccccagcagcctgtctgccagcgtgggcgacagagtgaccatcacctgtagagccagccagggcatcagctcttggctggcctggtatcagcagaagcccgagaaggcccccaagagcctgatctacgccgcctctagtctccagagcggcgtgcccagcagattttctggcagcggctccggcaccgacttcaccctgacaatcagctccctccagcccgaggacttcgccacctactactgccagcagtacaacagctacccccccacctttggcggaggcaccaaggtggaaatcaagggcggaggcggaagtggaggcggaggatctggcggcggaggctctgaagtgcaactggtggaatcaggcggcggactggtgcagcctggcgagtctctgagactgagctgtgtggcctccggcttcaccttcagccggtacaagatgaactgggtgcgccaggcccctggcaagggactggaatgggtgtcctacatcagccgcagcggcagagacatctactacgccgacagcgtgaagggccggttcaccatcagcagagacaacgccaagaacagcctgtacctccagatgaactccctgcgggacgaggacaccgccgtgtactactgtgccggaaccgtgaccacctattactacttcggcatggacgtgtggggccacggcaccaccgtgacagtgtcatctacgcgtgagcagaaactgatctcggaagaggatctggcgaagcccaccacgacgccagcgccgcgaccaccaacaccggcgcccaccatcgcgtcgcagcccctgtccctgcgcccagaggcgtgccggccagcggcggggggcgcagtgcacacgagggggctggacttcgcctgtgacatctacatctgggcgcccttggccgggacttgtggggtccttctcctgtcactggttatcaccctttactgcaaacggggcagaaagaaactcctgtatatattcaaacaaccatttatgagaccagtacaaactactcaagaggaagatggctgtagctgccgatttccagaagaagaagaaggaggatgtgaactgagagtgaagttcagcaggagcgcagacgcccccgcgtaccagcagggccagaaccagctctataacgagctgaatctaggacgaagagaggagtacgatgttttggacaagagacgtggccgggaccctgagatggggggaaagccgagaaggaagaaccctcaggaaggcctgtacaatgaactgcagaaagataagatggcggaggcctacagtgagattgggatgaaaggcgagcgccggaggggcaaggggcacgatggcctttaccagggtctcagtacagccaccaaggacacctacgacgcccttcacatgcaggccctgccccctcgctctagtggctccggcgagggcagaggaagtctactaacctgcggagatgtggaagaaaatcctggcccacatatgaccgagtacaagcccacggtgcgcctcgccacccgcgacgacgtccccagggccgtacgcaccctcgccgccgcgttcgccgactaccccgccacgcgccacaccgtcgatccggaccgccacatcgagcgggtcaccgagctgcaagaactcttcctcacgcgcgtcgggctcgacatcggcaaggtgtgggtcgcggacgacggcgccgcggtggcggtctggaccacgccggagagcgtcgaagcgggggcggtgttcgccgagatcggcccgcgcatggccgagttgagcggttcccggctggccgcgcagcaacagatggaaggcctcctggcgccgcaccggcccaaggagcccgcgtggttcctggccaccgtcggcgtctcgcccgaccaccagggcaagggtctgggcagcgccgtcgtgctccccggagtggaggcggccgagcgcgccggggtgcccgccttcctggagacctccgcgccccgcaacctccccttctacgagcggctcggcttcaccgtcaccgccgacgtcgaggtgcccgaaggaccgcgcacctggtgcatgacccgcaagcccggtgcctga

SEQ ID NO: 1609 - DNA, 2181 bp, Artificial Sequence
  Synthetic Polynucleotides
atggccttaccagtgaccgccttgctcctgccgctggccttgctgctccacgccgccaggccggacatccagatgacccagagccccagcagcctgtctgccagcgtgggcgacagagtgaccatcacctgtagagccagccagggcatcagctcttggctggcctggtatcagcagaagcccgagaaggcccccaagagcctgatctacgccgcctctagtctccagagcggcgtgcccagcagattttctggcagcggctccggcaccgacttcaccctgacaatcagctccctccagcccgaggacttcgccacctactactgccagcagtacaacagctaccctcccacctttggcggaggcaccaaggtggaaatcaagggcggaggcggaagtggaggcggaggatctggcggcggaggctctgaagtgcaactggtggaatccgggggaggctctgtgcagcctggcgagtctctgagactgagctgtgtggcctccggcttcaccttcagccggtacaagatgaactgggtgcgccaggcccctggcaagggactggaatgggtgtcctacatcagccgcagcggcagagacatctactacgccgacagcgtgaagggccggttcaccatcagcagagacaacgccaagaacagcctgtacctccagatgaactccctgcgggacgaggacaccgccgtgtactactgtgccggaaccgtgaccacctattactacgacttcggcatggacgtgtggggccagggcacaaccgtgacagtgtctagcacgcgtgagcagaaactgatctcggaagaggatctggcgaagcccaccacgacgccagcgccgcgaccaccaacaccggcgcccaccatcgcgtcgcagcccctgtccctgcgcccagaggcgtgccggccagcggcggggggcgcagtgcacacgagggggctggacttcgcctgtgacatctacatctgggcgcccttggccgggacttgtggggtccttctcctgtcactggttatcaccctttactgcaaacggggcagaaagaaactcctgtatatattcaaacaaccatttatgagaccagtacaaactactcaagaggaagatggctgtagctgccgatttccagaagaagaagaaggaggatgtgaactgagagtgaagttcagcaggagcgcagacgcccccgcgtaccagcagggccagaaccagctctataacgagctgaatctaggacgaagagaggagtacgatgttttggacaagagacgtggccgggaccctgagatggggggaaagccgagaaggaagaaccctcaggaaggcctgtacaatgaactgcagaaagataagatggcggaggcctacagtgagattgggatgaaaggcgagcgccggaggggcaaggggcacgatggcctttaccagggtctcagtacagccaccaaggacacctacgacgcccttcacatgcaggccctgccccctcgctctagtggctccggcgagggcagaggaagtctactaacctgcggagatgtggaagaaaatcctggcccacatatgaccgagtacaagcccacggtgcgcctcgccacccgcgacgacgtccccagggccgtacgcaccctcgccgccgcgttcgccgactaccccgccacgcgccacaccgtcgatccggaccgccacatcgagcgggtcaccgagctgcaagaactcttcctcacgcgcgtcgggctcgacatcggcaaggtgtgggtcgcggacgacggcgccgcggtggcggtctggaccacgccggagagcgtcgaagcgggggcggtgttcgccgagatcggcccgcgcatggccgagttgagcggttcccggctggccgcgcagcaacagatggaaggcctcctggcgccgcaccggcccaaggagcccgcgtggttcctggccaccgtcggcgtctcgcccgaccaccagggcaagggtctgggcagcgccgtcgtgctccccggagtggaggcggccgagcgcgccggggtgcccgccttcctggagacctccgcgccccgcaacctccccttctacgagcggctcggcttcaccgtcaccgccgacgtcgaggtgcccgaaggaccgcgcacctggtgcatgacccgcaagcccggtgcctga

SEQ ID NO: 1610 - DNA, 2178 bp, Artificial Sequence
  Synthetic Polynucleotides
atggccttaccagtgaccgccttgctcctgccgctggccttgctgctccacgccgccaggccgcagtctgtgctgacacagcctccatctgcctctggcacacctggacagagagtgaccatcagctgtagcggcagcagaagcaacgtcggcggcaactacgtgttctggtatcagcaggtcccaggcgctacccctaagctgctgatctacagaagcaatcagcggcctagcggcgtgcccgatagatttgccggaagcaagagcggcagctctgccagccttgccatctctggactgagaagcgaggacgaggccgactactactgtgccacctgggatgatagcctgagcggcttcgtgtttggcaccggcaccaaagtgacagtgcttggtggcggaggcggaagtggaggcggaggatctggcggcggaggctctgaagttcagctggttgaatctggcggcggactggttaagcctggcggatctctgagactgtcttgtgccgccagcggcttcaccttcagcgattactacatgagctggatcagacaggcccctggcaaaggactggaatgggtgtcctacatcagcagcagcggctccaccatctactacgccgatagcgtgaagggcagattcaccatcagccgggacaacgccaagaacagcctgtacctccagatgaactccctgagagccgaggacaccgccgtgtactattgcgccagaggctacggcaaagcctacgatcaatggggccagggcacactggtcaccgtttcttctacgcgtgagcagaaactgatctcggaagaggatctggcgaagcccaccacgacgccagcgccgcgaccaccaacaccggcgcccaccatcgcgtcgcagcccctgtccctgcgcccagaggcgtgccggccagcggcggggggcgcagtgcacacgagggggctggacttcgcctgtgacatctacatctgggcgcccttggccgggacttgtggggtccttctcctgtcactggttatcaccctttactgcaaacggggcagaaagaaactcctgtatatattcaaacaaccatttatgagaccagtacaaactactcaagaggaagatggctgtagctgccgatttccagaagaagaagaaggaggatgtgaactgagagtgaagttcagcaggagcgcagacgcccccgcgtaccagcagggccagaaccagctctataacgagctgaatctaggacgaagagaggagtacgatgttttggacaagagacgtggccgggaccctgagatggggggaaagccgagaaggaagaaccctcaggaaggcctgtacaatgaactgcagaaagataagatggcggaggcctacagtgagattgggatgaaaggcgagcgccggaggggcaaggggcacgatggcctttaccagggtctcagtacagccaccaaggacacctacgacgcccttcacatgcaggccctgccccctcgctctagtggctccggcgagggcagaggaagtctactaacctgcggagatgtggaagaaaatcctggcccacatatgaccgagtacaagcccacggtgcgcctcgccacccgcgacgacgtccccagggccgtacgcaccctcgccgccgcgttcgccgactaccccgccacgcgccacaccgtcgatccggaccgccacatcgagcgggtcaccgagctgcaagaactcttcctcacgcgcgtcgggctcgacatcggcaaggtgtgggtcgcggacgacggcgccgcggtggcggtctggaccacgccggagagcgtcgaagcgggggcggtgttcgccgagatcggcccgcgcatggccgagttgagcggttcccggctggccgcgcagcaacagatggaaggcctcctggcgccgcaccggcccaaggagcccgcgtggttcctggccaccgtcggcgtctcgcccgaccaccagggcaagggtctgggcagcgccgtcgtgctccccggagtggaggcggccgagcgcgccggggtgcccgccttcctggagacctccgcgccccgcaacctccccttctacgagcggctcggcttcaccgtcaccgccgacgtcgaggtgcccgaaggaccgcgcacctggtgcatgacccgcaagcccggtgcctga

SEQ ID NO: 1611 - DNA, 2175 bp, Artificial Sequence
  Synthetic Polynucleotides
atggccttaccagtgaccgccttgctcctgccgctggccttgctgctccacgccgccaggccgcagtctgtggtcacacagccacctagcatgtctgccgctccaggccagcaagtgaccatctcttgtagcggcggcaacagcaacatcgagcggaactacgtgtcctggtatctgcaactgcctggcacagcccctaagctggtcatcttcgacaacgacagacggcccagcggcatccccgatagattttctggcagcaagagcggcaccagcgccacactgggaattaccggacttcagacaggcgacgaggccgactactactgtggcacatgggactctagcctgagaggctgggttttcggcggaggcacaaagctgacagtgcttggtggcggaggcggaagtggaggcggaggatctggcggcggaggctctgaagtgcagctcgttgagtctggcggcggactgattcaacctggcggaagcctgagactgagctgtgccgcttccggcttcaccttcagcaactacgccatgaactgggttcgacaggcccctggcaaaggactggaatgggtgtccaccatcaacggcagaggcagcagcaccatctacgccgattctgtgaagggcagattcaccatcagccgggacaacagcaagaacaccctgtacctccagatgaactccctgagagccgaggacaccgccacctattactgtgcccggtacatcagcagaggactgggcgattcttggggccagggcacactggttacagtgacgcgtgagcagaaactgatctcggaagaggatctggcgaagcccaccacgacgccagcgccgcgaccaccaacaccggcgcccaccatcgcgtcgcagcccctgtccctgcgcccagaggcgtgccggccagcggcggggggcgcagtgcacacgagggggctggacttcgcctgtgacatctacatctgggcgcccttggccgggacttgtggggtccttctcctgtcactggttatcaccctttactgcaaacggggcagaaagaaactcctgtatatattcaaacaaccatttatgagaccagtacaaactactcaagaggaagatggctgtagctgccgatttccagaagaagaagaaggaggatgtgaactgagagtgaagttcagcaggagcgcagacgcccccgcgtaccagcagggccagaaccagctctataacgagctgaatctaggacgaagagaggagtacgatgttttggacaagagacgtggccgggaccctgagatggggggaaagccgagaaggaagaaccctcaggaaggcctgtacaatgaactgcagaaagataagatggcggaggcctacagtgagattgggatgaaaggcgagcgccggaggggcaaggggcacgatggcctttaccagggtctcagtacagccaccaaggacacctacgacgcccttcacatgcaggccctgccccctcgctctagtggctccggcgagggcagaggaagtctactaacctgcggagatgtggaagaaaatcctggcccacatatgaccgagtacaagcccacggtgcgcctcgccacccgcgacgacgtccccagggccgtacgcaccctcgccgccgcgttcgccgactaccccgccacgcgccacaccgtcgatccggaccgccacatcgagcgggtcaccgagctgcaagaactcttcctcacgcgcgtcgggctcgacatcggcaaggtgtgggtcgcggacgacggcgccgcggtggcggtctggaccacgccggagagcgtcgaagcgggggcggtgttcgccgagatcggcccgcgcatggccgagttgagcggttcccggctggccgcgcagcaacagatggaaggcctcctggcgccgcaccggcccaaggagcccgcgtggttcctggccaccgtcggcgtctcgcccgaccaccagggcaagggtctgggcagcgccgtcgtgctccccggagtggaggcggccgagcgcgccggggtgcccgccttcctggagacctccgcgccccgcaacctccccttctacgagcggctcggcttcaccgtcaccgccgacgtcgaggtgcccgaaggaccgcgcacctggtgcatgacccgcaagcccggtgcctga

SEQ ID NO: 1612 - DNA, 2175 bp, Artificial Sequence
  Synthetic Polynucleotides
atggccttaccagtgaccgccttgctcctgccgctggccttgctgctccacgccgccaggccgcagtctgtggtcacacagcctccatctgtgtctggcgctccaggccagagagtgaccatctcttgtaccggcagcagcagcaatatcggagccggctatgacgtgcactggtatcagcagctccctggcacagcccctaaactgctgatctacggcaacagcaacagacccagcggcgtgcccgatagattttccggctctaagagcggcacaagcgccagcctggctattactggactccaggccgaggacgaggccgactactactgtcagagctacgacagcagcctgagcggcagctatgtgtttggcaccggcaccaagctgacagtgcttggaggcggaggcggaagtggaggcggaggatctggcggcggaggctctgaagttcaactggtggaaaccggcggcaacctggttcaacctggcgcttctctgagactgagctgtgccgccagcggctttagctttagcggaacagccatgcactgggtccgacaggcacctggcaaaggactggaatgggtgtccaccatcagcagcacaggcagaagcacctactaccgggacagcgtgaagggcagattcaccatctccagagacaacagcaagaacaccctgtacctccagatgaacagcctgagaggcgaggacaccgccgtgtactattgtgccagagtgtccttcgactactggggccagggaaccctggtcacagtctcttctacgcgtgagcagaaactgatctcggaagaggatctggcgaagcccaccacgacgccagcgccgcgaccaccaacaccggcgcccaccatcgcgtcgcagcccctgtccctgcgcccagaggcgtgccggccagcggcggggggcgcagtgcacacgagggggctggacttcgcctgtgacatctacatctgggcgcccttggccgggacttgtggggtccttctcctgtcactggttatcaccctttactgcaaacggggcagaaagaaactcctgtatatattcaaacaaccatttatgagaccagtacaaactactcaagaggaagatggctgtagctgccgatttccagaagaagaagaaggaggatgtgaactgagagtgaagttcagcaggagcgcagacgcccccgcgtaccagcagggccagaaccagctctataacgagctgaatctaggacgaagagaggagtacgatgttttggacaagagacgtggccgggaccctgagatggggggaaagccgagaaggaagaaccctcaggaaggcctgtacaatgaactgcagaaagataagatggcggaggcctacagtgagattgggatgaaaggcgagcgccggaggggcaaggggcacgatggcctttaccagggtctcagtacagccaccaaggacacctacgacgcccttcacatgcaggccctgccccctcgctctagtggctccggcgagggcagaggaagtctactaacctgcggagatgtggaagaaaatcctggcccacatatgaccgagtacaagcccacggtgcgcctcgccacccgcgacgacgtccccagggccgtacgcaccctcgccgccgcgttcgccgactaccccgccacgcgccacaccgtcgatccggaccgccacatcgagcgggtcaccgagctgcaagaactcttcctcacgcgcgtcgggctcgacatcggcaaggtgtgggtcgcggacgacggcgccgcggtggcggtctggaccacgccggagagcgtcgaagcgggggcggtgttcgccgagatcggcccgcgcatggccgagttgagcggttcccggctggccgcgcagcaacagatggaaggcctcctggcgccgcaccggcccaaggagcccgcgtggttcctggccaccgtcggcgtctcgcccgaccaccagggcaagggtctgggcagcgccgtcgtgctccccggagtggaggcggccgagcgcgccggggtgcccgccttcctggagacctccgcgccccgcaacctccccttctacgagcggctcggcttcaccgtcaccgccgacgtcgaggtgcccgaaggaccgcgcacctggtgcatgacccgcaagcccggtgcctga

SEQ ID NO: 1613 - DNA, 2181 bp, Artificial Sequence
  Synthetic Polynucleotides
atggccttaccagtgaccgccttgctcctgccgctggccttgctgctccacgccgccaggccgcagtctgtggttacacagcctgcctccgtgtctggctctcctggccagagcatcaccatcagctgtaccggcaccagctctgatgtcggcggctacaattacgtgtcctggtatcagcagcaccccggcaaggcccctaagctgatgatctacgacgtgtccaagaggcccagcggcgtgtccaatagattcagcggcagcaagagcggcaacaccgccagcctgacaatttctggactgcaagccgaggacgaggccgactactactgtagcagctacaccagcagcagcacactggtgtttggcggaggcaccaagctgacagttcttggaggcggaggcggaagtggaggcggaggatctggcggcggaggctctgaagttcagctggttgaaagcggcggagcctttgttcagcctggcggatctctgagactgagctgtgccgccagcggcttcacattttccagctacgccatgacctgggtccgacaggctcctggcaaaggactggaatgggtgtccaccatctccggcagaggcagaagcaccttctacgccgatagcgtgaagggcagattcacaatcagccgggacaacagcaagaacaccctgtacctccagatgaacagcctgagagccgaggataccgccgtgtactactgtgcccggtactatcacgctggcgcctttgatctttggggccagggaacactggtcaccgtgtcatctacgcgtgagcagaaactgatctcggaagaggatctggcgaagcccaccacgacgccagcgccgcgaccaccaacaccggcgcccaccatcgcgtcgcagcccctgtccctgcgcccagaggcgtgccggccagcggcggggggcgcagtgcacacgagggggctggacttcgcctgtgacatctacatctgggcgcccttggccgggacttgtggggtccttctcctgtcactggttatcaccctttactgcaaacggggcagaaagaaactcctgtatatattcaaacaaccatttatgagaccagtacaaactactcaagaggaagatggctgtagctgccgatttccagaagaagaagaaggaggatgtgaactgagagtgaagttcagcaggagcgcagacgcccccgcgtaccagcagggccagaaccagctctataacgagctgaatctaggacgaagagaggagtacgatgttttggacaagagacgtggccgggaccctgagatggggggaaagccgagaaggaagaaccctcaggaaggcctgtacaatgaactgcagaaagataagatggcggaggcctacagtgagattgggatgaaaggcgagcgccggaggggcaaggggcacgatggcctttaccagggtctcagtacagccaccaaggacacctacgacgcccttcacatgcaggccctgccccctcgctctagtggctccggcgagggcagaggaagtctactaacctgcggagatgtggaagaaaatcctggcccacatatgaccgagtacaagcccacggtgcgcctcgccacccgcgacgacgtccccagggccgtacgcaccctcgccgccgcgttcgccgactaccccgccacgcgccacaccgtcgatccggaccgccacatcgagcgggtcaccgagctgcaagaactcttcctcacgcgcgtcgggctcgacatcggcaaggtgtgggtcgcggacgacggcgccgcggtggcggtctggaccacgccggagagcgtcgaagcgggggcggtgttcgccgagatcggcccgcgcatggccgagttgagcggttcccggctggccgcgcagcaacagatggaaggcctcctggcgccgcaccggcccaaggagcccgcgtggttcctggccaccgtcggcgtctcgcccgaccaccagggcaagggtctgggcagcgccgtcgtgctccccggagtggaggcggccgagcgcgccggggtgcccgccttcctggagacctccgcgccccgcaacctccccttctacgagcggctcggcttcaccgtcaccgccgacgtcgaggtgcccgaaggaccgcgcacctggtgcatgacccgcaagcccggtgcctga

SEQ ID NO: 1614 - DNA, 2175 bp, Artificial Sequence
  Synthetic Polynucleotides
atggccttaccagtgaccgccttgctcctgccgctggccttgctgctccacgccgccaggccggacaacatcgagctgacccagagccccgccatcatgagtgcctctccaggcgagcgcgtgaccatgacatgtagcgccagcagcagcatccggtacatctactggtatcagcagaagcccggcagcagccccagactgctgatctacgacaccagcaacgtggcccctggcgtgccctttagattttccggcagcggctccggcaccagctacagcctgaccatcaaccggatggaagccgaggacgccgccacctactattgtcaggaatggagcggctacccctacaccttcggcggaggcaccaagctggacatcaagagaggcggaggcggaagtggaggcggaggatctggcggcggaggctctcaagtgaagctccaggaatctggcggcggactcgtgaagcctggcggctctctgaagctgagctgtgccgccagcggcttcaccttcagcagctacggcatgagctgggtgcgccagacccccgacaagagactggaatgggtggcaaccatcagcagcggcggcagctacacctactaccccgatagcgtgaagggccggttcaccatctccagagacaacgccaagaacaccctgtacctccagatgagcagcctgaagtccgaggataccgccatgtactactgcgccagaggcaactgggagggctggtacttcgatgtgtggggccagggcaccaccgtgaccgtgtcatctacgcgtgagcagaaactgatctcggaagaggatctggcgaagcccaccacgacgccagcgccgcgaccaccaacaccggcgcccaccatcgcgtcgcagcccctgtccctgcgcccagaggcgtgccggccagcggcggggggcgcagtgcacacgagggggctggacttcgcctgtgacatctacatctgggcgcccttggccgggacttgtggggtccttctcctgtcactggttatcaccctttactgcaaacggggcagaaagaaactcctgtatatattcaaacaaccatttatgagaccagtacaaactactcaagaggaagatggctgtagctgccgatttccagaagaagaagaaggaggatgtgaactgagagtgaagttcagcaggagcgcagacgcccccgcgtaccagcagggccagaaccagctctataacgagctgaatctaggacgaagagaggagtacgatgttttggacaagagacgtggccgggaccctgagatggggggaaagccgagaaggaagaaccctcaggaaggcctgtacaatgaactgcagaaagataagatggcggaggcctacagtgagattgggatgaaaggcgagcgccggaggggcaaggggcacgatggcctttaccagggtctcagtacagccaccaaggacacctacgacgcccttcacatgcaggccctgccccctcgctctagtggctccggcgagggcagaggaagtctactaacctgcggagatgtggaagaaaatcctggcccacatatgaccgagtacaagcccacggtgcgcctcgccacccgcgacgacgtccccagggccgtacgcaccctcgccgccgcgttcgccgactaccccgccacgcgccacaccgtcgatccggaccgccacatcgagcgggtcaccgagctgcaagaactcttcctcacgcgcgtcgggctcgacatcggcaaggtgtgggtcgcggacgacggcgccgcggtggcggtctggaccacgccggagagcgtcgaagcgggggcggtgttcgccgagatcggcccgcgcatggccgagttgagcggttcccggctggccgcgcagcaacagatggaaggcctcctggcgccgcaccggcccaaggagcccgcgtggttcctggccaccgtcggcgtctcgcccgaccaccagggcaagggtctgggcagcgccgtcgtgctccccggagtggaggcggccgagcgcgccggggtgcccgccttcctggagacctccgcgccccgcaacctccccttctacgagcggctcggcttcaccgtcaccgccgacgtcgaggtgcccgaaggaccgcgcacctggtgcatgacccgcaagcccggtgcctga

SEQ ID NO: 1615 - DNA, 2205 bp, Artificial Sequence
  Synthetic Polynucleotides
atggccttaccagtgaccgccttgctcctgccgctggccttgctgctccacgccgccaggccggacaacttcatgctgacccagccccacagcgtgtccgagagccctggcaagaccgtgaccatctcctgtaccggcagcggcggcagcatcgacaacaactacgtgcactggtatcagcagaggcccggcagcgcccctaccaccgtgatgttcgaggacaaccagaggcccagcggcgtgcccgatagattcagcggctctatcgacagcagcagcaacagcgccagcctcgtgatctccggcctgaaaaccgaggacgagggcgactactactgccagagcagcgacggctccaaggtggtgtttggcggaggcaccaagctgaccgtgctgggacagggcggaggcggaagtggaggcggaggatctggcggcggaggctctgaagtgcaactggtgcagagcggcggaggctctctgacactgtcttgtgctgcctccggcgtggtgcagcctggcagattcaccttcagcagctacggaatgcactgggtgcgccaggcccctggaaagggactggaatgggtgtccgtgatctcttacgacggcagcaacaagtattacgccgacagcgtgaagggccggttcaccatctccagagacaacagcaagaacaccctgtacctccagatgaacagcctgcggaccgaggacaccgccgtgtactactgtgccaagaccctgtccgctggcgagtggattggaggcggagccttcgatatctggggccacggcacaatggtcaccgtgtcctctacgcgtgagcagaaactgatctcggaagaggatctggcgaagcccaccacgacgccagcgccgcgaccaccaacaccggcgcccaccatcgcgtcgcagcccctgtccctgcgcccagaggcgtgccggccagcggcggggggcgcagtgcacacgagggggctggacttcgcctgtgacatctacatctgggcgcccttggccgggacttgtggggtccttctcctgtcactggttatcaccctttactgcaaacggggcagaaagaaactcctgtatatattcaaacaaccatttatgagaccagtacaaactactcaagaggaagatggctgtagctgccgatttccagaagaagaagaaggaggatgtgaactgagagtgaagttcagcaggagcgcagacgcccccgcgtaccagcagggccagaaccagctctataacgagctgaatctaggacgaagagaggagtacgatgttttggacaagagacgtggccgggaccctgagatggggggaaagccgagaaggaagaaccctcaggaaggcctgtacaatgaactgcagaaagataagatggcggaggcctacagtgagattgggatgaaaggcgagcgccggaggggcaaggggcacgatggcctttaccagggtctcagtacagccaccaaggacacctacgacgcccttcacatgcaggccctgccccctcgctctagtggctccggcgagggcagaggaagtctactaacctgcggagatgtggaagaaaatcctggcccacatatgaccgagtacaagcccacggtgcgcctcgccacccgcgacgacgtccccagggccgtacgcaccctcgccgccgcgttcgccgactaccccgccacgcgccacaccgtcgatccggaccgccacatcgagcgggtcaccgagctgcaagaactcttcctcacgcgcgtcgggctcgacatcggcaaggtgtgggtcgcggacgacggcgccgcggtggcggtctggaccacgccggagagcgtcgaagcgggggcggtgttcgccgagatcggcccgcgcatggccgagttgagcggttcccggctggccgcgcagcaacagatggaaggcctcctggcgccgcaccggcccaaggagcccgcgtggttcctggccaccgtcggcgtctcgcccgaccaccagggcaagggtctgggcagcgccgtcgtgctccccggagtggaggcggccgagcgcgccggggtgcccgccttcctggagacctccgcgccccgcaacctccccttctacgagcggctcggcttcaccgtcaccgccgacgtcgaggtgcccgaaggaccgcgcacctggtgcatgacccgcaagcccggtgcctga

(The sequence listing continues in the following parts.)

1. A cell comprising nucleic acids encoding a chimeric antigen receptor (CAR) and K13-vFLIP signaling protein, wherein the CAR comprises an a) extracellular antigen specific domain, b) a transmembrane domain and c) an intracellular signaling domain comprising an immunoreceptor tyrosine-based activation motif (ITAM); wherein c) is located at the C-terminus of the chimeric receptor.

2. The cell of claim 1, further comprising nucleic acid encoding MC159-vFLIP signaling protein.

3. The cell of claim 1, wherein the CAR further comprises one or more co-stimulatory domains.

4. The cell of claim 1, wherein the cell further comprises nucleic acids encoding scFvs targeting IL6 and/or IL6 receptor alpha.

5. The cell of claim 1, further comprising nucleic acid encoding peptide FX06 so as to mitigate capillary leak associated with CAR therapy.

6. The cell of claim 1, wherein the signaling protein is expressed in fusion with one or more copies of FKBP domain.

7. The cells of claim 6, wherein the activity of the signaling protein is controlled post-tranlationally by dimerization of the FKBP domain in the presence of a dimerizing agent.

8. The cell of claim 7, wherein the dimerizing agent is AP20187.

9. The cell of claim 1, wherein the antigen specific domain of the CAR targets MPL.

10. The cell of claim 1, wherein the antigen specific domain targets two antigens.

11. The cell of claim 10, wherein the two antigens are MPL and CD123.

12. The cell of claim 1, wherein the antigen specific domain of the CAR targets CD19, CD23, Lym1, Lym2, CLEC5A, CDH179b, FLT3, GCC, Muc1, CSF2RA, GFRa4, CD32, IL11Ra, IL13Ra, NYBR1, SLea, CD200R, TGFBetaR2, CD276, TROP2, LAMP1, PTK7, DLL3, CDH1, CDH6, CDH17, CDH19, TSHR and tyrosinase.

13. The cell of claim 9, wherein the antigen specific domain of the CAR targets MPL and comprises one or more scFv fragments selected from 161 (SEQ ID NO: 2500 and 2501), 175 (SEQ ID NO: 2499), 178 (SEQ ID NO: 2503), 111 (SEQ ID NO: 2502), AB317 (SEQ ID NO: 2404), 12E10 (SEQ ID NO: 2505) or huVB22Bw5 (SEQ ID NO: 2506) or ligands selected from extracellular receptor binding domains of hTPO (SEQ ID NO: 2323) or mTPO (SEQ ID NO: 2323).

14. The cell of claim 12, wherein the antigen specific domain of the CAR targets CD19 and comprises one or more scFv fragments selected from CD19Bu12 or CD19MM.

15. The cell of claim 1, wherein the cell is a T-lymphocyte (T-cell).

16. The cells of claim 1, wherein the cells is a Natural Killer (NK) cell.

17. Nucleic acids comprising a first polynucleotide encoding the CAR of claim 1 and a second polynucleotide encoding the signaling protein of claim 1.

18. The nucleic acid of claim 17, further comprising a third polynucleotide encoding the MC159-vFLIP signaling protein.

19. Polypeptides encoded by the nucleic acids of claim 17 or 18.

20. Vectors comprising nucleic acids of claim 17 or 18.

21. A pharmaceutical composition, comprising the cell of claim 1 and a pharmaceutically acceptable carrier.

22. A method of treating a MPL-expressing cancer comprising administering to the subject, a therapeutically effective amount of the cell of claim 13.

23. The method of claim 23, wherein the cancer is a blood cancer.

24. The method of claim 23, wherein the blood cancer is any one or more of acute myeloid leukemia, chronic myeloid leukemia, myelodyplastic syndrome, lymphoma, multiple myeloma and acute lymphocytic leukemia.

25. The method of claim 22, further comprising administering to the subject a tyrosine kinase inhibitor, wherein the inhibitor inhibits the src family of kinases.

26. The method of claim 25, wherein the inhibitor inhibits Lck.

27. The method of claim 26, wherein the inhibitor is any one or more of Dasatinib, Ponatinib or A-770041.

28. A pharmaceutical composition, comprising the nucleic acid of claim 17 or 18 and a pharmaceutically acceptable carrier.

29. A pharmaceutical composition, comprising the polypeptides of claim 19 and a pharmaceutically acceptable carrier.

30. A pharmaceutical composition, comprising the vector of claim 20 and a pharmaceutically acceptable carrier.
